United States Patent Application Publication US 2024/0327476 A1 - sequence listing, part 7

SEQ ID NO: 6902 - DNA, 594 bp, Homo sapiens
  source 1..594: mol_type = unassigned DNA
ctgcatacacttcttggctgtgtgcgctcagcaggacgtgggaggctccggcttcaaggtcgacactcatccaagaggaaggatggccagtatcttttctaagttgctaactggccgcaatgcttctctgctgtttgctaccatgggcaccagtgtcctgaccaccgggtacctgctgaaccggcagaaagtgtgtgccgaggtccgggagcagcctaggctatttcctccaagcgcagactacccagacctgcgcaagcacaacaactgcatggccgagtgcctcacccccgccatttatgccaagcttcgcaacaaggtgacacccaacggctacacgctggaccagtgcatccagactggagtggacaaccctggccaccccttcataaagactgtgggcatggtggctggtgacgaggagtcctatgaggtgtttgctgacctttttgaccccgtcatcaaactaagacacaacggctatgaccccagggtgatgaagcacacaacggatctggatgcatcaaagatcacccaagggcagttcgacgagcattacgtgctgtcttctcgggtgcgcactggccgcagcat

SEQ ID NO: 6903 - DNA, 1655 bp, Homo sapiens
  source 1..1655: mol_type = unassigned DNA
tcagctgccctccagaactcctccctggggacaacccctcccagccaatagcacagcctaggtccccctatataaggccacggctgctggcccttcctttgggtcagtgtcacctccaggatacagacagccccccttcagcccagcccagccaggtctcctacaccgccaccatgccattcggtaacacccacaacaagttcaagctgaattacaagcctgaggaggagtaccccgacctcagcaaacataacaaccacatggccaaggtactgacccttgaactctacaagaagctgcgggacaaggagactccatctggcttcactgtagacgatgtcatccagacaggagtggacaacccaggtcaccccttcatcatgaccgtgggctgcgtggctggtgatgaggagtcctacgaagttttcaaggaactctttgaccccatcatctcggatcgccacgggggctacaaacccactgacaagcacaagactgacctcaaccatgaaaacctcaagggtggagacgacctggaccctaactacgtgctcagcagccgcgtccgcactggccgcagcatcaagggctacacgttgcccccacactgctcccgtggcgagcgccgggcggtggagaagctctctgtggaagctctcaacagcctgacgggcgagttcaaagggaagtactaccctctgaagagcatgacggagaaggagcagcagcagctcatcgatgaccacttcctgttcgacaagcccgtgtccccgctgctgctggcctcaggcatggcccgcgactggcccgacgcccgtggcatctggcacaatgacaacaagagcttcctggtgtgggtgaacgaggaggatcacctccgggtcatctccatggagaaggggggcaacatgaaggaggttttccgccgcttctgcgtagggctgcagaagattgaggagatctttaagaaagctggccaccccttcatgtggaaccagcacctgggctacgtgctcacctgcccatccaacctgggcactgggctgcgtggaggcgtgcatgtgaagctggcgcacctgagcaagcaccccaagttcgaggagatcctcacccgcctgcgtctgcagaagaggggtacaggtggcgtggacacagctgccgtgggctcagtatttgacgtgtccaacgctgatcggctgggctcgtccgaagtagaacaggtgcagctggtggtggatggtgtgaagctcatggtggaaatggagaagaagttggagaaaggccagtccattgacgacatgatccccgcccagaagtaggcgcctgcccacctgccaccgactgctggaacccagccagtgggagggcctggcccaccagagtcctgctccctcactcctcgccccgccccctgtcccagagtcccacctgggggctctctccacccttctcagagttccagtttcaaccagagttccaaccaatgggctccatcctctggattctggccaatgaaatatctccctggcagggtcctcttcttttcccagagctccaccccaaccaggagctctagttaatggagagctcccagcacactcggagcttgtgctttgtctccacgcaaagcgataaataaaagcattggtggcctt

SEQ ID NO: 6904 - DNA, 10798 bp, Homo sapiens
  source 1..10798: mol_type = unassigned DNA
ttttttttaattgaggaatcaacagccgccatcttgtcgcggacccgaccggggcttcgagcgcgatctactcggccccgccggtcccgggccccacaaccgcccgcgcaccccgctccgcccggccggcccgctccgcccggccctcggcgcccgccccggcggccccgctcgcctctcggctcggcctcccggagcccggcggcggcggcggcggcagcggcggcggcggcggcggaacggggggtgggggggccgcggcggcggcggcgaccccgctcggcgcattgtttttcctcacggcggcggcggcggcgggccgcgggccgggagcggagcccggagccccctcgtcgtcgggccgcgagcgaattcattaagtggggcgcggggggggagcgaggcggcggcggcggcggcaccatgttctcggggactgcctgagccgcccggccgggcgccgtcgctgccagccgggcccgggggggcggccgggccgccggggcgcccccaccgcggagtgtcgcgctcgggaggcgggcaggggatgagggggccgcggccggcggcggcggcggcggccgggggcgggcggtgagcgctgcggggcgctgttgctgtggctgagatttggccgccgcctcccccacccggcctgcgccctccctctccctcggcgcccgcccgcccgctcgcggcccgcgctcgctcctctccctcgcagccggcagggcccccgacccccgtccgggccctcgccggcccggccgcccgtgcccggggctgttttcgcgagcaggtgaaaatggctgagaacttgctggacggaccgcccaaccccaaaagagccaaactcagctcgcccggtttctcggcgaatgacagcacagattttggatcattgtttgacttggaaaatgatcttcctgatgagctgatacccaatggaggagaattaggccttttaaacagtgggaaccttgttccagatgctgcttccaaacataaacaactgtcggagcttctacgaggaggcagcggctctagtatcaacccaggaataggaaatgtgagcgccagcagccccgtgcagcagggcctgggtggccaggctcaagggcagccgaacagtgctaacatggccagcctcagtgccatgggcaagagccctctgagccagggagattcttcagcccccagcctgcctaaacaggcagccagcacctctgggcccacccccgctgcctcccaagcactgaatccgcaagcacaaaagcaagtggggctggcgactagcagccctgccacgtcacagactggacctggtatctgcatgaatgctaactttaaccagacccacccaggcctcctcaatagtaactctggccatagcttaattaatcaggcttcacaagggcaggcgcaagtcatgaatggatctcttggggctgctggcagaggaaggggagctggaatgccgtaccctactccagccatgcagggcgcctcgagcagcgtgctggctgagaccctaacgcaggtttccccgcaaatgactggtcacgcgggactgaacaccgcacaggcaggaggcatggccaagatgggaataactgggaacacaagtccatttggacagccctttagtcaagctggagggcagccaatgggagccactggagtgaacccccagttagccagcaaacagagcatggtcaacagtttgcccaccttccctacagatatcaagaatacttcagtcaccaacgtgccaaatatgtctcagatgcaaacatcagtgggaattgtacccacacaagcaattgcaacaggccccactgcagatcctgaaaaacgcaaactgatacagcagcagctggttctactgcttcatgctcataagtgtcagagacgagagcaagcaaacggagaggttcgggcctgctcgctcccgcattgtcgaaccatgaaaaacgttttgaatcacatgacgcattgtcaggctgggaaagcctgccaagttgcccattgtgcatcttcacgacaaatcatctctcattggaagaactgcacacgacatgactgtcctgtttgcctccctttgaaaaatgccagtgacaagcgaaaccaacaaaccatcctggggtctccagctagtggaattcaaaacacaattggttctgttggcacagggcaacagaatgccacttctttaagtaacccaaatcccatagaccccagctccatgcagcgagcctatgctgctctcggactcccctacatgaaccagccccagacgcagctgcagcctcaggttcctggccagcaaccagcacagcctcaaacccaccagcagatgaggactctcaaccccctgggaaataatccaatgaacattccagcaggaggaataacaacagatcagcagcccccaaacttgatttcagaatcagctcttccgacttccctgggggccacaaacccactgatgaacgatggctccaactctggtaacattggaaccctcagcactataccaacagcagctcctccttctagcaccggtgtaaggaaaggctggcacgaacatgtcactcaggacctgcggagccatctagtgcataaactcgtccaagccatcttcccaacacctgatcccgcagctctaaaggatcgccgcatggaaaacctggtagcctatgctaagaaagtggaaggggacatgtacgagtctgccaacagcagggatgaatattatcacttattagcagagaaaatctacaagatacaaaaagaactagaagaaaaacggaggtcgcgtttacataaacaaggcatcttggggaaccagccagccttaccagccccgggggctcagccccctgtgattccacaggcacaacctgtgagacctccaaatggacccctgtccctgccagtgaatcgcatgcaagtttctcaagggatgaattcatttaaccccatgtccttggggaacgtccagttgccacaagcacccatgggacctcgtgcagcctccccaatgaaccactctgtccagatgaacagcatgggctcagtgccagggatggccatttctccttcccgaatgcctcagcctccgaacatgatgggtgcacacaccaacaacatgatggcccaggcgcccgctcagagccagtttctgccacagaaccagttcccgtcatccagcggggcgatgagtgtgggcatggggcagccgccagcccaaacaggcgtgtcacagggacaggtgcctggtgctgctcttcctaaccctctcaacatgctggggcctcaggccagccagctaccttgccctccagtgacacagtcaccactgcacccaacaccgcctcctgcttccacggctgctggcatgccatctctccagcacacgacaccacctgggatgactcctccccagccagcagctcccactcagccatcaactcctgtgtcgtcttccgggcagactcccaccccgactcctggctcagtgcccagtgctacccaaacccagagcacccctacagtccaggcagcagcccaggcccaggtgaccccgcagcctcaaaccccagttcagcccccgtctgtggctacccctcagtcatcgcagcaacagccgacgcctgtgcacgcccagcctcctggcacaccgctttcccaggcagcagccagcattgataacagagtccctaccccctcctcggtggccagcgcagaaaccaattcccagcagccaggacctgacgtacctgtgctggaaatgaagacggagacccaagcagaggacactgagcccgatcctggtgaatccaaaggggagcccaggtctgagatgatggaggaggatttgcaaggagcttcccaagttaaagaagaaacagacatagcagagcagaaatcagaaccaatggaagtggatgaaaagaaacctgaagtgaaagtagaagttaaagaggaagaagagagtagcagtaacggcacagcctctcagtcaacatctccttcgcagccgcgcaaaaaaatctttaaaccagaggagttacgccaggccctcatgccaaccctagaagcactgtatcgacaggacccagagtcattacctttccggcagcctgtagatccccagctcctcggaattccagactattttgacatcgtaaagaatcccatggacctctccaccatcaagcggaagctggacacagggcaataccaagagccctggcagtacgtggacgacgtctggctcatgttcaacaatgcctggctctataatcgcaagacatcccgagtctataagttttgcagtaagcttgcagaggtctttgagcaggaaattgaccctgtcatgcagtcccttggatattgctgtggacgcaagtatgagttttccccacagactttgtgctgctatgggaagcagctgtgtaccattcctcgcgatgctgcctactacagctatcagaataggtatcatttctgtgagaagtgtttcacagagatccagggcgagaatgtgaccctgggtgacgacccttcacagccccagacgacaatttcaaaggatcagtttgaaaagaagaaaaatgataccttagaccccgaacctttcgttgattgcaaggagtgtggccggaagatgcatcagatttgcgttctgcactatgacatcatttggccttcaggttttgtgtgcgacaactgcttgaagaaaactggcagacctcgaaaagaaaacaaattcagtgctaagaggctgcagaccacaagactgggaaaccacttggaagaccgagtgaacaaatttttgcggcgccagaatcaccctgaagccggggaggtttttgtccgagtggtggccagctcagacaagacggtggaggtcaagcccgggatgaagtcacggtttgtggattctggggaaatgtctgaatctttcccatatcgaaccaaagctctgtttgcttttgaggaaattgacggcgtggatgtctgcttttttggaatgcacgtccaagaatacggctctgattgcccccctccaaacacgaggcgtgtgtacatttcttatctggatagtattcatttcttccggccacgttgcctccgcacagccgtttaccatgagatccttattggatatttagagtatgtgaagaaattagggtatgtgacagggcacatctgggcctgtcctccaagtgaaggagatgattacatcttccattgccacccacctgatcaaaaaatacccaagccaaaacgactgcaggagtggtacaaaaagatgctggacaaggcgtttgcagagcggatcatccatgactacaaggatattttcaaacaagcaactgaagacaggctcaccagtgccaaggaactgccctattttgaaggtgatttctggcccaatgtgttagaagagagcattaaggaactagaacaagaagaagaggagaggaaaaaggaagagagcactgcagccagtgaaaccactgagggcagtcagggcgacagcaagaatgccaagaagaagaacaacaagaaaaccaacaagaacaaaagcagcatcagccgcgccaacaagaagaagcccagcatgcccaacgtgtccaatgacctgtcccagaagctgtatgccaccatggagaagcacaaggaggtcttcttcgtgatccacctgcacgctgggcctgtcatcaacaccctgccccccatcgtcgaccccgaccccctgctcagctgtgacctcatggatgggcgcgacgccttcctcaccctcgccagagacaagcactgggagttctcctccttgcgccgctccaagtggtccacgctctgcatgctggtggagctgcacacccagggccaggaccgctttgtctacacctgcaacgagtgcaagcaccacgtggagacgcgctggcactgcactgtgtgcgaggactacgacctctgcatcaactgctataacacgaagagccatgcccataagatggtgaagtgggggctgggcctggatgacgagggcagcagccagggcgagccacagtcaaagagcccccaggagtcacgccggctgagcatccagcgctgcatccagtcgctggtgcacgcgtgccagtgccgcaacgccaactgctcgctgccatcctgccagaagatgaagcgggtggtgcagcacaccaagggctgcaaacgcaagaccaacgggggctgcccggtgtgcaagcagctcatcgccctctgctgctaccacgccaagcactgccaagaaaacaaatgccccgtgcccttctgcctcaacatcaaacacaagctccgccagcagcagatccagcaccgcctgcagcaggcccagctcatgcgccggcggatggccaccatgaacacccgcaacgtgcctcagcagagtctgccttctcctacctcagcaccgcccgggacccccacacagcagcccagcacaccccagacgccgcagccccctgcccagccccaaccctcacccgtgagcatgtcaccagctggcttccccagcgtggcccggactcagccccccaccacggtgtccacagggaagcctaccagccaggtgccggcccccccacccccggcccagccccctcctgcagcggtggaagcggctcggcagatcgagcgtgaggcccagcagcagcagcacctgtaccgggtgaacatcaacaacagcatgcccccaggacgcacgggcatggggaccccggggagccagatggcccccgtgagcctgaatgtgccccgacccaaccaggtgagcgggcccgtcatgcccagcatgcctcccgggcagtggcagcaggcgccccttccccagcagcagcccatgccaggcttgcccaggcctgtgatatccatgcaggcccaggcggccgtggctgggccccggatgcccagcgtgcagccacccaggagcatctcacccagcgctctgcaagacctgctgcggaccctgaagtcgcccagctcccctcagcagcaacagcaggtgctgaacattctcaaatcaaacccgcagctaatggcagctttcatcaaacagcgcacagccaagtacgtggccaatcagcccggcatgcagccccagcctggcctccagtcccagcccggcatgcaaccccagcctggcatgcaccagcagcccagcctgcagaacctgaatgccatgcaggctggcgtgccgcggcccggtgtgcctccacagcagcaggcgatgggaggcctgaacccccagggccaggccttgaacatcatgaacccaggacacaaccccaacatggcgagtatgaatccacagtaccgagaaatgttacggaggcagctgctgcagcagcagcagcaacagcagcagcaacaacagcagcaacagcagcagcagcaagggagtgccggcatggctgggggcatggcggggcacggccagttccagcagcctcaaggacccggaggctacccaccggccatgcagcagcagcagcgcatgcagcagcatctccccctccagggcagctccatgggccagatggcggctcagatgggacagcttggccagatggggcagccggggctgggggcagacagcacccccaacatccagcaagccctgcagcagcggattctgcagcaacagcagatgaagcagcagattgggtccccaggccagccgaaccccatgagcccccagcaacacatgctctcaggacagccacaggcctcgcatctccctggccagcagatcgccacgtcccttagtaaccaggtgcggtctccagcccctgtccagtctccacggccccagtcccagcctccacattccagcccgtcaccacggatacagccccagccttcgccacaccacgtctcaccccagactggttccccccaccccggactcgcagtcaccatggccagctccatagatcagggacacttggggaaccccgaacagagtgcaatgctcccccagctgaacacccccagcaggagtgcgctgtccagcgaactgtccctggtcggggacaccacgggggacacgctagagaagtttgtggagggcttgtagcattgtgagagcatcaccttttccctttcatgttcttggaccttttgtactgaaaatccaggcatctaggttctttttattcctagatggaactgcgacttccgagccatggaagggtggattgatgtttaaagaaacaatacaaagaatatatttttttgttaaaaaccagttgatttaaatatctggtctctctctttggtttttttttggcgggggggtggggggggttcttttttttccgttttgtttttgtttggggggaggggggttttgtttggattctttttgtcgtcattgctggtgactcatgcctttttttaacgggaaaaacaagttcattatattcatattttttatttgtattttcaagactttaaacatttatgtttaaaagtaagaagaaaaataatattcagaactgattcctgaaataatgcaagcttataatgtatcccgataactttgtgatgtttcgggaagatttttttctatagtgaactctgtgggcgtctcccagtattaccctggatgataggaattgactccggcgtgcacacacgtacacacccacacacatctatctatacataatggctgaagccaaacttgtcttgcagatgtagaaattgttgctttgtttctctgataaaactggttttagacaaaaaatagggatgatcactcttagaccatgctaatgttactagagaagaagccttcttttctttcttctatgtgaaacttgaaatgaggaaaagcaattctagtgtaaatcatgcaagcgctctaattcctataaatacgaaactcgagaagattcaatcactgtatagaatggtaaaataccaactcatttcttatatcatattgttaaataaactgtgtgcaacagacaaaaagggtggtccttcttgaattcatgtacatggtattaacacttagtgttcggggttttttgttatgaaaatgctgttttcaacattgtatttggactatgcatgtgttttttccccattgtatataaagtaccgcttaaaattgatataaattactgaggtttttaacatgtattctgttctttaagatccctgtaagaatgtttaaggtttttatttatttatatatattttttgagtctgttctttgtaagacatggttctggttgttcgctcatagcggagaggctggggctgcggttgtggttgtggcggcgtgggtggtggctgggaactgtggcccaggcttagcggccgcccggaggcttttcttcccggagactgaggtgggcgactgaggtgggcggctcagcgttggccccacacattcgaggctcacaggtgattgtcgctcacacagttagggtcgtcagttggtctgaaactgcatttggcccactcctccatcctccctgtccgtcgtagctgccacccccagaggcggcgcttcttcccgtgttcaggcggctccccccccccgtacacgactcccagaatctgaggcagagagtgctccaggctcgcgaggtgctttctgacttccccccaaatcctgccgctgccgcgcagcatgtcccgtgtggcgtttgaggaaatgctgagggacagacaccttggagcaccagctccggtccctgttacagtgagaaaggtcccccacttcgggggatacttgcacttagccacatggtcctgcctcccttggagtccagttccaggctcccttactgagtgggtgagacaagttcacaaaaaccgtaaaactgagaggaggaccatgggcaggggagctgaagttcatcccctaagtctaccacccccagcacccagagaacccactttatccctagtcccccaacaaaggctggtctaggtgggggtgatggtaattttagaaatcacgccccaaatagcttccgtttgggcccttacattcacagataggttttaaatagctgaatacttggtttgggaatctgaattcgaggaacctttctaagaagttggaaaggtccgatctagttttagcacagagctttgaaccttgagttataaaatgcagaataattcaagtaaaaataagaccaccatctggcacccctgaccagcccccattcaccccatcccaggaggggaagcacaggccgggcctccggtggagattgctgccactgctcggcctgctgggttcttaacctccagtgtcctcttcatcttttccacccgtagggaaaccttgagccatgtgttcaaacaagaagtggggctagagcccgagagcagcagctctaagcccacactcagaaagtggcgccctcctggttgtgcagccttttaatgtgggcagtggaggggcctctgtttcaggttatcctggaattcaaaacgttatgtaccaacctcatcctctttggagtctgcatcctgtgcaaccgtcttgggcaatccagatgtcgaaggatgtgaccgagagcatggtctgtggatgctaaccctaagtttgtcgtaaggaaatttctgtaagaaacctggaaagccccaacgctgtgtctcatgctgtatacttaagaggagaagaaaaagtcctatatttgtgatcaaaaagaggaaacttgaaatgtgatggtgtttataataaaagatggtaaaactacttggattcaaa

SEQ ID NO: 6905 - DNA, 10035 bp, Homo sapiens
  source 1..10035: mol_type = unassigned DNA
ctgcggggcgctgttgctgtggctgagatttggccgccgcctcccccacccggcctgcgccctccctctccctcggcgcccgcccgcccgctcgcggcccgcgctcgctcctctccctcgcagccggcagggcccccgacccccgtccgggccctcgccggcccggccgcccgtgcccggggctgttttcgcgagcaggtgaaaatggctgagaacttgctggacggaccgcccaaccccaaaagagccaaactcagctcgcccggtttctcggcgaatgacagcacagattttggatcattgtttgacttggaaaatgatcttcctgatgagctgatacccaatggaggagaattaggccttttaaacagtgggaaccttgttccagatgctgcttccaaacataaacaactgtcggagcttctacgaggaggcagcggctctagtatcaacccaggaataggaaatgtgagcgccagcagccccgtgcagcagggcctgggtggccaggctcaagggcagccgaacagtgctaacatggccagcctcagtgccatgggcaagagccctctgagccagggagattcttcagcccccagcctgcctaaacaggcagccagcacctctgggcccacccccgctgcctcccaagcactgaatccgcaagcacaaaagcaagtggggctggcgactagcagccctgccacgtcacagactggacctggtatctgcatgaatgctaactttaaccagacccacccaggcctcctcaatagtaactctggccatagcttaattaatcaggcttcacaagggcaggcgcaagtcatgaatggatctcttggggctgctggcagaggaaggggagctggaatgccgtaccctactccagccatgcagggcgcctcgagcagcgtgctggctgagaccctaacgcaggtttccccgcaaatgactggtcacgcgggactgaacaccgcacaggcaggaggcatggccaagatgggaataactgggaacacaagtccatttggacagccctttagtcaagctggagggcagccaatgggagccactggagtgaacccccagttagccagcaaacagagcatggtcaacagtttgcccaccttccctacagatatcaagaatacttcagtcaccaacgtgccaaatatgtctcagatgcaaacatcagtgggaattgtacccacacaagcaattgcaacaggccccactgcagatcctgaaaaacgcaaactgatacagcagcagctggttctactgcttcatgctcataagtgtcagagacgagagcaagcaaacggagaggttcgggcctgctcgctcccgcattgtcgaaccatgaaaaacgttttgaatcacatgacgcattgtcaggctgggaaagcctgccaagttgcccattgtgcatcttcacgacaaatcatctctcattggaagaactgcacacgacatgactgtcctgtttgcctccctttgaaaaatgccagtgacaagcgaaaccaacaaaccatcctggggtctccagctagtggaattcaaaacacaattggttctgttggcacagggcaacagaatgccacttctttaagtaacccaaatcccatagaccccagctccatgcagcgagcctatgctgctctcggactcccctacatgaaccagccccagacgcagctgcagcctcaggttcctggccagcaaccagcacagcctcaaacccaccagcagatgaggactctcaaccccctgggaaataatccaatgaacattccagcaggaggaataacaacagatcagcagcccccaaacttgatttcagaatcagctcttccgacttccctgggggccacaaacccactgatgaacgatggctccaactctggtaacattggaaccctcagcactataccaacagcagctcctccttctagcaccggtgtaaggaaaggctggcacgaacatgtcactcaggacctgcggagccatctagtgcataaactcgtccaagccatcttcccaacacctgatcccgcagctctaaaggatcgccgcatggaaaacctggtagcctatgctaagaaagtggaaggggacatgtacgagtctgccaacagcagggatgaatattatcacttattagcagagaaaatctacaagatacaaaaagaactagaagaaaaacggaggtcgcgtttacataaacaaggcatcttggggaaccagccagccttaccagccccgggggctcagccccctgtgattccacaggcacaacctgtgagacctccaaatggacccctgtccctgccagtgaatcgcatgcaagtttctcaagggatgaattcatttaaccccatgtccttggggaacgtccagttgccacaagcacccatgggacctcgtgcagcctccccaatgaaccactctgtccagatgaacagcatgggctcagtgccagggatggccatttctccttcccgaatgcctcagcctccgaacatgatgggtgcacacaccaacaacatgatggcccaggcgcccgctcagagccagtttctgccacagaaccagttcccgtcatccagcggggcgatgagtgtgggcatggggcagccgccagcccaaacaggcgtgtcacagggacaggtgcctggtgctgctcttcctaaccctctcaacatgctggggcctcaggccagccagctaccttgccctccagtgacacagtcaccactgcacccaacaccgcctcctgcttccacggctgctggcatgccatctctccagcacacgacaccacctgggatgactcctccccagccagcagctcccactcagccatcaactcctgtgtcgtcttccgggcagactcccaccccgactcctggctcagtgcccagtgctacccaaacccagagcacccctacagtccaggcagcagcccaggcccaggtgaccccgcagcctcaaaccccagttcagcccccgtctgtggctacccctcagtcatcgcagcaacagccgacgcctgtgcacgcccagcctcctggcacaccgctttcccaggcagcagccagcattgataacagagtccctaccccctcctcggtggccagcgcagaaaccaattcccagcagccaggacctgacgtacctgtgctggaaatgaagacggagacccaagcagaggacactgagcccgatcctggtgaatccaaaggggagcccaggtctgagatgatggaggaggatttgcaaggagcttcccaagttaaagaagaaacagacatagcagagcagaaatcagaaccaatggaagtggatgaaaagaaacctgaagtgaaagtagaagttaaagaggaagaagagagtagcagtaacggcacagcctctcagtcaacatctccttcgcagccgcgcaaaaaaatctttaaaccagaggagttacgccaggccctcatgccaaccctagaagcactgtatcgacaggacccagagtcattacctttccggcagcctgtagatccccagctcctcggaattccagactattttgacatcgtaaagaatcccatggacctctccaccatcaagcggaagctggacacagggcaataccaagagccctggcagtacgtggacgacgtctggctcatgttcaacaatgcctggctctataatcgcaagacatcccgagtctataagttttgcagtaagcttgcagaggtctttgagcaggaaattgaccctgtcatgcagtcccttggatattgctgtggacgcaagtatgagttttccccacagactttgtgctgctatgggaagcagctgtgtaccattcctcgcgatgctgcctactacagctatcagaataggtatcatttctgtgagaagtgtttcacagagatccagggcgagaatgtgaccctgggtgacgacccttcacagccccagacgacaatttcaaaggatcagtttgaaaagaagaaaaatgataccttagaccccgaacctttcgttgattgcaaggagtgtggccggaagatgcatcagatttgcgttctgcactatgacatcatttggccttcaggttttgtgtgcgacaactgcttgaagaaaactggcagacctcgaaaagaaaacaaattcagtgctaagaggctgcagaccacaagactgggaaaccacttggaagaccgagtgaacaaatttttgcggcgccagaatcaccctgaagccggggaggtttttgtccgagtggtggccagctcagacaagacggtggaggtcaagcccgggatgaagtcacggtttgtggattctggggaaatgtctgaatctttcccatatcgaaccaaagctctgtttgcttttgaggaaattgacggcgtggatgtctgcttttttggaatgcacgtccaagaatacggctctgattgcccccctccaaacacgaggcgtgtgtacatttcttatctggatagtattcatttcttccggccacgttgcctccgcacagccgtttaccatgagatccttattggatatttagagtatgtgaagaaattagggtatgtgacagggcacatctgggcctgtcctccaagtgaaggagatgattacatcttccattgccacccacctgatcaaaaaatacccaagccaaaacgactgcaggagtggtacaaaaagatgctggacaaggcgtttgcagagcggatcatccatgactacaaggatattttcaaacaagcaactgaagacaggctcaccagtgccaaggaactgccctattttgaaggtgatttctggcccaatgtgttagaagagagcattaaggaactagaacaagaagaagaggagaggaaaaaggaagagagcactgcagccagtgaaaccactgaggtcttcttcgtgatccacctgcacgctgggcctgtcatcaacaccctgccccccatcgtcgaccccgaccccctgctcagctgtgacctcatggatgggcgcgacgccttcctcaccctcgccagagacaagcactgggagttctcctccttgcgccgctccaagtggtccacgctctgcatgctggtggagctgcacacccagggccaggaccgctttgtctacacctgcaacgagtgcaagcaccacgtggagacgcgctggcactgcactgtgtgcgaggactacgacctctgcatcaactgctataacacgaagagccatgcccataagatggtgaagtgggggctgggcctggatgacgagggcagcagccagggcgagccacagtcaaagagcccccaggagtcacgccggctgagcatccagcgctgcatccagtcgctggtgcacgcgtgccagtgccgcaacgccaactgctcgctgccatcctgccagaagatgaagcgggtggtgcagcacaccaagggctgcaaacgcaagaccaacgggggctgcccggtgtgcaagcagctcatcgccctctgctgctaccacgccaagcactgccaagaaaacaaatgccccgtgcccttctgcctcaacatcaaacacaagctccgccagcagcagatccagcaccgcctgcagcaggcccagctcatgcgccggcggatggccaccatgaacacccgcaacgtgcctcagcagagtctgccttctcctacctcagcaccgcccgggacccccacacagcagcccagcacaccccagacgccgcagccccctgcccagccccaaccctcacccgtgagcatgtcaccagctggcttccccagcgtggcccggactcagccccccaccacggtgtccacagggaagcctaccagccaggtgccggcccccccacccccggcccagccccctcctgcagcggtggaagcggctcggcagatcgagcgtgaggcccagcagcagcagcacctgtaccgggtgaacatcaacaacagcatgcccccaggacgcacgggcatggggaccccggggagccagatggcccccgtgagcctgaatgtgccccgacccaaccaggtgagcgggcccgtcatgcccagcatgcctcccgggcagtggcagcaggcgccccttccccagcagcagcccatgccaggcttgcccaggcctgtgatatccatgcaggcccaggcggccgtggctgggccccggatgcccagcgtgcagccacccaggagcatctcacccagcgctctgcaagacctgctgcggaccctgaagtcgcccagctcccctcagcagcaacagcaggtgctgaacattctcaaatcaaacccgcagctaatggcagctttcatcaaacagcgcacagccaagtacgtggccaatcagcccggcatgcagccccagcctggcctccagtcccagcccggcatgcaaccccagcctggcatgcaccagcagcccagcctgcagaacctgaatgccatgcaggctggcgtgccgcggcccggtgtgcctccacagcagcaggcgatgggaggcctgaacccccagggccaggccttgaacatcatgaacccaggacacaaccccaacatggcgagtatgaatccacagtaccgagaaatgttacggaggcagctgctgcagcagcagcagcaacagcagcagcaacaacagcagcaacagcagcagcagcaagggagtgccggcatggctgggggcatggcggggcacggccagttccagcagcctcaaggacccggaggctacccaccggccatgcagcagcagcagcgcatgcagcagcatctccccctccagggcagctccatgggccagatggcggctcagatgggacagcttggccagatggggcagccggggctgggggcagacagcacccccaacatccagcaagccctgcagcagcggattctgcagcaacagcagatgaagcagcagattgggtccccaggccagccgaaccccatgagcccccagcaacacatgctctcaggacagccacaggcctcgcatctccctggccagcagatcgccacgtcccttagtaaccaggtgcggtctccagcccctgtccagtctccacggccccagtcccagcctccacattccagcccgtcaccacggatacagccccagccttcgccacaccacgtctcaccccagactggttccccccaccccggactcgcagtcaccatggccagctccatagatcagggacacttggggaaccccgaacagagtgcaatgctcccccagctgaacacccccagcaggagtgcgctgtccagcgaactgtccctggtcggggacaccacgggggacacgctagagaagtttgtggagggcttgtagcattgtgagagcatcaccttttccctttcatgttcttggaccttttgtactgaaaatccaggcatctaggttctttttattcctagatggaactgcgacttccgagccatggaagggtggattgatgtttaaagaaacaatacaaagaatatatttttttgttaaaaaccagttgatttaaatatctggtctctctctttggtttttttttggcgggggggtggggggggttcttttttttccgttttgtttttgtttggggggaggggggttttgtttggattctttttgtcgtcattgctggtgactcatgcctttttttaacgggaaaaacaagttcattatattcatattttttatttgtattttcaagactttaaacatttatgtttaaaagtaagaagaaaaataatattcagaactgattcctgaaataatgcaagcttataatgtatcccgataactttgtgatgtttcgggaagatttttttctatagtgaactctgtgggcgtctcccagtattaccctggatgataggaattgactccggcgtgcacacacgtacacacccacacacatctatctatacataatggctgaagccaaacttgtcttgcagatgtagaaattgttgctttgtttctctgataaaactggttttagacaaaaaatagggatgatcactcttagaccatgctaatgttactagagaagaagccttcttttctttcttctatgtgaaacttgaaatgaggaaaagcaattctagtgtaaatcatgcaagcgctctaattcctataaatacgaaactcgagaagattcaatcactgtatagaatggtaaaataccaactcatttcttatatcatattgttaaataaactgtgtgcaacagacaaaaagggtggtccttcttgaattcatgtacatggtattaacacttagtgttcggggttttttgttatgaaaatgctgttttcaacattgtatttggactatgcatgtgttttttccccattgtatataaagtaccgcttaaaattgatataaattactgaggtttttaacatgtattctgttctttaagatccctgtaagaatgtttaaggtttttatttatttatatatattttttgagtctgttctttgtaagacatggttctggttgttcgctcatagcggagaggctggggctgcggttgtggttgtggcggcgtgggtggtggctgggaactgtggcccaggcttagcggccgcccggaggcttttcttcccggagactgaggtgggcgactgaggtgggcggctcagcgttggccccacacattcgaggctcacaggtgattgtcgctcacacagttagggtcgtcagttggtctgaaactgcatttggcccactcctccatcctccctgtccgtcgtagctgccacccccagaggcggcgcttcttcccgtgttcaggcggctccccccccccgtacacgactcccagaatctgaggcagagagtgctccaggctcgcgaggtgctttctgacttccccccaaatcctgccgctgccgcgcagcatgtcccgtgtggcgtttgaggaaatgctgagggacagacaccttggagcaccagctccggtccctgttacagtgagaaaggtcccccacttcgggggatacttgcacttagccacatggtcctgcctcccttggagtccagttccaggctcccttactgagtgggtgagacaagttcacaaaaaccgtaaaactgagaggaggaccatgggcaggggagctgaagttcatcccctaagtctaccacccccagcacccagagaacccactttatccctagtcccccaacaaaggctggtctaggtgggggtgatggtaattttagaaatcacgccccaaatagcttccgtttgggcccttacattcacagataggttttaaatagctgaatacttggtttgggaatctgaattcgaggaacctttctaagaagttggaaaggtccgatctagttttagcacagagctttgaaccttgagttataaaatgcagaataattcaagtaaaaataagaccaccatctggcacccctgaccagcccccattcaccccatcccaggaggggaagcacaggccgggcctccggtggagattgctgccactgctcggcctgctgggttcttaacctccagtgtcctcttcatcttttccacccgtagggaaaccttgagccatgtgttcaaacaagaagtggggctagagcccgagagcagcagctctaagcccacactcagaaagtggcgccctcctggttgtgcagccttttaatgtgggcagtggaggggcctctgtttcaggttatcctggaattcaaaacgttatgtaccaacctcatcctctttggagtctgcatcctgtgcaaccgtcttgggcaatccagatgtcgaaggatgtgaccgagagcatggtctgtggatgctaaccctaagtttgtcgtaaggaaatttctgtaagaaacctggaaagccccaacgctgtgtctcatgctgtatacttaagaggagaagaaaaagtcctatatttgtgatcaaaaagaggaaacttgaaatgtgatggtgtttataataaaagatggtaaaactacttggattcaaa

SEQ ID NO: 6906 - DNA, 10083 bp, Homo sapiens
  source 1..10083: mol_type = unassigned DNA
ctgcggggcgctgttgctgtggctgagatttggccgccgcctcccccacccggcctgcgccctccctctccctcggcgcccgcccgcccgctcgcggcccgcgctcgctcctctccctcgcagccggcagggcccccgacccccgtccgggccctcgccggcccggccgcccgtgcccggggctgttttcgcgagcaggtgaaaatggctgagaacttgctggacggaccgcccaaccccaaaagagccaaactcagctcgcccggtttctcggcgaatgacagcacagattttggatcattgtttgacttggaaaatgatcttcctgatgagctgatacccaatggaggagaattaggccttttaaacagtgggaaccttgttccagatgctgcttccaaacataaacaactgtcggagcttctacgaggaggcagcggctctagtatcaacccaggaataggaaatgtgagcgccagcagccccgtgcagcagggcctgggtggccaggctcaagggcagccgaacagtgctaacatggccagcctcagtgccatgggcaagagccctctgagccagggagattcttcagcccccagcctgcctaaacaggcagccagcacctctgggcccacccccgctgcctcccaagcactgaatccgcaagcacaaaagcaagtggggctggcgactagcagccctgccacgtcacagactggacctggtatctgcatgaatgctaactttaaccagacccacccaggcctcctcaatagtaactctggccatagcttaattaatcaggcttcacaagggcaggcgcaagtcatgaatggatctcttggggctgctggcagaggaaggggagctggaatgccgtaccctactccagccatgcagggcgcctcgagcagcgtgctggctgagaccctaacgcaggtttccccgcaaatgactggtcacgcgggactgaacaccgcacaggcaggaggcatggccaagatgggaataactgggaacacaagtccatttggacagccctttagtcaagctggagggcagccaatgggagccactggagtgaacccccagttagccagcaaacagagcatggtcaacagtttgcccaccttccctacagatatcaagaatacttcagtcaccaacgtgccaaatatgtctcagatgcaaacatcagtgggaattgtacccacacaagcaattgcaacaggccccactgcagatcctgaaaaacgcaaactgatacagcagcagctggttctactgcttcatgctcataagtgtcagagacgagagcaagcaaacggagaggttcgggcctgctcgctcccgcattgtcgaaccatgaaaaacgttttgaatcacatgacgcattgtcaggctgggaaagcctgccaagccatcctggggtctccagctagtggaattcaaaacacaattggttctgttggcacagggcaacagaatgccacttctttaagtaacccaaatcccatagaccccagctccatgcagcgagcctatgctgctctcggactcccctacatgaaccagccccagacgcagctgcagcctcaggttcctggccagcaaccagcacagcctcaaacccaccagcagatgaggactctcaaccccctgggaaataatccaatgaacattccagcaggaggaataacaacagatcagcagcccccaaacttgatttcagaatcagctcttccgacttccctgggggccacaaacccactgatgaacgatggctccaactctggtaacattggaaccctcagcactataccaacagcagctcctccttctagcaccggtgtaaggaaaggctggcacgaacatgtcactcaggacctgcggagccatctagtgcataaactcgtccaagccatcttcccaacacctgatcccgcagctctaaaggatcgccgcatggaaaacctggtagcctatgctaagaaagtggaaggggacatgtacgagtctgccaacagcagggatgaatattatcacttattagcagagaaaatctacaagatacaaaaagaactagaagaaaaacggaggtcgcgtttacataaacaaggcatcttggggaaccagccagccttaccagccccgggggctcagccccctgtgattccacaggcacaacctgtgagacctccaaatggacccctgtccctgccagtgaatcgcatgcaagtttctcaagggatgaattcatttaaccccatgtccttggggaacgtccagttgccacaagcacccatgggacctcgtgcagcctccccaatgaaccactctgtccagatgaacagcatgggctcagtgccagggatggccatttctccttcccgaatgcctcagcctccgaacatgatgggtgcacacaccaacaacatgatggcccaggcgcccgctcagagccagtttctgccacagaaccagttcccgtcatccagcggggcgatgagtgtgggcatggggcagccgccagcccaaacaggcgtgtcacagggacaggtgcctggtgctgctcttcctaaccctctcaacatgctggggcctcaggccagccagctaccttgccctccagtgacacagtcaccactgcacccaacaccgcctcctgcttccacggctgctggcatgccatctctccagcacacgacaccacctgggatgactcctccccagccagcagctcccactcagccatcaactcctgtgtcgtcttccgggcagactcccaccccgactcctggctcagtgcccagtgctacccaaacccagagcacccctacagtccaggcagcagcccaggcccaggtgaccccgcagcctcaaaccccagttcagcccccgtctgtggctacccctcagtcatcgcagcaacagccgacgcctgtgcacgcccagcctcctggcacaccgctttcccaggcagcagccagcattgataacagagtccctaccccctcctcggtggccagcgcagaaaccaattcccagcagccaggacctgacgtacctgtgctggaaatgaagacggagacccaagcagaggacactgagcccgatcctggtgaatccaaaggggagcccaggtctgagatgatggaggaggatttgcaaggagcttcccaagttaaagaagaaacagacatagcagagcagaaatcagaaccaatggaagtggatgaaaagaaacctgaagtgaaagtagaagttaaagaggaagaagagagtagcagtaacggcacagcctctcagtcaacatctccttcgcagccgcgcaaaaaaatctttaaaccagaggagttacgccaggccctcatgccaaccctagaagcactgtatcgacaggacccagagtcattacctttccggcagcctgtagatccccagctcctcggaattccagactattttgacatcgtaaagaatcccatggacctctccaccatcaagcggaagctggacacagggcaataccaagagccctggcagtacgtggacgacgtctggctcatgttcaacaatgcctggctctataatcgcaagacatcccgagtctataagttttgcagtaagcttgcagaggtctttgagcaggaaattgaccctgtcatgcagtcccttggatattgctgtggacgcaagtatgagttttccccacagactttgtgctgctatgggaagcagctgtgtaccattcctcgcgatgctgcctactacagctatcagaataggtatcatttctgtgagaagtgtttcacagagatccagggcgagaatgtgaccctgggtgacgacccttcacagccccagacgacaatttcaaaggatcagtttgaaaagaagaaaaatgataccttagaccccgaacctttcgttgattgcaaggagtgtggccggaagatgcatcagatttgcgttctgcactatgacatcatttggccttcaggttttgtgtgcgacaactgcttgaagaaaactggcagacctcgaaaagaaaacaaattcagtgctaagaggctgcagaccacaagactgggaaaccacttggaagaccgagtgaacaaatttttgcggcgccagaatcaccctgaagccggggaggtttttgtccgagtggtggccagctcagacaagacggtggaggtcaagcccgggatgaagtcacggtttgtggattctggggaaatgtctgaatctttcccatatcgaaccaaagctctgtttgcttttgaggaaattgacggcgtggatgtctgcttttttggaatgcacgtccaagaatacggctctgattgcccccctccaaacacgaggcgtgtgtacatttcttatctggatagtattcatttcttccggccacgttgcctccgcacagccgtttaccatgagatccttattggatatttagagtatgtgaagaaattagggtatgtgacagggcacatctgggcctgtcctccaagtgaaggagatgattacatcttccattgccacccacctgatcaaaaaatacccaagccaaaacgactgcaggagtggtacaaaaagatgctggacaaggcgtttgcagagcggatcatccatgactacaaggatattttcaaacaagcaactgaagacaggctcaccagtgccaaggaactgccctattttgaaggtgatttctggcccaatgtgttagaagagagcattaaggaactagaacaagaagaagaggagaggaaaaaggaagagagcactgcagccagtgaaaccactgagggcagtcagggcgacagcaagaatgccaagaagaagaacaacaagaaaaccaacaagaacaaaagcagcatcagccgcgccaacaagaagaagcccagcatgcccaacgtgtccaatgacctgtcccagaagctgtatgccaccatggagaagcacaaggaggtcttcttcgtgatccacctgcacgctgggcctgtcatcaacaccctgccccccatcgtcgaccccgaccccctgctcagctgtgacctcatggatgggcgcgacgccttcctcaccctcgccagagacaagcactgggagttctcctccttgcgccgctccaagtggtccacgctctgcatgctggtggagctgcacacccagggccaggaccgctttgtctacacctgcaacgagtgcaagcaccacgtggagacgcgctggcactgcactgtgtgcgaggactacgacctctgcatcaactgctataacacgaagagccatgcccataagatggtgaagtgggggctgggcctggatgacgagggcagcagccagggcgagccacagtcaaagagcccccaggagtcacgccggctgagcatccagcgctgcatccagtcgctggtgcacgcgtgccagtgccgcaacgccaactgctcgctgccatcctgccagaagatgaagcgggtggtgcagcacaccaagggctgcaaacgcaagaccaacgggggctgcccggtgtgcaagcagctcatcgccctctgctgctaccacgccaagcactgccaagaaaacaaatgccccgtgcccttctgcctcaacatcaaacacaagctccgccagcagcagatccagcaccgcctgcagcaggcccagctcatgcgccggcggatggccaccatgaacacccgcaacgtgcctcagcagagtctgccttctcctacctcagcaccgcccgggacccccacacagcagcccagcacaccccagacgccgcagccccctgcccagccccaaccctcacccgtgagcatgtcaccagctggcttccccagcgtggcccggactcagccccccaccacggtgtccacagggaagcctaccagccaggtgccggcccccccacccccggcccagccccctcctgcagcggtggaagcggctcggcagatcgagcgtgaggcccagcagcagcagcacctgtaccgggtgaacatcaacaacagcatgcccccaggacgcacgggcatggggaccccggggagccagatggcccccgtgagcctgaatgtgccccgacccaaccaggtgagcgggcccgtcatgcccagcatgcctcccgggcagtggcagcaggcgccccttccccagcagcagcccatgccaggcttgcccaggcctgtgatatccatgcaggcccaggcggccgtggctgggccccggatgcccagcgtgcagccacccaggagcatctcacccagcgctctgcaagacctgctgcggaccctgaagtcgcccagctcccctcagcagcaacagcaggtgctgaacattctcaaatcaaacccgcagctaatggcagctttcatcaaacagcgcacagccaagtacgtggccaatcagcccggcatgcagccccagcctggcctccagtcccagcccggcatgcaaccccagcctggcatgcaccagcagcccagcctgcagaacctgaatgccatgcaggctggcgtgccgcggcccggtgtgcctccacagcagcaggcgatgggaggcctgaacccccagggccaggccttgaacatcatgaacccaggacacaaccccaacatggcgagtatgaatccacagtaccgagaaatgttacggaggcagctgctgcagcagcagcagcaacagcagcagcaacaacagcagcaacagcagcagcagcaagggagtgccggcatggctgggggcatggcggggcacggccagttccagcagcctcaaggacccggaggctacccaccggccatgcagcagcagcagcgcatgcagcagcatctccccctccagggcagctccatgggccagatggcggctcagatgggacagcttggccagatggggcagccggggctgggggcagacagcacccccaacatccagcaagccctgcagcagcggattctgcagcaacagcagatgaagcagcagattgggtccccaggccagccgaaccccatgagcccccagcaacacatgctctcaggacagccacaggcctcgcatctccctggccagcagatcgccacgtcccttagtaaccaggtgcggtctccagcccctgtccagtctccacggccccagtcccagcctccacattccagcccgtcaccacggatacagccccagccttcgccacaccacgtctcaccccagactggttccccccaccccggactcgcagtcaccatggccagctccatagatcagggacacttggggaaccccgaacagagtgcaatgctcccccagctgaacacccccagcaggagtgcgctgtccagcgaactgtccctggtcggggacaccacgggggacacgctagagaagtttgtggagggcttgtagcattgtgagagcatcaccttttccctttcatgttcttggaccttttgtactgaaaatccaggcatctaggttctttttattcctagatggaactgcgacttccgagccatggaagggtggattgatgtttaaagaaacaatacaaagaatatatttttttgttaaaaaccagttgatttaaatatctggtctctctctttggtttttttttggcgggggggtggggggggttcttttttttccgttttgtttttgtttggggggaggggggttttgtttggattctttttgtcgtcattgctggtgactcatgcctttttttaacgggaaaaacaagttcattatattcatattttttatttgtattttcaagactttaaacatttatgtttaaaagtaagaagaaaaataatattcagaactgattcctgaaataatgcaagcttataatgtatcccgataactttgtgatgtttcgggaagatttttttctatagtgaactctgtgggcgtctcccagtattaccctggatgataggaattgactccggcgtgcacacacgtacacacccacacacatctatctatacataatggctgaagccaaacttgtcttgcagatgtagaaattgttgctttgtttctctgataaaactggttttagacaaaaaatagggatgatcactcttagaccatgctaatgttactagagaagaagccttcttttctttcttctatgtgaaacttgaaatgaggaaaagcaattctagtgtaaatcatgcaagcgctctaattcctataaatacgaaactcgagaagattcaatcactgtatagaatggtaaaataccaactcatttcttatatcatattgttaaataaactgtgtgcaacagacaaaaagggtggtccttcttgaattcatgtacatggtattaacacttagtgttcggggttttttgttatgaaaatgctgttttcaacattgtatttggactatgcatgtgttttttccccattgtatataaagtaccgcttaaaattgatataaattactgaggtttttaacatgtattctgttctttaagatccctgtaagaatgtttaaggtttttatttatttatatatattttttgagtctgttctttgtaagacatggttctggttgttcgctcatagcggagaggctggggctgcggttgtggttgtggcggcgtgggtggtggctgggaactgtggcccaggcttagcggccgcccggaggcttttcttcccggagactgaggtgggcgactgaggtgggcggctcagcgttggccccacacattcgaggctcacaggtgattgtcgctcacacagttagggtcgtcagttggtctgaaactgcatttggcccactcctccatcctccctgtccgtcgtagctgccacccccagaggcggcgcttcttcccgtgttcaggcggctccccccccccgtacacgactcccagaatctgaggcagagagtgctccaggctcgcgaggtgctttctgacttccccccaaatcctgccgctgccgcgcagcatgtcccgtgtggcgtttgaggaaatgctgagggacagacaccttggagcaccagctccggtccctgttacagtgagaaaggtcccccacttcgggggatacttgcacttagccacatggtcctgcctcccttggagtccagttccaggctcccttactgagtgggtgagacaagttcacaaaaaccgtaaaactgagaggaggaccatgggcaggggagctgaagttcatcccctaagtctaccacccccagcacccagagaacccactttatccctagtcccccaacaaaggctggtctaggtgggggtgatggtaattttagaaatcacgccccaaatagcttccgtttgggcccttacattcacagataggttttaaatagctgaatacttggtttgggaatctgaattcgaggaacctttctaagaagttggaaaggtccgatctagttttagcacagagctttgaaccttgagttataaaatgcagaataattcaagtaaaaataagaccaccatctggcacccctgaccagcccccattcaccccatcccaggaggggaagcacaggccgggcctccggtggagattgctgccactgctcggcctgctgggttcttaacctccagtgtcctcttcatcttttccacccgtagggaaaccttgagccatgtgttcaaacaagaagtggggctagagcccgagagcagcagctctaagcccacactcagaaagtggcgccctcctggttgtgcagccttttaatgtgggcagtggaggggcctctgtttcaggttatcctggaattcaaaacgttatgtaccaacctcatcctctttggagtctgcatcctgtgcaaccgtcttgggcaatccagatgtcgaaggatgtgaccgagagcatggtctgtggatgctaaccctaagtttgtcgtaaggaaatttctgtaagaaacctggaaagccccaacgctgtgtctcatgctgtatacttaagaggagaagaaaaagtcctatatttgtgatcaaaaagaggaaacttgaaatgtgatggtgtttataataaaagatggtaaaactacttggattcaaa

SEQ ID NO: 6907 - DNA, 10083 bp, Homo sapiens; identical to SEQ ID NO: 6906
  source 1..10083: mol_type = unassigned DNA

SEQ ID NO: 6908 - DNA, 1870 bp, Homo sapiens
  source 1..1870: mol_type = unassigned DNA
ccagccggcgcttgcgcggtggcacgggcgagtgggggggcgaggaggtggaggaggaggaggaggaggaggaggtggcggcgagaagatggcgacttcgaacaatccgcggaaattcagcgagaagatcgcgctgcacaatcagaagcaggcggaggagacggcggccttcgaggaggtcatgaaggacctgagcctgacgcgggccgcgcggctccagctccagaaatcccagtacctgcaactgggccccagccgaggccagtactatggcgggtccctgcccaacgtgaaccagatcgggagtggcaccatggacctgcccttccagacccccttccaatcctcgggcctggacaccagccggaccacccggcaccatgggctggtggacagggtgtaccgggagcgtggccggctcggctccccacaccgccggcccctgtcagtggacaaacacggacggcaggccgacagctgcccctatggcaccatgtacctctcaccacccgcggacaccagctggagaaggaccaattctgactccgccctgcaccagagcacaatgacgcccacgcagccagaatcctttagcagtgggtcccaggacgtgcaccagaaaagagtcttactgttaacagtcccaggaatggaagagaccacatcagaggcagacaaaaacctttccaagcaagcatgggacaccaagaagacggggtccaggcccaagtcctgtgaggtccccggaatcaacatcttcccgtctgccgaccaggaaaacactacagccctgatccccgccacccacaacacaggggggtccctgcccgacctgaccaacatccacttcccctccccgctcccgaccccgctggaccccgaggagcccaccttccctgcactgagcagctccagcagcaccggcaacctcgcggccaacctgacgcacctgggcatcggtggcgccggccagggaatgagcacacctggctcctctccacagcaccgcccagctggcgtcagccccctgtccctgagcacagaggcaaggcgtcagcaggcatcgcccaccctgtccccgctgtcacccatcactcaggctgtagccatggacgccctgtctctggagcagcagctgccctacgccttcttcacccaggcgggctcccagcagccaccgccgcagccccagcccccgccgcctcctccacccgcgtcccagcagccaccacccccgccacccccacaggcgcccgtccgcctgccccctggtggccccctgttgcccagcgccagcctgactcgtgggccacagccgcccccgcttgcagtcacggtaccgtcctctctcccccagtcccccccagagaaccctggccagccatcgatggggatcgacatcgcctcggcgccggctctgcagcagtaccgcactagcgccggctccccggccaaccagtctcccacctcgccagtctccaatcaaggcttctccccagggagctccccgcaactggagcagttcaacatgatggagaacgccatcagctccagcagcctgtacagcccgggctccacactcaactactcgcaggcggccatgatgggcctcacgggcagccacgggagcctgccggactcgcagcaactgggatacgccagccacagtggcatccccaacatcatcctcacagtgacaggagagtccccccccagcctctctaaagaactgaccagccaccgaggacaccttccggatggaccgcctgtgagcgggcacgccggcaccctgccgctcagccgtcccgacggcgcctccccagcccggggacggccgtgctccgtccctcgccaacggccgagcttgtga

SEQ ID NO: 6909 - DNA, 6943 bp, Homo sapiens
  source 1..6943: mol_type = unassigned DNA
ccagccggcgcttgcgcggtggcacgggcgagtgggggggcgaggaggtggaggaggaggaggaggaggaggaggtggcggcgagaagatggcgacttcgaacaatccgcggaaattcagcgagaagatcgcgctgcacaatcagaagcaggcggaggagacggcggccttcgaggaggtcatgaaggacctgagcctgacgcgggccgcgcggctccagctccagaaatcccagtacctgcaactgggccccagccgaggccagtactatggcgggtccctgcccaacgtgaaccagatcgggagtggcaccatggacctgcccttccagacccccttccaatcctcgggcctggacaccagccggaccacccggcaccatgggctggtggacagggtgtaccgggagcgtggccggctcggctccccacaccgccggcccctgtcagtggacaaacacggacggcaggccgacagctgcccctatggcaccatgtacctctcaccacccgcggacaccagctggagaaggaccaattctgactccgccctgcaccagagcacaatgacgcccacgcagccagaatcctttagcagtgggtcccaggacgtgcaccagaaaagagtcttactgttaacagtcccaggaatggaagagaccacatcagaggcagacaaaaacctttccaagcaagcatgggacaccaagaagacggggtccaggcccaagtcctgtgaggtccccggaatcaacatcttcccgtctgccgaccaggaaaacactacagccctgatccccgccacccacaacacaggggggtccctgcccgacctgaccaacatccacttcccctccccgctcccgaccccgctggaccccgaggagcccaccttccctgcactgagcagctccagcagcaccggcaacctcgcggccaacctgacgcacctgggcatcggtggcgccggccagggaatgagcacacctggctcctctccacagcaccgcccagctggcgtcagccccctgtccctgagcacagaggcaaggcgtcagcaggcatcgcccaccctgtccccgctgtcacccatcactcaggctgtagccatggacgccctgtctctggagcagcagctgccctacgccttcttcacccaggcgggctcccagcagccaccgccgcagccccagcccccgccgcctcctccacccgcgtcccagcagccaccacccccgccacccccacaggcgcccgtccgcctgccccctggtggccccctgttgcccagcgccagcctgactcgtgggccacagccgcccccgcttgcagtcacggtaccgtcctctctcccccagtcccccccagagaaccctggccagccatcgatggggatcgacatcgcctcggcgccggctctgcagcagtaccgcactagcgccggctccccggccaaccagtctcccacctcgccagtctccaatcaaggcttctccccagggagctccccgcaacacacttccaccctgggcagcgtgtttggggacgcgtactatgagcagcagatggcggccaggcaggccaatgctctgtcccaccagctggagcagttcaacatgatggagaacgccatcagctccagcagcctgtacagcccgggctccacactcaactactcgcaggcggccatgatgggcctcacgggcagccacgggagcctgccggactcgcagcaactgggatacgccagccacagtggcatccccaacatcatcctcacagtgacaggagagtccccccccagcctctctaaagaactgaccagctctctggccggggtcggcgacgtcagcttcgactccgacagccagtttcccctggacgaactcaagatcgaccccctgaccctcgacggactgcacatgctcaacgaccccgacatggttctggccgacccagccaccgaggacaccttccggatggaccgcctgtgagcgggcacgccggcaccctgccgctcagccgtcccgacggcgcctccccagcccggggacggccgtgctccgtccctcgccaacggccgagcttgtgattctgagcttgcaatgccgccaagcgccccccgccagcccgcccccggttgtccacctcccgcgaagcccaatcgcgaggccgcgagccgggccgtccacccacccgcccgcccagggctgggctgggatcggaggccgtgagcctcccgcccctgcagaccctccctgcactggctccctcgcccccagccccggggcctgagccgtcccctgtaagatgcgggaagtgtcagctcccggcgtggcgggcaggctcaggggaggggcgcgcatggtccgccagggctgtgggccgtggcgcattttccgactgtttgtccagctctcactgccttccttggttcccggtcccccagcccatccgccatccccagcccgtggtcaggtagagagtgagccccacgccgccccagggaggaggcgccagagcgcggggcagacgcaaagtgaaataaacactattttgacggctgtcttttatatttctgagcacacacagagccctggcgtccaccggggcaggcgcaaagtggacagagcatgcagggcggcggacccccccacgaccctcctcgccctgtctccatcccctcgaagccctgcctcaccgcaggcaggcccatcggtggccacctttgccgggaagtgaccggaaggccccgtgaggggtcgaacgcggaggcaggggttacctcttggggctttacaatccgtggcccctcctgtcctgcactgtggtcaccggtcctgtcatagatgctgttaatttaaggtacaggcagaggtggccaggggagtttcattgtggtttttttttccttttagtttctagttacattttggttgtagatgactcgcttaatcttttaagccaacacttgcctgagagcatgtttttatttcagaaatccaactttacctattttttaagctaactggaaatggaggccatgcgccccaaagcagcccgccacccacctgagtgtaagaagtgagtccggcttttgggtttcaccccaagttatctcaaaacaaaagggctggtcaggctgggcagggccttgtcaggagctcacggtaggcagaggtgcctctgccagggccacagaacagacttccgggaaggggccttggcttttattgagggtctctcaaagacccagcctgccagcctctcccagaggtgcctgctagtccttagagtgtgtgtgtgaagatgccatgaccagtggcagctgagacctctctgccccaagagtgtgggggactggcagggagcgagggtccccgagacgaggaccacggtcctccctgagaacctgggtggaactggcatttcatcccctctccaccctaccctctggctcctagcccacaccccctctcttgggcagcgtggtctgctggctgccccttcttggcagctcagggtcgtggcaggtggacttggagacacacagcagtgtgtgttttagtggcaggtttcaggagcacctctaagaccagggtgacagggtacttgggagctgtcctggaccctccccataccacgggccctgcaagggaggcatcagggctggctttgttttctgctgttcttggaataggaactgctgttctgatccccccaaaactgcattgcggctctcgctcgctcctgcctgccgggacagcgccttctgctgagtccgtttatttgtagtgtcatggctgctgctttcactggggtcctgggcaccctggcttctgtcctcagagctgggtttgatcctagcaaccatcccttcctctctttgcccggcaatgcctttggcatgtgtctgagcagccaagtggccactcataggagaaggctccctggtcacgttgctcctgctgccgtcttgttccaaggtgcgggggggacactgttggtctgtccaggtcaaggtccctttctcttaccatgacagaggctgggggcagacagcggggacttttttttttttttaagaaaaactacatgtacataggagagtttcattaccattagacttgtatgtaggacttaaaaaaaaatggccttaataaaattacaagcaacccgcctggatgcggttttcaaaagaaggcattgaggaccatgctaggaaacctcataccccatccgtccaacctccggcgggcgccactgcttgtcctctggtcttcggtgtggacagataggagaggagggatgcccacctcggagcatcccaggcccgtggcccattttcagcatcctgaagccagattcacagtgacattgtgttaacgtgacgaccttggtccattatggagttctttttccaataagaacctggtggaccgaggtccgagcttgccagggacagtggggcccacgcgagtacccggggcccagccaggagccagcagccaggcgtccctgtgttccagaaggattcacgcccctcctggacctgggcgggcctcccagggggtctgtatcacggccttttgtgtgtgcgtacgtgtggtttttttaaatatcactactacatattcttgaattgccaagactttctgaaacaagacagcttaagggaatcagccttttgctttgtgatgtgaaaatactgtgatttgacgagccgcttcctgaggggcaggcccacgtggggaggttgcgccgtgtacatagacccgccgtctgtgtccttggtcaggcccggatgcttggtctacactgggttagaggctgctctccccacgcacccatgtgctcatggcttctgcagaccctctgctgggtacatcggtcccctacggcgaagttcagccagggctctccctcctgagagcatggcgtccccaccttcctgtttcgccgacgtcactacccagggtggcaagtcttgcaggcagagggtgtagcccaagttcagcctctctctgtgtcctccagagaagagggttctttgccctcatcagggccctgcttgtgggttttcggctctggggaggagagtgttggcatcagtgtgtttggcctgatttcttcagggggccaagctcccgggaggacccctagccaggagggccccccatgtccatccatccctcctgctggggcttggatgtcaggcttgggggctgtgagctgggacctcgcctgagcccggtcaggtgggacaggagcctgccagaagcccatggggggccaggccgggtggcttctattttatttttttagagatggggtcttgctgtgttgcccaggctggtctcggactcctgggctcaagcagtcctccctcctcggcctcccaaagttctggggctacaggtgtgagccacttctgcccagcatcccaggcctgaacagccttggcaggacccgtccctagagggggctctggtgcctcccttaggtgggccttgagctggtttttaaccaaacatccttccaaactcgggctgcgacctgcttcctgagttttctgtatttccaaggagccctccgaccagggagaggctggtggagtaaggtccagcggtattcgggggtcctctgtcacctcgccctgaaaacagcagctcccatcaccttcactgggtcccgatggagccgtctcagaggccgaggggccctctgtgtgggggtgggacgcaggggctctcagagcaagggccacaaagccgatggcacagatgtgcccctgggcctggcccgtcacccacatgtggtgccctgggccagggcgtgcgggcgccagagccttccctacacagcctaagagcaggggcaagactcggcccctcactcaccctgggaggcctgcctgggctacatggacacctgggtctctttctacccccattcaccatggaccaggggcctccatttcctgggggctcttgcggcatgtgatttgggggtccctgggacattctcccgtcagctccacctgagccaagtgtcctgttccctgcggcccttggccttccagggtcctggccaggcaggggtcaggcaccccatactcttccgtgtggcacaggtgtccacccacccccactggccacagacaccattctccccctgggagcaggaggtggagtaagttgtacccccaggcctgggtgctggggagttcctgagggcatgggtggggcaggagtgagtgcctcgtgatcccagcctcagtttctctcttgtcactttctcaaacctgcaggtctcagggccccgggctcctcctgggcaggatggggggcaggggctgggccttggggtggtgctggctctgatgattccagagcctgtatccaccttctgggctcctggccagcaccccacccccaggagccagggacaggtggcatgtgttggggtcgggggatggcccccatctcgaagtgttctggaatttgggggcaacccttgcccagcccagccatcaagaacttctgatctcctgcccaccaggaggggacttagccatggacttggccagtaggcctggggagggagggctttggcagccaaagtccactggccctgccgtgcccctgagtaggaaactgtcccctaggggctgggtggccccactgatatatgcaaacccgccggtccgagccctgttcctgcctgtgctcctctgtgcccaggctggctctcccccaaccctagcatgtatactctgccacggacgtcccgtgggccatgattgtgggcggccgcagcgggcgggggcaggcggctcagggcacactcggccgtccctgccccatcctctggcagggctgcttttgtctttgtacctttgcatcctttgtaatgaaacgtaataaaaatccaacgttttcgtc

SEQ ID NO: 6910 - DNA, 6991 bp, Homo sapiens
  source 1..6991: mol_type = unassigned DNA
ccagccggcgcttgcgcggtggcacgggcgagtgggggggcgaggaggtggaggaggaggaggaggaggaggaggtggcggcgagaagatggcgacttcgaacaatccgcggaaattcagcgagaagatcgcgctgcacaatcagaagcaggcggaggagacggcggccttcgaggaggtcatgaaggacctgagcctgacgcgggccgcgcggctccagctccagaaatcccagtacctgcaactgggccccagccgaggccagtactatggcgggtccctgcccaacgtgaaccagatcgggagtggcaccatggacctgcccttccagcccagcggatttctgggggaggccctggcagcggctcctgtctctctgacccccttccaatcctcgggcctggacaccagccggaccacccggcaccatgggctggtggacagggtgtaccgggagcgtggccggctcggctccccacaccgccggcccctgtcagtggacaaacacggacggcaggccgacagctgcccctatggcaccatgtacctctcaccacccgcggacaccagctggagaaggaccaattctgactccgccctgcaccagagcacaatgacgcccacgcagccagaatcctttagcagtgggtcccaggacgtgcaccagaaaagagtcttactgttaacagtcccaggaatggaagagaccacatcagaggcagacaaaaacctttccaagcaagcatgggacaccaagaagacggggtccaggcccaagtcctgtgaggtccccggaatcaacatcttcccgtctgccgaccaggaaaacactacagccctgatccccgccacccacaacacaggggggtccctgcccgacctgaccaacatccacttcccctccccgctcccgaccccgctggaccccgaggagcccaccttccctgcactgagcagctccagcagcaccggcaacctcgcggccaacctgacgcacctgggcatcggtggcgccggccagggaatgagcacacctggctcctctccacagcaccgcccagctggcgtcagccccctgtccctgagcacagaggcaaggcgtcagcaggcatcgcccaccctgtccccgctgtcacccatcactcaggctgtagccatggacgccctgtctctggagcagcagctgccctacgccttcttcacccaggcgggctcccagcagccaccgccgcagccccagcccccgccgcctcctccacccgcgtcccagcagccaccacccccgccacccccacaggcgcccgtccgcctgccccctggtggccccctgttgcccagcgccagcctgactcgtgggccacagccgcccccgcttgcagtcacggtaccgtcctctctcccccagtcccccccagagaaccctggccagccatcgatggggatcgacatcgcctcggcgccggctctgcagcagtaccgcactagcgccggctccccggccaaccagtctcccacctcgccagtctccaatcaaggcttctccccagggagctccccgcaacacacttccaccctgggcagcgtgtttggggacgcgtactatgagcagcagatggcggccaggcaggccaatgctctgtcccaccagctggagcagttcaacatgatggagaacgccatcagctccagcagcctgtacagcccgggctccacactcaactactcgcaggcggccatgatgggcctcacgggcagccacgggagcctgccggactcgcagcaactgggatacgccagccacagtggcatccccaacatcatcctcacagtgacaggagagtccccccccagcctctctaaagaactgaccagctctctggccggggtcggcgacgtcagcttcgactccgacagccagtttcccctggacgaactcaagatcgaccccctgaccctcgacggactgcacatgctcaacgaccccgacatggttctggccgacccagccaccgaggacaccttccggatggaccgcctgtgagcgggcacgccggcaccctgccgctcagccgtcccgacggcgcctccccagcccggggacggccgtgctccgtccctcgccaacggccgagcttgtgattctgagcttgcaatgccgccaagcgccccccgccagcccgcccccggttgtccacctcccgcgaagcccaatcgcgaggccgcgagccgggccgtccacccacccgcccgcccagggctgggctgggatcggaggccgtgagcctcccgcccctgcagaccctccctgcactggctccctcgcccccagccccggggcctgagccgtcccctgtaagatgcgggaagtgtcagctcccggcgtggcgggcaggctcaggggaggggcgcgcatggtccgccagggctgtgggccgtggcgcattttccgactgtttgtccagctctcactgccttccttggttcccggtcccccagcccatccgccatccccagcccgtggtcaggtagagagtgagccccacgccgccccagggaggaggcgccagagcgcggggcagacgcaaagtgaaataaacactattttgacggctgtcttttatatttctgagcacacacagagccctggcgtccaccggggcaggcgcaaagtggacagagcatgcagggcggcggacccccccacgaccctcctcgccctgtctccatcccctcgaagccctgcctcaccgcaggcaggcccatcggtggccacctttgccgggaagtgaccggaaggccccgtgaggggtcgaacgcggaggcaggggttacctcttggggctttacaatccgtggcccctcctgtcctgcactgtggtcaccggtcctgtcatagatgctgttaatttaaggtacaggcagaggtggccaggggagtttcattgtggtttttttttccttttagtttctagttacattttggttgtagatgactcgcttaatcttttaagccaacacttgcctgagagcatgtttttatttcagaaatccaactttacctattttttaagctaactggaaatggaggccatgcgccccaaagcagcccgccacccacctgagtgtaagaagtgagtccggcttttgggtttcaccccaagttatctcaaaacaaaagggctggtcaggctgggcagggccttgtcaggagctcacggtaggcagaggtgcctctgccagggccacagaacagacttccgggaaggggccttggcttttattgagggtctctcaaagacccagcctgccagcctctcccagaggtgcctgctagtccttagagtgtgtgtgtgaagatgccatgaccagtggcagctgagacctctctgccccaagagtgtgggggactggcagggagcgagggtccccgagacgaggaccacggtcctccctgagaacctgggtggaactggcatttcatcccctctccaccctaccctctggctcctagcccacaccccctctcttgggcagcgtggtctgctggctgccccttcttggcagctcagggtcgtggcaggtggacttggagacacacagcagtgtgtgttttagtggcaggtttcaggagcacctctaagaccagggtgacagggtacttgggagctgtcctggaccctccccataccacgggccctgcaagggaggcatcagggctggctttgttttctgctgttcttggaataggaactgctgttctgatccccccaaaactgcattgcggctctcgctcgctcctgcctgccgggacagcgccttctgctgagtccgtttatttgtagtgtcatggctgctgctttcactggggtcctgggcaccctggcttctgtcctcagagctgggtttgatcctagcaaccatcccttcctctctttgcccggcaatgcctttggcatgtgtctgagcagccaagtggccactcataggagaaggctccctggtcacgttgctcctgctgccgtcttgttccaaggtgcgggggggacactgttggtctgtccaggtcaaggtccctttctcttaccatgacagaggctgggggcagacagcggggacttttttttttttttaagaaaaactacatgtacataggagagtttcattaccattagacttgtatgtaggacttaaaaaaaaatggccttaataaaattacaagcaacccgcctggatgcggttttcaaaagaaggcattgaggaccatgctaggaaacctcataccccatccgtccaacctccggcgggcgccactgcttgtcctctggtcttcggtgtggacagataggagaggagggatgcccacctcggagcatcccaggcccgtggcccattttcagcatcctgaagccagattcacagtgacattgtgttaacgtgacgaccttggtccattatggagttctttttccaataagaacctggtggaccgaggtccgagcttgccagggacagtggggcccacgcgagtacccggggcccagccaggagccagcagccaggcgtccctgtgttccagaaggattcacgcccctcctggacctgggcgggcctcccagggggtctgtatcacggccttttgtgtgtgcgtacgtgtggtttttttaaatatcactactacatattcttgaattgccaagactttctgaaacaagacagcttaagggaatcagccttttgctttgtgatgtgaaaatactgtgatttgacgagccgcttcctgaggggcaggcccacgtggggaggttgcgccgtgtacatagacccgccgtctgtgtccttggtcaggcccggatgcttggtctacactgggttagaggctgctctccccacgcacccatgtgctcatggcttctgcagaccctctgctgggtacatcggtcccctacggcgaagttcagccagggctctccctcctgagagcatggcgtccccaccttcctgtttcgccgacgtcactacccagggtggcaagtcttgcaggcagagggtgtagcccaagttcagcctctctctgtgtcctccagagaagagggttctttgccctcatcagggccctgcttgtgggttttcggctctggggaggagagtgttggcatcagtgtgtttggcctgatttcttcagggggccaagctcccgggaggacccctagccaggagggccccccatgtccatccatccctcctgctggggcttggatgtcaggcttgggggctgtgagctgggacctcgcctgagcccggtcaggtgggacaggagcctgccagaagcccatggggggccaggccgggtggcttctattttatttttttagagatggggtcttgctgtgttgcccaggctggtctcggactcctgggctcaagcagtcctccctcctcggcctcccaaagttctggggctacaggtgtgagccacttctgcccagcatcccaggcctgaacagccttggcaggacccgtccctagagggggctctggtgcctcccttaggtgggccttgagctggtttttaaccaaacatccttccaaactcgggctgcgacctgcttcctgagttttctgtatttccaaggagccctccgaccagggagaggctggtggagtaaggtccagcggtattcgggggtcctctgtcacctcgccctgaaaacagcagctcccatcaccttcactgggtcccgatggagccgtctcagaggccgaggggccctctgtgtgggggtgggacgcaggggctctcagagcaagggccacaaagccgatggcacagatgtgcccctgggcctggcccgtcacccacatgtggtgccctgggccagggcgtgcgggcgccagagccttccctacacagcctaagagcaggggcaagactcggcccctcactcaccctgggaggcctgcctgggctacatggacacctgggtctctttctacccccattcaccatggaccaggggcctccatttcctgggggctcttgcggcatgtgatttgggggtccctgggacattctcccgtcagctccacctgagccaagtgtcctgttccctgcggcccttggccttccagggtcctggccaggcaggggtcaggcaccccatactcttccgtgtggcacaggtgtccacccacccccactggccacagacaccattctccccctgggagcaggaggtggagtaagttgtacccccaggcctgggtgctggggagttcctgagggcatgggtggggcaggagtgagtgcctcgtgatcccagcctcagtttctctcttgtcactttctcaaacctgcaggtctcagggccccgggctcctcctgggcaggatggggggcaggggctgggccttggggtggtgctggctctgatgattccagagcctgtatccaccttctgggctcctggccagcaccccacccccaggagccagggacaggtggcatgtgttggggtcgggggatggcccccatctcgaagtgttctggaatttgggggcaacccttgcccagcccagccatcaagaacttctgatctcctgcccaccaggaggggacttagccatggacttggccagtaggcctggggagggagggctttggcagccaaagtccactggccctgccgtgcccctgagtaggaaactgtcccctaggggctgggtggccccactgatatatgcaaacccgccggtccgagccctgttcctgcctgtgctcctctgtgcccaggctggctctcccccaaccctagcatgtatactctgccacggacgtcccgtgggccatgattgtgggcggccgcagcgggcgggggcaggcggctcagggcacactcggccgtccctgccccatcctctggcagggctgcttttgtctttgtacctttgcatcctttgtaatgaaacgtaataaaaatccaacgttttcgtc

SEQ ID NO: 6911 - DNA, 2644 bp, Homo sapiens
  source 1..2644: mol_type = unassigned DNA
ctaggctggggccgggttcgcggtgctcgctgaggcggcggtggctacggctggaggagccgggccgaggccgcggcggaggccgcggctggtactgggagggtggcagggagggacggggaaggaagatggcgacgtcgggggcgaacgggcctggttcggccacggcctcggcttccaatccgcgcaaatttagtgagaagattgcgctgcagaagcagcgtcaggccgaggagacggcggccttcgaggaggtgatgatggacatcggctccacccggttacaggcccaaaaactgcgactggcatacacaaggagctctcattatggtgggtctctgcccaatgttaaccagattggctctggcctggccgagttccagagccccctccactcacctttggattcatctcggagcactcggcaccatgggctggtggaacgggtgcagcgagatcctcgaagaatggtgtccccacttcgccgatacacccgccacattgacagctctccctatagtcctgcctacttatctcctcccccagagtctagctggcgaaggacgatggcctggggcaatttccctgcagagaaggggcagttgtttcgactaccatctgcacttaacaggacaagctctgactctgcccttcatacaagtgtgatgaaccccagtccccaggatacctacccaggccccacacctcccagcatcctgcccagccgacgtgggggtattctggatggtgaaatggaccccaaagtacctgctattgaggagaacttgctagatgacaagcatttgctgaagccatgggatgctaagaagctatcctcatcctcttcccgacctcggtcctgtgaagtccctggaattaacatctttccatctcctgaccagcctgccaatgtgcctgtcctcccacctgccatgaacacggggggctccctacctgacctcaccaacctgcactttcccccaccactgcccacccccctggaccctgaagagacagcctaccctagcctgagtgggggcaacagtacctccaatttgacccacaccatgactcacctgggcatcagcaggggcatgggcctgggcccaggctatgatgcaccaggacttcattcacctctcagccacccatccctgcagtcctccctaagcaatcccaacctccaggcttccctgagcagtcctcagccccagcttcagggctcccacagccacccctctctgcctgcctcctccttggcccgccatgtactgcccaccacctccctgggccacccctcactcagtgctccggctctctcctcctcctcttcctcctcctccacttcatctcctgttttgggcgccccctcttaccctgcttctacccctggggcctccccccaccaccgccgtgtgcccctcagccccctgagtttgctcgcgggcccagccgacgccagaaggtcccaacagcagctgcccaaacagttttcgccaacaatgtcacccaccttgtcttccatcactcagggcgtccccctggataccagtaaactgtccactgaccagcggttacccccatacccatacagctccccaagtctggttctgcctacccagccccacaccccaaagtctctacagcagccagggctgccctctcagtcttgttcagtgcagtcctcaggtgggcagcccccaggcaggcagtctcattatgggacaccgtacccacctgggcccagtgggcatgggcaacagtcttaccaccggccaatgagtgacttcaacctggggaatctggagcagttcagcatggagagcccatcagccagcctggtgctggatccccctggcttttctgaagggcctggatttttagggggtgaggggccaatgggtggcccccaggatccccacaccttcaaccaccagaacttgacccactgttcccgccatggctcagggcctaacatcatcctcacaggggactcctctccaggtttctctaaggagattgcagcagccctggccggagtgcctggctttgaggtgtcagcagctggattggagctagggcttgggctagaagatgagctgcgcatggagccactgggcctggaagggctaaacatgctgagtgacccctgtgccctgctgcctgatcctgctgtggaggagtcattccgcagtgaccggctccaatgagggcacctcatcaccatccctcttcttggccccatcccccaccaccattcctttcctcccttccccctggcaggtagagactctactctctgtccccagatcctctttctagcatgaatgaaggatgccaagaatgagaaaaagcaaggggtttgtccaggtggcccctgaattctgcgcaagggatgggcctgggggaactcaagggagggcctaaagcacttgtaactttgaaccgtctgtctggaggtcagagcctgttggaaagcaggggtagaggggagccctggaagcagggcttttccggatgcctaggggtgggcagtgccagcccctcctcaccactcttccccttgcagtggaggagagagccagagtggatactattttttattaaatatattattatatgttaataaaaaaatcatatcaaa

SEQ ID NO: 6912 - DNA, 2537 bp, Homo sapiens
  source 1..2537: mol_type = unassigned DNA
cgccatggccgcctcgccgggctcgggcagcgccaacccgcggaagttcagtgagaagatcgcgctgcacacgcagagacaggccgaggagacgcgggccttcgagcagctcatgaccgacctcaccctgtcgcgggttcaatttcagaagcttcagcaactgcgccttacacagtaccatggaggatccttaccaaatgtgagccagctgcggagcagtgcgtcagagtttcagccgtcatttcaccaagctgataatgttcggggaacccgccatcacgggctggtggagaggccatccaggaaccgcttccaccccctccaccgaaggtctggggacaagccagggcgacaatttgatggtagtgcttttggagccaattattcctcacagcctctggatgagagttggccaaggcagcagcctccttggaaagacgaaaagcatcctgggttcaggctgacatctgcacttaacaggaccaattctgattctgctcttcacacgagtgctctgagtaccaagccccaggacccctatggaggagggggccagtcggcctggcctgccccatacatgggtttctgtgatggtgagaataatggacatggggaagtagcatctttccctggcccattgaaagaagagaatctgttaaatgttccgaagccactgccaaaacaactgtgggagaccaaggagattcagtccctgtcaggacgccctcgatcctgtgatgttggaggtggcaatgcttttccacataatggtcaaaacctaggcctctcacccttcttggggaccttgaacactggagggtcattgccagatctaaccaacctccactactcgacacccctgccagcctccctggacaccaccgaccaccactttggcagtatgagtgtggggaatagtgtgaacaacatcccagctgctatgacccacctgggtataagaagctcctctggtctccagagttctcggagtaacccctccatccaagccacgctcaataagactgtgctttcctcttccttaaataaccacccacagacatctgttcccaacgcatctgctcttcacccttcgctccgtctgttttcccttagcaacccatctctttccaccacaaacctgagcggcccgtctcggcgtcggcagcctcccgtcagccctctcacgctttctcctggccctgaagcacatcaaggtttcagcagacagctgtcttcaaccagcccactggccccatatcctacctcccagatggtgtcctcagaccgaagccaactttcctttctgcccacagaagctcaagcccaggtgtcgccgccacccccttaccctgcaccccaggagctcacccagcccctcctgcagcagccccgcgcccctgaggcccctgcccagcagccccaggcagcctcctcactgccacagtcagactttcagcttctcccggcccagggctcatctttgaccaacttcttcccagatgtgggttttgaccagcagtccatgaggccaggccctgcctttcctcaacaggtgcctctggtgcaacaaggttcccgagaactgcaggactcttttcatttgagaccaagcccgtattccaactgcgggagtctcccgaacaccatcctgccagaagactccagcaccagcctgttcaaagacctcaacagtgcgctggcaggcctgcctgaggtcagcctgaacgtggacactccatttccactggaagaggagctgcagattgaacccctgagcctggacggactcaacatgttaagtgactccagcatgggcctgctggacccctctgttgaagagacgtttcgagctgacagactgtgaacagaaggcagtggaacagaagaatgtttttctgcaacagccaaaatagaatggaatagaatgaagccagctgataccacgggctttcgttatcttgacatagaaggaagcaatgccacggctccagggtttcagatgagatcccatctcagacactgtggcttcctccagatcacacagctttgtactgcctctcccgcctgtggccaaagtcgtgttgcagcaggcaggctgcttggagcttcccatgaactggaaagctcacctccactgcatctttttactggccatccagtcagccgatgtgtaagagtaggaaatactgtgtcactggaggcctccgtagcattgtgtagtgtgctcagaaccactgatctccgtccgcaccgaaggcgggcccggagtgggaggctcggcctggggcggcggcaccggagagggcacctcgatgcctgctctgacctgacccagagggcgaggccctccagcgggggacattcccaggctgagtggaccccacggctctctcccacgcctggattacgacatgaagtttttaccacaagcccgagggcaggcttgagttaggcagactgaaggctaattttcattttctcccagctggtttctgctgcttcagaaaagtacaccttttccttatggaccagaggaa

SEQ ID NO: 6913 - DNA, 5209 bp, Homo sapiens
  source 1..5209: mol_type = unassigned DNA
ctccggggccgcggcggctcctctgccgggtcgcgccggacgactggcttcgggcggcggccccggcggcctgtggacggacgggtgggccgaggtacaggccccacggccgccgtctcccgcttctgcccgcgcagagtccgcgccatggccgcctcgccgggctcgggcagcgccaacccgcggaagttcagtgagaagatcgcgctgcacacgcagagacaggccgaggagacgcgggccttcgagcagctcatgaccgacctcaccctgtcgcgggttcaatttcagaagcttcagcaactgcgccttacacagtaccatggaggatccttaccaaatgtgagccagctgcggagcagtgcgtcagagtttcagccgtcatttcaccaagctgataatgttcggggaacccgccatcacgggctggtggagaggccatccaggaaccgcttccaccccctccaccgaaggtctggggacaagccagggcgacaatttgatggtagtgcttttggagccaattattcctcacagcctctggatgagagttggccaaggcagcagcctccttggaaagacgaaaagcatcctgggttcaggctgacatctgcacttaacaggaccaattctgattctgctcttcacacgagtgctctgagtaccaagccccaggacccctatggaggagggggccagtcggcctggcctgccccatacatgggtttctgtgatggtgagaataatggacatggggaagtagcatctttccctggcccattgaaagaagagaatctgttaaatgttccgaagccactgccaaaacaactgtgggagaccaaggagattcagtccctgtcaggacgccctcgatcctgtgatgttggaggtggcaatgcttttccacataatggtcaaaacctaggcctctcacccttcttggggaccttgaacactggagggtcattgccagatctaaccaacctccactactcgacacccctgccagcctccctggacaccaccgaccaccactttggcagtatgagtgtggggaatagtgtgaacaacatcccagctgctatgacccacctgggtataagaagctcctctggtctccagagttctcggagtaacccctccatccaagccacgctcaataagactgtgctttcctcttccttaaataaccacccacagacatctgttcccaacgcatctgctcttcacccttcgctccgtctgttttcccttagcaacccatctctttccaccacaaacctgagcggcccgtctcggcgtcggcagcctcccgtcagccctctcacgctttctcctggccctgaagcacatcaaggtttcagcagacagctgtcttcaaccagcccactggccccatatcctacctcccagatggtgtcctcagaccgaagccaactttcctttctgcccacagaagctcaagcccaggtgtcgccgccacccccttaccctgcaccccaggagctcacccagcccctcctgcagcagccccgcgcccctgaggcccctgcccagcagccccaggcagcctcctcactgccacagtcagactttcagcttctcccggcccagggctcatctttgaccaacttcttcccagatgtgggttttgaccagcagtccatgaggccaggccctgcctttcctcaacaggtgcctctggtgcaacaaggttcccgagaactgcaggactcttttcatttgagaccaagcccgtattccaactgcgggagtctcccgaacaccatcctgccagactccagcaccagcctgttcaaagacctcaacagtgcgctggcaggcctgcctgaggtcagcctgaacgtggacactccatttccactggaagaggagctgcagattgaacccctgagcctggacggactcaacatgttaagtgactccagcatgggcctgctggacccctctgttgaagagacgtttcgagctgacagactgtgaacagaaggcagtggaacagaagaatgtttttctgcaacagccaaaatagaatggaatagaatgaagccagctgataccacgggctttcgttatcttgacatagaaggaagcaatgccacggctccagggtttcagatgagatcccatctcagacactgtggcttcctccagatcacacagctttgtactgcctctcccgcctgtggccaaagtcgtgttgcagcaggcaggctgcttggagcttcccatgaactggaaagctcacctccactgcatctttttactggccatccagtcagccgatgtgtaagagtaggaaatactgtgtcactggaggcctccgtagcattgtgtagtgtgctcagaaccactgatctccgtccgcaccgaaggcgggcccggagtgggaggctcggcctggggcggcggcaccggagagggcacctcgatgcctgctctgacctgacccagagggcgaggccctccagcgggggacattcccaggctgagtggaccccacggctctctcccacgcctggattacgacatgaagtttttaccacaagcccgagggcaggcttgagttaggcagactgaaggctaattttcattttctcccagctggtttctgctgcttcagaaaagtacaccttttccttatggaccagaggaagaggaagaccattttatcagtcactgaaaagagtcccctggcactgatgagcctgaagagaactgtgctcctcctcgggggctggggaaggaagacagggactgcaggtgtctcatactcagtggcctccagacaaactccagacaagcacagacctccccactaagagcagccagagggagctggtgaggccctaaccccacccaccgagcaactgagcttccccatccctccccagagctgtgtctctgtgggctgggagtctaatgtcacccccctagaccgtaagctccttgagggcagggacagtgccttatcattgttgaacccgtagcacctaacacgtgcgtggcagcacagtcgtgtgctggagtgagtgctgcagaaccgtgcgtgcagcgcatgatgaatgagtgcgtccgccatgccgtaaggcaggctcacctgtagctatccccttccctgccagatcttctcagagctttagcttttctagcactcgtgcctatggtgaagcatgcactttaatatgcttttaacactaggtgaccaaatcacagtgaagccgggcactgcattctccttgggctgtgctccacgcgggtgggtgggagctgtcttctgagtacatccggaagggctgagcaggtgagtgccctgagcatcctggctgggccccacccaggaagatcttccttctcagatccacgtttggctctaaattgcttcaagtagagattcattctttgaggttgaaaaaatagtttatagtaaaacgaaggcctaattcatggaagcatcattagtcatcaataccttctcataaaatagatgggccagatttccaccaccgcctgcctcctctaacttgggtgatgccagtaggtttgaagggggcagagcactgcagggggaggggggggtctaggctgtgagaggacagggtggagaggaggagaaccctgaaggagagacggaagatgccaggacctttgcttggacagccattgcccttccaggagaccctggagtgtactgagggttgctggactgttccacccagaggagcaaggctgtacaatgagggtctgaatctggcacacctgtcccttatgtaaaaggagtcgtggtcacaagaccctgggctggttagcctctcccgacctcattccatttctatcttctgaccttgcctctcatctttaaaataaccctcatggggtgcccctccaccttcctctggaatccaagtattcctgtttcacatttgccccaaatctttgctgtggaattgggaaatcaaaccagagtcctcctcgcctgatttccagctcaggaagggcctgctggcctgccctgttcccagttacactttcagatccctttgtgctcaagatctcagagggggtggctttttgttaaagagccttcagtcgcaatgctacccagcaccccatgtgccaaaagaaaccagctcctgtgtcaaagggcttccaaacctgatctcactctcaacaggcgatggtgctgatgtttcaagaattgtgtttttataaaacagaggtctcagcatagtcactcttcacatagtgccttacccatgggtatcgtcatatccgggtcccagttcagtttgtctgcacagcagccaccctgcctggcaacagagaccccaagacctacacagtgaaccctactgccccaaaggcgttctccaggtgacttgtgaaaacagacctccggggaagtgatttattgggggtgtacactgggggcaatatggtttagcactgaattcaatttgtccttaggtctatgagtgagtccgatcttttcttgtgaaaggttttgggcatcgtacaacccactctgcctagaaggtgtggaggactcaccacgggcagggtcgccctggcccacagcacgtgagcctgcactcactgcggcctttgtaacaaaaccagttgtggtcctcagcatttgaagcagctgcatacttcagagtaaactatttttcattatttagttttgtcacaagaaatcgaccattgtactactctcacttacagcagttaaacagcatagaactaaaaacctgtctgcatttccattttttctttctgtatggttgtgggttttaggacatagggggttaggagaaggggtttcttgatcatgtcatgaattctcctttgtcctgtttctcctgtttcatttctcctccgcctgctgtatattacctgagctggtgttgtatcttcaagtccatatgcgtatttgcagacctttcctgttcccactcttgttggctcttctgatttatgcacagatggttcccagcatgtgtccagtgcttcatggatgggaccatcccagcaactaatcagacttcctgccagtgtcctaacccccagggcaccctgttcaaccatatttaaaaattggaatttgtataaagttgcttccaagttttataatgcatcattttacatcttttgtaattaaaagcatcacaatgaggttgtctctgca

SEQ ID NO: 6914 - DNA, 5195 bp, Homo sapiens
  source 1..5195: mol_type = unassigned DNA
ctccggggccgcggcggctcctctgccgggtcgcgccggacgactggcttcgggcggcggccccggcggcctgtggacggacgggtgggccgaggtacaggccccacggccgccgtctcccgcttctgcccgcgcagagtccgcgccatggccgcctcgccgggctcgggcagcgccaacccgcggaagttcagtgagaagatcgcgctgcacacgcagagacaggccgaggagacgcgggccttcgagcagctcatgaccgacctcaccctgtcgcgggttcaatttcagaagcttcagcaactgcgccttacacagtaccatggaggatccttaccaaatgtgagccagctgcggagcagtgcgtcagagtttcagccgtcatttcaccaagctgataatgttcggggaacccgccatcacgggctggtggagaggccatccaggaaccgcttccaccccctccaccgaaggtctggggacaagccagggcgacaatttgatggtagtgcttttggagccaattattcctcacagcctctggatgagagttggccaaggcagcagcctccttggaaagacgaaaagcatcctgggttcaggctgacatctgcacttaacaggaccaattctgattctgctcttcacacgagtgctctgagtaccaagccccaggacccctatggaggagggggccagtcggcctggcctgccccatacatgggtttctgtgatggtgagaataatggacatggggaagtagcatctttccctggcccattgaaagaagagaatctgttaaatgttccgaagccactgccaaaacaactgtgggagaccaaggagattcagtccctgtcaggacgccctcgatcctgtgatgttggaggtggcaatgcttttccacataatggtcaaaacctaggcctctcacccttcttggggaccttgaacactggagggtcattgccagatctaaccaacctccactactcgacacccctgccagcctccctggacaccaccgaccaccactttggcagtatgagtgtggggaatagtgtgaacaacatcccagctgctatgacccacctgggtataagaagctcctctggtctccagagttctcggagtaacccctccatccaagccacgctcaataagactgtgctttcctcttccttaaataaccacccacagacatctgttcccaacgcatctgctcttcacccttcgctccgtctgttttcccttagcaacccatctctttccaccacaaacctgagcggcccgtctcggcgtcggcagcctcccgtcagccctctcacgctttctcctggccctgaagcacatcaaggtttcagcagacagctgtcttcaaccagcccactggccccatatcctacctcccagatggtgtcctcagaccgaagccaactttcctttctgcccacagaagctcaagcccaggtgtcgccgccacccccttaccctgcaccccaggagctcacccagcccctcctgcagcagccccgcgcccctgaggcccctgcccagcagccccaggcagcctcctcactgccacagtcagactttcagcttctcccggcccagggctcatctttgaccaacttcttcccagatgtgggttttgaccagcagtccatgaggccaggccctgcctttcctcaacaggtgcctctggtgcaacaaggttcccgagaactgcaggactcttttcatttgagaccaagcccgtattccaactgcgggagtctcccgaacaccatcctgccagactccagcaccagcctgttcaaagacctcaacagtgcgctggcaggcctgcctgaggtcagcctgaacgtggacactccatttccactggaagaggagctgcagattgaacccctgagcctggacggactcaacatgttaagtgactccagcatgggcctgctggacccctctgttgaagagacgtttcgagctgacagactgtgaacagaaggcagtggaacagaagaatgtttttctgcaacagccaaaatagaatggaatagaatgaagccagctgataccacgggctttcgttatcttgacatagaaggaagcaatgccacggctccagggtttcagatgagatcccatctcagacactgtggcttcctccagatcacacagctttgtactgcctctcccgcctgtggccaaagtcgtgttgcagcaggcaggctgcttggagcttcccatgaactggaaagctcacctccactgcatctttttactggccatccagtcagccgatgtgtaagagtaggaaatactgtgtcactggaggcctccgtagcattgtgtagtgtgctcagaaccactgatctccgtccgcaccgaaggcgggcccggagtgggaggctcggcctggggcggcggcaccggagagggcacctcgatgcctgctctgacctgacccagagggcgaggccctccagcgggggacattcccaggctgagtggaccccacggctctctcccacgcctggattacgacatgaagtttttaccacaagcccgagggcaggcttgagttaggcagactgaaggctaattttcattttctcccagctggtttctgctgcttcagaaaagtacaccttttccttatggaccagaggaagaggaagaccattttatcagtcactgaaaagagtcccctggcactgatgagcctgaagagaactgtgctcctcctcgggggctggggaaggaagacagggactgcaggtgtctcatactcagtggcctccagacaaactccagacaagcacagacctccccactaagagcagccagagggagctggtgaggccctaaccccacccaccgagcaactgagcttccccatccctccccagagctgtgtctctgtgggctgggagtctaatgtcacccccctagaccgtaagctccttgagggcagggacagtgccttatcattgttgaacccgtagcacctaacacgtgcgtggcagcacagtcgtgtgctggagtgagtgctgcagaaccgtgcgtgcagcgcatgatgaatgagtgcgtccgccatgccgtaaggcaggctcacctgtagctatccccttccctgccagatcttctcagagctttagcttttctagcactcgtgcctatggtgaagcatgcactttaatatgcttttaacactaggtgaccaaatcacagtgaagccgggcactgcattctccttgggctgtgctccacgcgggtgggtgggagctgtcttctgagtacatccggaagggctgagcaggtgagtgccctgagcatcctggctgggccccacccaggaagatcttccttctcagatccacgtttggctctaaattgcttcaagtagagattcattctttgaggttgaaaaaatagtttatagtaaaacgaaggcctaattcatggaagcatcattagtcatcaataccttctcataaaatagatgggccagatttccaccaccgcctgcctcctctaacttgggtgatgccagtaggtttgaagggggcagagcactgcagggggaggggggggtctaggctgtgagaggacagggtggagaggaggagaaccctgaaggagagacggaagatgccaggacctttgcttggacagccattgcccttccaggagaccctggagtgtactgagggttgctggactgttccacccagaggagcaaggctgtacaatgagggtctgaatctggcacacctgtcccttatgtaaaaggagtcgtggtcacaagaccctgggctggttagcctctcccgacctcattccatttctatcttctgaccttgcctctcatctttaaaataaccctcatggggtgcccctccaccttcctctggaatccaagtattcctgtttcacatttgccccaaatctttgctgtggaattgggaaatcaaaccagagtcctcctcgcctgatttccagctcaggaagggcctgctggcctgccctgttcccagttacactttcagatccctttgtgctcaagatctcagagggggtggctttttgttaaagagccttcagtcgcaatgctacccagcaccccatgtgccaaaagaaaccagctcctgtgtcaaagggcttccaaacctgatctcactctcaacaggcgatggtgctgatgtttcaagaattgtgtttttataaaacagaggtctcagcatagtcactcttcacatagtgccttacccatgggtatcgtcatatccgggtcccagttcagtttgtctgcacagcagccaccctgcctggcaacagagaccccaagacctacacagtgaaccctactgccccaaaggcgttctccaggtgacttgtgaaaacagacctccggggaagtgatttattgggggtgtacactgggggcaatatggtttagcactgaattcaatttgtccttaggtctatgagtgagtccgatcttttcttgtgaaaggttttgggcatcgtacaacccactctgcctagaaggtgtggaggactcaccacgggcagggtcgccctggcccacagcacgtgagcctgcactcactgcggcctttgtaacaaaaccagttgtggtcctcagcatttgaagcagctgcatacttcagagtaaactatttttcattatttagttttgtcacaagaaatcgaccattgtactactctcacttacagcagttaaacagcatagaactaaaaacctgtctgcatttccattttttctttctgtatggttgtgggttttaggacatagggggttaggagaaggggtttcttgatcatgtcatgaattctcctttgtcctgtttctcctgtttcatttctcctccgcctgctgtatattacctgagctggtgttgtatcttcaagtccatatgcgtatttgcagacctttcctgttcccactcttgttggctcttctgatttatgcacagatggttcccagcatgtgtccagtgcttcatggatgggaccatcccagcaactaatcagacttcctgccagtgtcctaacccccagggcaccctgttcaaccatatttaaaaattggaatttgtataaagttgcttccaagttttataatgcatcattttacatcttttgtaattaaaagcatcacaatg

SEQ ID NO: 6915 - DNA, 1046 bp, Homo sapiens
  source 1..1046: mol_type = unassigned DNA
atagagggaattgttcttcaggctcggaggggcctgcctgtcactgcgcccccgaccctagctcagggactgcagaactcaagataccatcccgtttctcctggctgaggaagggaagggaacatccacatcttctgtactcgtccattctgtgtccccggggcctggagtaaagacaccttcaaatgcagagactcttcagattcagctttcctggaaactgatcttcaatgcactaagagaaggagactctcaaaccaaaaatgacctggaggcaccatgtcaggcttctgtttacggtcagtttggcattacagatcatcaatttgggaaacagctatcaaagagagaaacataacggcggtagagaggaagtcaccaaggttgccactcagaagcaccgacagtcaccgctcaactggacctccagtcatttcggagaggtgactgggagcgccgagggctgggggccggaggagccgctcccctactcccgggctttcggagagggtgcgtccgcgcggccgcgctgctgcaggaacggcggtacctgcgtgctgggcagcttctgcgtgtgcccggcccacttcaccggccgctactgcgagcatgaccagaggcgcagtgaatgcggcgccctggagcacggagcctggaccctccgcgcctgccacctctgcaggtgcatcttcggggccctgcactgcctccccctccagacgcctgaccgctgtgacccgaaagacttcctggcctcccacgctcacgggccgagcgccgggggcgcgcccagcctgctactcttgctgccctgcgcactcctgcaccgcctcctgcgcccggatgcgcccgcgcaccctcggtccctggtcccttccgtcctccagcgggagcggcgcccctgcggaaggccgggacttgggcatcgcctttaattttctatgttgtaaataatagatgtgtttagtttaccgtaagctgaagcactgggtgaatatttttattgggtaataaatattttcatgaaagcgcctttggctccagat

SEQ ID NO: 6916 - DNA, 4370 bp, Homo sapiens
  source 1..4370: mol_type = unassigned DNA
ctttccgacactctttgggaagagaatctctaatgacggcaacagtggagaacctaacgttccagaaggacactttgggaaatgctgttgacaaaaacaggcgccacggctcgacagagccactcgtcctcgcctggtcatcccagttccggaggctgacctggggatgcgccctggacgccctgcaccgcagtccttgcgtcgctgctagtcagcacggcgttacccacctcatccgcagctccaggacgccgcactccacgcgctgccgcaaggaggacgcgcagcctggtcaccatggaaacggtgccgcctccgtcacggctcaagcgagaggtcaaaggtcagtcctgcaagttccgcttccggttccgagatcctgtttgttttctgaaagctttgtggtttcggtgagctctcagagccgatttctagcgtccgtgccggggacaggtgtccagaggtcgactgctgcagacatggcggcctccaccgcggccgggaagcagcggattcccaaagtggccaaggtgaaaaacaaagccccggctgaggtacagataactgctgaacaactcttaagagaggctaaagaaagagaacttgagcttcttccacctccacctcaacagaagatcacagatgaagaagaattaaatgattataaactaaggaaaaggaagacttttgaagataatataagaaaaaacaggactgtgattagtaactggataaaatacgcacaatgggaagaaagcctaaaggagattcaaagggctcgatccatatacgagcgtgctttagatgtagactaccgaaatattacactctggctgaaatacgcagaaatggaaatgaagaatcgccaagtcaaccatgctcgaaatatctgggaccgggccataacaacgctgcctcgagttaatcagttctggtacaagtacacgtacatggaggaaatgttgggaaacgttgccggtgcccggcaggtgtttgagcgctggatggagtggcagcctgaggagcaagcctggcactcctacatcaactttgagctgagatacaaagaggtggatcgggcccgcaccatttatgagcgatttgtcctcgtgcaccctgatgttaagaactggatcaagtatgcccgctttgaagaaaaacatgcttattttgcccatgcacggaaagtgtatgagagagctgtggaattctttggagatgaacatatggatgagcacctttatgttgcctttgccaagtttgaagaaaatcagaaagagtttgaaagggtacgagtgatttacaagtatgccctggacagaatttcaaaacaagatgcccaagaactctttaaaaattataccatctttgagaagaagtttggtgataggcggggtattgaagatatcattgtgagcaaacggagattccagtacgaagaagaagtgaaggcgaatccacacaattatgatgcatggtttgattacttgcgcttggtagaaagtgacgcagaagctgaagccgtgagagaagtctatgaaagggccattgccaatgtcccacccattcaggagaagaggcactggaagcgctacatttatctttggatcaactatgcactctatgaagaattggaggcaaaggatcctgagaggacaagacaggtgtatcaagcctctttggaactaattcctcacaaaaagttcacatttgccaaaatgtggatactgtatgcacagtttgaaatacgacagaagaatctgtcattagccagaagagcattgggaacttccataggcaaatgtccaaagaacaaattatttaaagtttacatagaattggagctacagcttcgagaatttgacagatgccggaagctttatgaaaagttcctggaatttggacctgaaaattgtacctcatggattaaattcgctgaattagagacaatccttggtgatattgacagagcacgggcaatctatgaattagccatcagtcagccacgtttagacatgccagaggtgctttggaaatcatatattgattttgaaattgagcaggaagaaacagaaagaacacgaaacctttaccggcggttgcttcaacggacgcagcatgtcaaggtatggatcagctttgctcagtttgagttgtcttcaggaaaagaaggaagtttgactaaatgcagacaaatttatgaagaagctaacaaaaccatgcgaaactgtgaagaaaaggaagagagacttatgctgctggaatcttggcgaagttttgaagaagaatttggaacagcttcagataaggagagagtagacaaactcatgccagagaaagtcaagaagagaagaaaggtccagactgatgatgggtctgatgcaggctgggaagaatactttgattacatctttccagaagatgctgccaaccaacctaacctcaaactcctggccatggccaaactgtggaagaaacagcagcaggaaaaggaggatgctgagcaccatccagatgaggacgtcgatgagagtgaatcctgatctttttttcatagacaaatgttttgttatttttataaattaattgtttggaactcttgtgactcctggaagttcttatatatttcaccagtaagaaattgattggtatctttgatggctactttttaagttattttttaaatgctcttgggttagctaggggtagggattgcaagtaaaggacttttttaactgctggatttgtttttccaactgagtccaaacttttctaatgtctgtccacatcatgcattaggaaatgtaattaaggtaacattctacagttacttttcatgtcatacccataaagatagtttatgcattcatctgaaatgtgtaactttttcatgtcttcagagtcacagacttgagttcatttcccagctctgccactcatgattatataacttaattttcattttcctcattcacaaaatgggccaatagtttgacagctcattttgaagattacattataaaaggaatatacctggtgggtgcatagtaagtgctcagtaaattgtttgttctaagccacttttaaaaatggtttcattccttgtagaattgaatgcgagtggattaataatttaccttactttcttactagtgtccagttatattgttttttagaacaacacttggaaaataatttgcagtgattatatttctgaacaaggttcagaaaacattgtttactaagaatttagtctaataatttcagttaggcgctcatcagttctccagagtggttgagtttgtaataccttgtttaaagaataatggcttgttcacgtgtgtgctatgaaaaatgatgtcccatgttcacataaatttgggaaattctggactaagacttaagtctcgttaatcaaatctctttatagttaggcttctgtacattatgtatctccagtagcaatgttgccatattatttatttcccaaacttagtggacaatggagtcatttctacctagagtaccagtaaacatctcccagtgtgctatagtagaaaatgtctactcctcactgctgacatgttaaacttactcttggtttagagcatgtgtagaaacacctaaggtagctctatgctaaataatgaagagtagcacaagaatgaatgtatttgctgatacgttgctcacattctcaagcaaaaattcaactgcattaaccgatctgagagttttcctttaacctggactgtgtttctcaagcacattttttctttgttcactgcccaaggactagaactgtatttttaaggttgttttcccctaaaaggacctttagtaagcaaatttattattaaatgtgcacatcttattcacccaagggaataaaagctacttcgtaatgttgttactaaattttatcttgaaaataaataacagtgtttgaggacagaagaaactaggactgttgttgagataaaatctgttttcagcctgactgctttagtcactggacgagcatcagctactgcggtgtcagatcacttctcgagtagaggtctgcctagtgagtgagcaggagaacatcatcttaatagcctttggctcacccagagtcagggagagatgaaaataataggtcagaatgcaagtgacttaatcacagtcttcctagaattatctgtttatgttgcatgaatgcataagaaaaaaattctgtcatgttcccaaggtagaattgtaataagcatgtgccagtgtgaaagctggaaggaaaaaagctattctctaacaggagaacataaagattcatttctctcccaccctcaactccaccaaagtaaatcctttcgatagtaaaagtttaa

SEQ ID NO: 6917 - DNA, 4406 bp, Homo sapiens
  source 1..4406: mol_type = unassigned DNA
ctttccgacactctttgggaagagaatctctaatgacggcaacagtggagaacctaacgttccagaaggacactttgggaaatgctgttgacaaaaacacatccagattggagctccgttcttactcccttgcagggcgccacggctcgacagagccactcgtcctcgcctggtcatcccagttccggaggctgacctggggatgcgccctggacgccctgcaccgcagtccttgcgtcgctgctagtcagcacggcgttacccacctcatccgcagctccaggacgccgcactccacgcgctgccgcaaggaggacgcgcagcctggtcaccatggaaacggtgccgcctccgtcacggctcaagcgagaggtcaaaggtcagtcctgcaagttccgcttccggttccgagatcctgtttgttttctgaaagctttgtggtttcggtgagctctcagagccgatttctagcgtccgtgccggggacaggtgtccagaggtcgactgctgcagacatggcggcctccaccgcggccgggaagcagcggattcccaaagtggccaaggtgaaaaacaaagccccggctgaggtacagataactgctgaacaactcttaagagaggctaaagaaagagaacttgagcttcttccacctccacctcaacagaagatcacagatgaagaagaattaaatgattataaactaaggaaaaggaagacttttgaagataatataagaaaaaacaggactgtgattagtaactggataaaatacgcacaatgggaagaaagcctaaaggagattcaaagggctcgatccatatacgagcgtgctttagatgtagactaccgaaatattacactctggctgaaatacgcagaaatggaaatgaagaatcgccaagtcaaccatgctcgaaatatctgggaccgggccataacaacgctgcctcgagttaatcagttctggtacaagtacacgtacatggaggaaatgttgggaaacgttgccggtgcccggcaggtgtttgagcgctggatggagtggcagcctgaggagcaagcctggcactcctacatcaactttgagctgagatacaaagaggtggatcgggcccgcaccatttatgagcgatttgtcctcgtgcaccctgatgttaagaactggatcaagtatgcccgctttgaagaaaaacatgcttattttgcccatgcacggaaagtgtatgagagagctgtggaattctttggagatgaacatatggatgagcacctttatgttgcctttgccaagtttgaagaaaatcagaaagagtttgaaagggtacgagtgatttacaagtatgccctggacagaatttcaaaacaagatgcccaagaactctttaaaaattataccatctttgagaagaagtttggtgataggcggggtattgaagatatcattgtgagcaaacggagattccagtacgaagaagaagtgaaggcgaatccacacaattatgatgcatggtttgattacttgcgcttggtagaaagtgacgcagaagctgaagccgtgagagaagtctatgaaagggccattgccaatgtcccacccattcaggagaagaggcactggaagcgctacatttatctttggatcaactatgcactctatgaagaattggaggcaaaggatcctgagaggacaagacaggtgtatcaagcctctttggaactaattcctcacaaaaagttcacatttgccaaaatgtggatactgtatgcacagtttgaaatacgacagaagaatctgtcattagccagaagagcattgggaacttccataggcaaatgtccaaagaacaaattatttaaagtttacatagaattggagctacagcttcgagaatttgacagatgccggaagctttatgaaaagttcctggaatttggacctgaaaattgtacctcatggattaaattcgctgaattagagacaatccttggtgatattgacagagcacgggcaatctatgaattagccatcagtcagccacgtttagacatgccagaggtgctttggaaatcatatattgattttgaaattgagcaggaagaaacagaaagaacacgaaacctttaccggcggttgcttcaacggacgcagcatgtcaaggtatggatcagctttgctcagtttgagttgtcttcaggaaaagaaggaagtttgactaaatgcagacaaatttatgaagaagctaacaaaaccatgcgaaactgtgaagaaaaggaagagagacttatgctgctggaatcttggcgaagttttgaagaagaatttggaacagcttcagataaggagagagtagacaaactcatgccagagaaagtcaagaagagaagaaaggtccagactgatgatgggtctgatgcaggctgggaagaatactttgattacatctttccagaagatgctgccaaccaacctaacctcaaactcctggccatggccaaactgtggaagaaacagcagcaggaaaaggaggatgctgagcaccatccagatgaggacgtcgatgagagtgaatcctgatctttttttcatagacaaatgttttgttatttttataaattaattgtttggaactcttgtgactcctggaagttcttatatatttcaccagtaagaaattgattggtatctttgatggctactttttaagttattttttaaatgctcttgggttagctaggggtagggattgcaagtaaaggacttttttaactgctggatttgtttttccaactgagtccaaacttttctaatgtctgtccacatcatgcattaggaaatgtaattaaggtaacattctacagttacttttcatgtcatacccataaagatagtttatgcattcatctgaaatgtgtaactttttcatgtcttcagagtcacagacttgagttcatttcccagctctgccactcatgattatataacttaattttcattttcctcattcacaaaatgggccaatagtttgacagctcattttgaagattacattataaaaggaatatacctggtgggtgcatagtaagtgctcagtaaattgtttgttctaagccacttttaaaaatggtttcattccttgtagaattgaatgcgagtggattaataatttaccttactttcttactagtgtccagttatattgttttttagaacaacacttggaaaataatttgcagtgattatatttctgaacaaggttcagaaaacattgtttactaagaatttagtctaataatttcagttaggcgctcatcagttctccagagtggttgagtttgtaataccttgtttaaagaataatggcttgttcacgtgtgtgctatgaaaaatgatgtcccatgttcacataaatttgggaaattctggactaagacttaagtctcgttaatcaaatctctttatagttaggcttctgtacattatgtatctccagtagcaatgttgccatattatttatttcccaaacttagtggacaatggagtcatttctacctagagtaccagtaaacatctcccagtgtgctatagtagaaaatgtctactcctcactgctgacatgttaaacttactcttggtttagagcatgtgtagaaacacctaaggtagctctatgctaaataatgaagagtagcacaagaatgaatgtatttgctgatacgttgctcacattctcaagcaaaaattcaactgcattaaccgatctgagagttttcctttaacctggactgtgtttctcaagcacattttttctttgttcactgcccaaggactagaactgtatttttaaggttgttttcccctaaaaggacctttagtaagcaaatttattattaaatgtgcacatcttattcacccaagggaataaaagctacttcgtaatgttgttactaaattttatcttgaaaataaataacagtgtttgaggacagaagaaactaggactgttgttgagataaaatctgttttcagcctgactgctttagtcactggacgagcatcagctactgcggtgtcagatcacttctcgagtagaggtctgcctagtgagtgagcaggagaacatcatcttaatagcctttggctcacccagagtcagggagagatgaaaataataggtcagaatgcaagtgacttaatcacagtcttcctagaattatctgtttatgttgcatgaatgcataagaaaaaaattctgtcatgttcccaaggtagaattgtaataagcatgtgccagtgtgaaagctggaaggaaaaaagctattctctaacaggagaacataaagattcatttctctcccaccctcaactccaccaaagtaaatcctttcgatagtaaaagtttaa

SEQ ID NO: 6918 - DNA, 7417 bp, Homo sapiens
  source 1..7417: mol_type = unassigned DNA
caagctttcaagcattcaaaggtctaaatgaaaaaggctaagtattatttcaaaaggcaagtatatcctaatatagcaaaacaaacaaagcaaaatccatcagctactcctccaattgaagtgatgaagcccaaataattcatatagcaaaatggagaaaattagaccggccatctaaaaatctgccattggtgaagtgatgaagaacatttactgtcttattccgaagcttgtcaattttgcaactcttggctgcctatggatttctgtggtgcagtgtacagttttaaatagctgcctaaagtcgtgtgtaactaatctgggccagcagcttgaccttggcacaccacataatctgagtgaaccgtgtatccaaggatgtcacttttggaactctgtagatcagaaaaactgtgctttaaagtgtaatgatacttatgccaccgtttgtgagcgggagtcgtgtgaggttggctgtagcagcgcggaaggtgcatatgaagaggaagtactggaaaatgcagacctaccaactgctccctttgcttcttccattggaagccacaatatgacattacgatggaaatctgcaaacttctctggagtaaaatacatcattcagtggaaatatgcacaacttctgggaagctggacttatactaagactgtgtccagaccgtcctatgtggtcaagcccctgcaccccttcactgagtacattttccgagtggtttggatcttcacagcgcagctgcagctctactcccctccaagtcccagttacaggactcatcctcatggagttcctgaaactgcacctttgattaggaatattgagagctcaagtcccgacactgtggaagtcagctgggatccacctcaattcccaggtggacctattttgggttataacttaaggctgatcagcaaaaatcaaaaattagatgcagggacacagagaaccagtttccagttttactccactttaccaaatactatctacaggttttctattgcagcagtaaatgaagttggtgagggtccagaagcagaatctagtattaccacttcatcttcagcagttcaacaagaggaacagtggctctttttatccagaaaaacttctctaagaaagagatctttaaaacatttagtagatgaagcacattgccttcggttggatgctatataccataatattacaggaatatctgttgatgtccaccagcaaattgtttatttctctgaaggaactctcatatgggcgaagaaggctgccaacatgtctgatgtatctgacctgagaattttttacagaggttcaggattaatttcttctatctccatagattggctttatcaaagaatgtatttcatcatggatgaactggtatgtgtctgtgatttagagaactgctcaaacatcgaggaaattactccaccctctattagtgcacctcaaaaaattgtggctgattcatacaatgggtatgtcttttacctcctgagagatggcatttatagagcagaccttcctgtaccatctggccggtgtgcagaagctgtgcgtattgtggagagttgcacgttaaaggactttgcaatcaagccacaagccaagcgaatcatttacttcaatgacactgcccaagtcttcatgtcaacatttctggatggctctgcttcccatctcatcctacctcgcatcccctttgctgatgtgaaaagttttgcttgtgaaaacaatgactttcttgtcacagatggcaaggtcattttccaacaggatgctttgtcttttaatgaattcatcgtgggatgtgacctgagtcacatagaagaatttgggtttggtaacttggtcatctttggctcatcctcccagctgcaccctctgccaggccgcccgcaggagctttcggtgctgtttggctctcaccaggctcttgttcaatggaagcctcctgcccttgccataggagccagcccttctgcctggcagaactggacctatgaggtgaaagtatccacccaagaccctcctgaagtcactcatattttcttgaacataagtggaaccatgctgaatgtacctgagctgcagagtgctatgaaatacaaggtttctgtgagagcaagttctccaaagaggccaggcccctggtcagagccctcagtgggtactaccctggtgccagctagtgaaccaccatttatcatggctgtgaaagaagatgggctttggagtaaaccattaaatagctttggcccaggagagttcttatcctctgatataggaaatgtgtcagacatggattggtataacaacagcctctactacagtgacacgaaaggcgacgtttttgtgtggctgctgaatgggacggatatctcagagaattatcacctacccagcattgcaggagcaggggctttagcttttgagtggctgggtcactttctctactgggctggaaagacatatgtgatacaaaggcagtctgtgttgacgggacacacagacattgttacccacgtgaagctattggtgaatgacatggtggtggattcagttggtggatatctctactggaccacactctattcagtggaaagcaccagactaaatggggaaagttcccttgtactacagacacagccttggttttctgggaaaaaggtaattgctctaactttagacctcagtgatgggctcctgtattggttggttcaagacagtcaatgtattcacctgtacacagctgttcttcggggacagagcactggggataccaccatcacagaatttgcagcctggagtacttctgaaatttcccagaatgcactgatgtactatagtggtcggctgttctggatcaatggctttaggattatcacaactcaagaaataggtcagaaaaccagtgtctctgttttggaaccagccagatttaatcagttcacaattattcagacatcccttaagcccctgccagggaacttttcctttacccctaaggttattccagattctgttcaagagtcttcatttaggattgaaggaaatgcttcaagttttcaaatcctgtggaatggtccccctgcggtagactggggtgtagttttctacagtgtagaatttagtgctcattctaagttcttggctagtgaacaacactctttacctgtatttactgtggaaggactggaaccttatgccttatttaatctttctgtcactccttatacctactggggaaagggccccaaaacatctctgtcacttcgagcacctgaaacagttccatcagcaccagagaaccccagaatatttatattaccaagtggaaaatgctgcaacaagaatgaagttgtggtggaatttaggtggaacaaacctaagcatgaaaatggggtgttaacaaaatttgaaattttctacaatatatccaatcaaagtattacaaacaaaacatgtgaagactggattgctgtcaatgtcactccctcagtgatgtcttttcaacttgaaggcatgagtcccagatgctttattgccttccaggttagggcctttacatctaaggggccaggaccatatgctgacgttgtaaagtctacaacatcagaaatcaacccatttcctcacctcataactcttcttggtaacaagatagtttttttagatatggatcaaaatcaagttgtgtggacgttttcagcagaaagagttatcagtgccgtttgctacacagctgataatgagatgggatattatgctgaaggggactcactctttcttctgcacttgcacaatcgctctagctctgagcttttccaagattcactggtttttgatatcacagttattacaattgactggatttcaaggcacctctactttgcactgaaagaatcacaaaatggaatgcaagtatttgatgttgatcttgaacacaaggtgaaatatcccagagaggtgaagattcacaataggaattcaacaataatttctttttctgtatatcctcttttaagtcgcttgtattggacagaagtttccaattttggctaccagatgttctactacagtattatcagtcacaccttgcaccgaattctgcaacccacagctacaaaccaacaaaacaaaaggaatcaatgttcttgtaatgtgactgaatttgagttaagtggagcaatggctattgatacctctaacctagagaaaccattgatatactttgccaaagcacaagagatctgggcaatggatctggaaggctgtcagtgttggagagttatcacagtacctgctatgctcggaaaaacccttgttagcttaactgtggatggagatcttatatactggatcatcacagcaaaggacagcacacagatttatcaggcaaagaaaggaaatggggccatcgtttcccaggtgaaggccctaaggagtaggcatatcttggcttacagttcagttatgcagccttttccagataaagcgtttctgtctctagcttcagacactgtggaaccaactatacttaatgccactaacactagcctcacaatcagattacctctggccaagacaaacctcacatggtatggcatcaccagccctactccaacatacctggtttattatgcagaagttaatgacaggaaaaacagctctgacttgaaatatagaattctggaatttcaggacagtatagctcttattgaagatttacaaccattttcaacatacatgatacagatagctgtaaaaaattattattcagatcctttggaacatttaccaccaggaaaagagatttggggaaaaactaaaaatggagtaccagaggcagtgcagctcattaatacaactgtgcggtcagacaccagcctcattatatcttggagagaatctcacaagccaaatggacctaaagaatcagtccgttatcagttggcaatctcacacctggccctaattcctgaaactcctctaagacaaagtgaatttccaaatggaaggctcactctccttgttactagactgtctggtggaaatatttatgtgttaaaggttcttgcctgccactctgaggaaatgtggtgtacagagagtcatcctgtcactgtggaaatgtttaacacaccagagaaaccttattccttggttccagagaacactagtttgcaatttaattggaaggctccattgaatgttaacctcatcagattttgggttgagctacagaagtggaaatacaatgagttttaccatgttaaaacttcatgcagccaaggtcctgcttatgtctgtaatatcacaaatctacaaccttatacttcatataatgtcagagtagtggtggtttataagacgggagaaaatagcacctcacttccagaaagctttaagacaaaagctggagtcccaaataaaccaggcattcccaaattactagaagggagtaaaaattcaatacagtgggagaaagctgaagataatggatgtagaattacatactatatccttgagataagaaagagcacttcaaataatttacagaaccagaatttaaggtggaagatgacatttaatggatcctgcagtagtgtttgcacatggaagtccaaaaacctgaaaggaatatttcagttcagagtagtagctgcaaataatctagggtttggtgaatatagtggaatcagtgagaatattatattagttggagatgatttttggataccagaaacaagtttcatacttactattatagttggaatatttctggttgttacaatcccactgacctttgtctggcatagaagattaaagaatcaaaaaagtgccaaggaaggggtgacagtgcttataaacgaagacaaagagttggctgagctgcgaggtctggcagccggagtaggcctggctaatgcctgctatgcaatacatactcttccaacccaagaggagattgaaaatcttcctgccttccctcgggaaaaactgactctgcgtctcttgctgggaagtggagcctttggagaagtgtatgaaggaacagcagtggacatcttaggagttggaagtggagaaatcaaagtagcagtgaagactttgaagaagggttccacagaccaggagaagattgaattcctgaaggaggcacatctgatgagcaaatttaatcatcccaacattctgaagcagcttggagtttgtctgctgaatgaaccccaatacattatcctggaactgatggagggaggagaccttcttacttatttgcgtaaagcccggatggcaacgttttatggtcctttactcaccttggttgaccttgtagacctgtgtgtagatatttcaaaaggctgtgtctacttggaacggatgcatttcattcacagggatctggcagctagaaattgccttgtttccgtgaaagactataccagtccacggatagtgaagattggagactttggactcgccagagacatctataaaaatgattactatagaaagagaggggaaggcctgctcccagttcggtggatggctccagaaagtttgatggatggaatcttcactactcaatctgatgtatggtcttttggaattctgatttgggagattttaactcttggtcatcagccttatccagctcattccaaccttgatgtgttaaactatgtgcaaacaggagggagactggagccaccaagaaattgtcctgatgatctgtggaatttaatgacccagtgctgggctcaagaacccgaccaaagacctacttttcatagaattcaggaccaacttcagttattcagaaattttttcttaaatagcatttataagtccagagatgaagcaaacaacagtggagtcataaatgaaagctttgaaggtgaagatggcgatgtgatttgtttgaattcagatgacattatgccagttgctttaatggaaacgaagaaccgagaagggttaaactatatggtacttgctacagaatgtggccaaggtgaagaaaagtctgagggtcctctaggctcccaggaatctgaatcttgtggtctgaggaaagaagagaaggaaccacatgcagacaaagatttctgccaagaaaaacaagtggcttactgcccttctggcaagcctgaaggcctgaactatgcctgtctcactcacagtggatatggagatgggtctgattaatagcgttgtttgggaaatagagagttgagataaacactctcattcagtagttactgaaagaaaactctgctagaatgataaatgtcatggtggtctataactccaaataaacaatgcaacgttcctgatttctaatcttggttctgagagccatttggtttcagttgtagcaatccccataccagctgcctg

SEQ ID NO: 6919 - DNA, 7435 bp, Homo sapiens
  source 1..7435: mol_type = unassigned DNA
caagctttcaagcattcaaaggtctaaatgaaaaaggctaagtattatttcaaaaggcaagtatatcctaatatagcaaaacaaacaaagcaaaatccatcagctactcctccaattgaagtgatgaagcccaaataattcatatagcaaaatggagaaaattagaccggccatctaaaaatctgccattggtgaagtgatgaagaacatttactgtcttattccgaagcttgtcaattttgcaactcttggctgcctatggatttctgtggtgcagtgtacagttttaaatagctgcctaaagtcgtgtgtaactaatctgggccagcagcttgaccttggcacaccacataatctgagtgaaccgtgtatccaaggatgtcacttttggaactctgtagatcagaaaaactgtgctttaaagtgtcgggagtcgtgtgaggttggctgtagcagcgcggaaggtgcatatgaagaggaagtactggaaaatgcagacctaccaactgctccctttgcttcttccattggaagccacaatatgacattacgatggaaatctgcaaacttctctggagtaaaatacatcattcagtggaaatatgcacaacttctgggaagctggacttatactaagactgtgtccagaccgtcctatgtggtcaagcccctgcaccccttcactgagtacattttccgagtggtttggatcttcacagcgcagctgcagctctactcccctccaagtcccagttacaggactcatcctcatggagttcctgaaactgcacctttgattaggaatattgagagctcaagtcccgacactgtggaagtcagctgggatccacctcaattcccaggtggacctattttgggttataacttaaggctgatcagcaaaaatcaaaaattagatgcagggacacagagaaccagtttccagttttactccactttaccaaatactatctacaggttttctattgcagcagtaaatgaagttggtgagggtccagaagcagaatctagtattaccacttcatcttcagcagttcaacaagaggaacagtggctctttttatccagaaaaacttctctaagaaagagatctttaaaacatttagtagatgaagcacattgccttcggttggatgctatataccataatattacaggaatatctgttgatgtccaccagcaaattgtttatttctctgaaggaactctcatatgggcgaagaaggctgccaacatgtctgatgtatctgacctgagaattttttacagaggttcaggattaatttcttctatctccatagattggctttatcaaagaatgtatttcatcatggatgaactggtatgtgtctgtgatttagagaactgctcaaacatcgaggaaattactccaccctctattagtgcacctcaaaaaattgtggctgattcatacaatgggtatgtcttttacctcctgagagatggcatttatagagcagaccttcctgtaccatctggccggtgtgcagaagctgtgcgtattgtggagagttgcacgttaaaggactttgcaatcaagccacaagccaagcgaatcatttacttcaatgacactgcccaagtcttcatgtcaacatttctggatggctctgcttcccatctcatcctacctcgcatcccctttgctgatgtgaaaagttttgcttgtgaaaacaatgactttcttgtcacagatggcaaggtcattttccaacaggatgctttgtcttttaatgaattcatcgtgggatgtgacctgagtcacatagaagaatttgggtttggtaacttggtcatctttggctcatcctcccagctgcaccctctgccaggccgcccgcaggagctttcggtgctgtttggctctcaccaggctcttgttcaatggaagcctcctgcccttgccataggagccaatgtcatcctgatcagtgatattattgaactctttgaattaggcccttctgcctggcagaactggacctatgaggtgaaagtatccacccaagaccctcctgaagtcactcatattttcttgaacataagtggaaccatgctgaatgtacctgagctgcagagtgctatgaaatacaaggtttctgtgagagcaagttctccaaagaggccaggcccctggtcagagccctcagtgggtactaccctggtgccagctagtgaaccaccatttatcatggctgtgaaagaagatgggctttggagtaaaccattaaatagctttggcccaggagagttcttatcctctgatataggaaatgtgtcagacatggattggtataacaacagcctctactacagtgacacgaaaggcgacgtttttgtgtggctgctgaatgggacggatatctcagagaattatcacctacccagcattgcaggagcaggggctttagcttttgagtggctgggtcactttctctactgggctggaaagacatatgtgatacaaaggcagtctgtgttgacgggacacacagacattgttacccacgtgaagctattggtgaatgacatggtggtggattcagttggtggatatctctactggaccacactctattcagtggaaagcaccagactaaatggggaaagttcccttgtactacagacacagccttggttttctgggaaaaaggtaattgctctaactttagacctcagtgatgggctcctgtattggttggttcaagacagtcaatgtattcacctgtacacagctgttcttcggggacagagcactggggataccaccatcacagaatttgcagcctggagtacttctgaaatttcccagaatgcactgatgtactatagtggtcggctgttctggatcaatggctttaggattatcacaactcaagaaataggtcagaaaaccagtgtctctgttttggaaccagccagatttaatcagttcacaattattcagacatcccttaagcccctgccagggaacttttcctttacccctaaggttattccagattctgttcaagagtcttcatttaggattgaaggaaatgcttcaagttttcaaatcctgtggaatggtccccctgcggtagactggggtgtagttttctacagtgtagaatttagtgctcattctaagttcttggctagtgaacaacactctttacctgtatttactgtggaaggactggaaccttatgccttatttaatctttctgtcactccttatacctactggggaaagggccccaaaacatctctgtcacttcgagcacctgaaacagttccatcagcaccagagaaccccagaatatttatattaccaagtggaaaatgctgcaacaagaatgaagttgtggtggaatttaggtggaacaaacctaagcatgaaaatggggtgttaacaaaatttgaaattttctacaatatatccaatcaaagtattacaaacaaaacatgtgaagactggattgctgtcaatgtcactccctcagtgatgtcttttcaacttgaaggcatgagtcccagatgctttattgccttccaggttagggcctttacatctaaggggccaggaccatatgctgacgttgtaaagtctacaacatcagaaatcaacccatttcctcacctcataactcttcttggtaacaagatagtttttttagatatggatcaaaatcaagttgtgtggacgttttcagcagaaagagttatcagtgccgtttgctacacagctgataatgagatgggatattatgctgaaggggactcactctttcttctgcacttgcacaatcgctctagctctgagcttttccaagattcactggtttttgatatcacagttattacaattgactggatttcaaggcacctctactttgcactgaaagaatcacaaaatggaatgcaagtatttgatgttgatcttgaacacaaggtgaaatatcccagagaggtgaagattcacaataggaattcaacaataatttctttttctgtatatcctcttttaagtcgcttgtattggacagaagtttccaattttggctaccagatgttctactacagtattatcagtcacaccttgcaccgaattctgcaacccacagctacaaaccaacaaaacaaaaggaatcaatgttcttgtaatgtgactgaatttgagttaagtggagcaatggctattgatacctctaacctagagaaaccattgatatactttgccaaagcacaagagatctgggcaatggatctggaaggctgtcagtgttggagagttatcacagtacctgctatgctcgcaggaaaaacccttgttagcttaactgtggatggagatcttatatactggatcatcacagcaaaggacagcacacagatttatcaggcaaagaaaggaaatggggccatcgtttcccaggtgaaggccctaaggagtaggcatatcttggcttacagttcagttatgcagccttttccagataaagcgtttctgtctctagcttcagacactgtggaaccaactatacttaatgccactaacactagcctcacaatcagattacctctggccaagacaaacctcacatggtatggcatcaccagccctactccaacatacctggtttattatgcagaagttaatgacaggaaaaacagctctgacttgaaatatagaattctggaatttcaggacagtatagctcttattgaagatttacaaccattttcaacatacatgatacagatagctgtaaaaaattattattcagatcctttggaacatttaccaccaggaaaagagatttggggaaaaactaaaaatggagtaccagaggcagtgcagctcattaatacaactgtgcggtcagacaccagcctcattatatcttggagagaatctcacaagccaaatggacctaaagaatcagtccgttatcagttggcaatctcacacctggccctaattcctgaaactcctctaagacaaagtgaatttccaaatggaaggctcactctccttgttactagactgtctggtggaaatatttatgtgttaaaggttcttgcctgccactctgaggaaatgtggtgtacagagagtcatcctgtcactgtggaaatgtttaacacaccagagaaaccttattccttggttccagagaacactagtttgcaatttaattggaaggctccattgaatgttaacctcatcagattttgggttgagctacagaagtggaaatacaatgagttttaccatgttaaaacttcatgcagccaaggtcctgcttatgtctgtaatatcacaaatctacaaccttatacttcatataatgtcagagtagtggtggtttataagacgggagaaaatagcacctcacttccagaaagctttaagacaaaagctggagtcccaaataaaccaggcattcccaaattactagaagggagtaaaaattcaatacagtgggagaaagctgaagataatggatgtagaattacatactatatccttgagataagaaagagcacttcaaataatttacagaaccagaatttaaggtggaagatgacatttaatggatcctgcagtagtgtttgcacatggaagtccaaaaacctgaaaggaatatttcagttcagagtagtagctgcaaataatctagggtttggtgaatatagtggaatcagtgagaatattatattagttggagatgatttttggataccagaaacaagtttcatacttactattatagttggaatatttctggttgttacaatcccactgacctttgtctggcatagaagattaaagaatcaaaaaagtgccaaggaaggggtgacagtgcttataaacgaagacaaagagttggctgagctgcgaggtctggcagccggagtaggcctggctaatgcctgctatgcaatacatactcttccaacccaagaggagattgaaaatcttcctgccttccctcgggaaaaactgactctgcgtctcttgctgggaagtggagcctttggagaagtgtatgaaggaacagcagtggacatcttaggagttggaagtggagaaatcaaagtagcagtgaagactttgaagaagggttccacagaccaggagaagattgaattcctgaaggaggcacatctgatgagcaaatttaatcatcccaacattctgaagcagcttggagtttgtctgctgaatgaaccccaatacattatcctggaactgatggagggaggagaccttcttacttatttgcgtaaagcccggatggcaacgttttatggtcctttactcaccttggttgaccttgtagacctgtgtgtagatatttcaaaaggctgtgtctacttggaacggatgcatttcattcacagggatctggcagctagaaattgccttgtttccgtgaaagactataccagtccacggatagtgaagattggagactttggactcgccagagacatctataaaaatgattactatagaaagagaggggaaggcctgctcccagttcggtggatggctccagaaagtttgatggatggaatcttcactactcaatctgatgtatggtcttttggaattctgatttgggagattttaactcttggtcatcagccttatccagctcattccaaccttgatgtgttaaactatgtgcaaacaggagggagactggagccaccaagaaattgtcctgatgatctgtggaatttaatgacccagtgctgggctcaagaacccgaccaaagacctacttttcatagaattcaggaccaacttcagttattcagaaattttttcttaaatagcatttataagtccagagatgaagcaaacaacagtggagtcataaatgaaagctttgaaggtgaagatggcgatgtgatttgtttgaattcagatgacattatgccagttgctttaatggaaacgaagaaccgagaagggttaaactatatggtacttgctacagaatgtggccaaggtgaagaaaagtctgagggtcctctaggctcccaggaatctgaatcttgtggtctgaggaaagaagagaaggaaccacatgcagacaaagatttctgccaagaaaaacaagtggcttactgcccttctggcaagcctgaaggcctgaactatgcctgtctcactcacagtggatatggagatgggtctgattaatagcgttgtttgggaaatagagagttgagataaacactctcattcagtagttactgaaagaaaactctgctagaatgataaatgtcatggtggtctataactccaaataaacaatgcaacgttcctgatttctaatcttggttctgagagccatttggtttcagttgtagcaatccccataccagctgcctg

SEQ ID NO: 6920 - DNA, 681 bp, Homo sapiens
  source 1..681: mol_type = unassigned DNA
tggaaatacaatgagttttaccatgttaaaacttcatgcagccaaggtcctgcttatgtctgtaatatcacaaatctacaaccttatacttcatataatgtcagagtagtggtggtttataagacgggagaaaatagcacctcacttccagaaagctttaagacaaaagctggagtcccaaataaaccaggcattcccaaattactagaagggagtaaaaattcaatacagtgggagaaagctgaagataatggatgtagaattacatactatatccttgagataagggactgaaaacacaccgtcgatgaaaaccagccactgatgaacagcctcagacctggccagtacggggagcacgtgaaccataactggcttagaaggactgatttcatgccaacttgaggggagaattccaaattccaaagacactcctctcacaggactatgaaaccatcttttaagaagttccaaggacaaaagtcacttccataattatagtcctggcaacttgatctttagatctatttttgcttcatctggctctggcattcccataaccttaaaaaatgttcctgttcatactagagaattcccttggcccttatttctaattgaaacctccttgaagtttctgttgctgcttttcatgcagagtgaaatacattctaacctgcagaa

SEQ ID NO: 6921 - DNA, 9023 bp, Homo sapiens
  source 1..9023: mol_type = unassigned DNA
gcgagaaagaggtgacattgaagaacaagcccacacttctggatatggtccaaaatgatcagaaactcactctgtcaacctagtaggtgtttggatggatacctcttttttaacagaaagatgtttggagccaggacacatggttttcacattttaatggcaatgctcataggaatccactgcgaagaagacgtcaatgaatgttcttcaaacccttgccaaaatggtggtacttgtgagaacttgcctgggaattatacttgccattgcccatttgataacctttctagaactttttatggaggaagggactgttctgatattctcctgggctgtacccatcagcaatgtctaaataatggaacatgcatccctcacttccaagatggccagcatggattcagctgcctatgtccatctggctacaccgggtccctgtgtgaaatcgcaaccacactttcatttgagggcgatggcttcctgtgggtcaaaagtggctcagtgacaaccaagggctcagtttgtaacatagccctcaggtttcagactgttcagccaatggctcttctacttttccgaagcaacagggatgtgtttgtgaagctggagctgctaagtggctacattcacttatcaattcaggtcaataatcagtcaaaggtgcttctgttcatttcccacaacaccagcgatggagagtggcatttcgtggaggtaatatttgcagaggctgtgacccttaccttaatcgacgactcctgtaaggagaaatgcatcgcgaaagctcctactccacttgaaagtgatcaatcaatatgtgcttttcagaactcctttttgggtggtttaccagtgggaatgaccagcaatggtgttgctctgcttaacttctataatatgccatccacaccttcgtttgtaggctgtctccaagacattaaaattgattggaatcacattaccctggagaacatctcgtctggctcatcattaaatgtcaaggcaggctgtgtgagaaaggattggtgtgaaagccaaccttgtcaaagcagaggacgctgcatcaacttgtggctgagttaccagtgtgactgccacaggccctatgaaggccccaactgtctgagagagtatgtggcaggcagatttggccaggatgactccactggttatgtcatctttactcttgatgagagctatggagacaccatcagcctctccatgtttgtccgaacgcttcaaccatcaggcttacttctagctttggaaaacagcacttatcaatatatccgtgtctggctagagcgcggcagactagcaatgctgactccaaactctcccaaattagtagtaaaatttgttcttaatgatggaaatgtccacttgatatctttgaaaatcaagccatataaaattgaactgtatcagtcttcacaaaacctaggatttatttctgcttctacgtggaaaatcgaaaagggagatgtcatctacattggtggcctacctgacaagcaagagactgaacttaatggtggattcttcaaaggctgtatccaagatgtaagactaaacaaccaaaatctggaattctttccaaatccaacaaacaatgcatctctcaatccagttcttgtcaatgtaacccaaggctgtgctggagacaacagctgcaagtccaacccctgtcacaatggaggtgtttgccattcccggtgggatgacttctcctgttcctgtcctgccctcacaagtgggaaagcctgtgaggaggttcagtggtgtggattcagcccgtgtcctcacggagcccagtgccagccggtgcttcaaggatttgaatgtattgcaaatgctgtttttaatggacaaagcggtcaaatattattcagaagcaatgggaatattaccagagaactcaccaatatcacatttggtttcagaacaagggatgcaaatgtaataatattgcatgcagaaaaagagcctgaatttcttaatattagcattcaagattccagattattctttcaattgcaaagtggcaacagcttttatatgctaagtctgacaagtttgcagtcagtgaatgatggcacatggcacgaagtgaccctttccatgacagacccactgtcccagacctccaggtggcaaatggaagtggacaacgaaacaccttttgtgaccagcacaattgctactggaagcctcaactttttgaaggataatacagatatttatgtgggagacagagctattgacaatataaagggcctgcaagggtgtctaagtacaatagaaatcggaggcatttatctctcttactttgaaaatgttcatggtttcattaataaacctcaggaagagcaatttctcaaaatctctaccaattcagtggtcactggctgtttgcagttaaatgtctgcaactccaacccctgtttgcatggaggaaactgtgaagacatctatagctcttatcattgctcctgtcccttgggatggtcagggaaacactgtgaactcaacatcgatgaatgcttttcaaacccctgtatccatggcaactgctctgacagagttgcagcctaccactgcacatgtgagcctggatacactggtgtgaactgtgaagtggatatagacaactgccagagtcaccagtgtgcaaatggagccacctgcattagtcatactaatggctattcttgcctctgttttggaaattttacaggaaaattttgcagacagagcagattaccctcaacagtctgtgggaatgagaagacaaatctcacttgctacaatggaggcaactgcacagagttccagactgaattaaaatgtatgtgccggccaggttttactggagaatggtgagtcacattagagccttctggaagagaattctgagctaaagaatgatgggattactcaaagttcattttctcctctaattttttatctcagttcccataggaaaatctatgctgaaatagaggttcagacagaatgaaacaataaaaaagaagaaaaactacagtttaggtcaaaggggagaacattttattagacaaaacttcaaatagggaaaaatgatttttaaaaaatgtataatgtgctatttttctttcttataagtacttctgaattcatgtctcttttttgttgctaactctaatacatgatgcaaatatggttgctgtcgaggtaaaataaattacaactaaaagattgcctcatagaattgcctacaacccaaaagtatatataccttatccatatgagtctacttttcccagagaaactcttcaactgttcttcacctcatacaggaattcttaaaatggagttggtcaatggcttcaggcaatctgtgacctgctgaaaatacaggaaaattagaatatgtatttgagtggctaggggtaagttcaggggtagaaataatgcatactgaatagcttttatcagctgcttaaagggatttatgtccccaaaacagttatgaactggggctctatagaatacagatactatataagcagataattgttaaccttttgttttagcactgtgccatgcaccttacaaataccatctctaattcttatagctctgtaaagaaggtttcatgatttttattttgcatatgtgtaaactgaggctgagaggttgagtgacgtataaagggcctatccacacgtttgctgcagtaaggttgagctgccttcaaagcctctgctcttctatttgatgtgccagcataactgtatgaataaatctttgctcaacacaatttctttttttttaatgagaaaggtgttcttccatctcatgtatcatcgagggtaagataagtgatctctgatcaaacttcctacattgaaaaaattaaataaactgagctcagacatatttgacaaagatattttgactgactcaatatttcccataagcatagttaataaaataatggatatgtgagtgctccctggcaagtgccctttggattaattggaattttctgttttctagctggcctcttttgcatcacaaagacacaggtcttttgccatttttacaaaacagcggggagtctagggtatacctgaatttgacccttttaacgttcattttcatttgcagcctgccttctgtggttggttctttgtggtacaggcattccaagtctatatgtgcatgaaaggagatagccttgagtcacattctgctttctgttgcaccaattttggttctgcaacttattaactgagatcgtttagttgtattccaattccatgtatctttcaaaatattgcaaatattttcttgtcattaattttgagtaatccaactattgtcaagggtgggttgcttcctggttgaacgtcacactttctgcctaatggcacaatgcatggaactcatccaaaaccctggattatttttctctgccactcacacattgtttctatttacaacaaatatctccctgtcttctgatatttattagtttacaaaatttatatttgacatttaaattcagatatatttgaaatatagaaagaaaagaaagcttagagttttccttcttttcccaggagacttttcaactggaaaaacttacatgatgctagatatttctaaaacattgaacctgtgttcagtagattctatgctttcaaagtccttaaccatcattacttaattgactagatgttaatggatttatttttacttttcatgcattaattaacctctaataaaaatgccaatgatgctgataatacatgtgtatctattgttgactgtttagttcaacagagaaataggtgagaaagtgatggagtagttagaggaagacagaaaatagtgggctatctcccatggcctagggaaatgtgacttccatcacatccaaggatattgaaaagctatcctcaaataaattggcttctctcctgccttggttaaaccttcagcttaatagtgtcatcctggcaggttttgaatgatggatggtgtgaacactctggcccacccaagaccgagaatgcttggcaggctcctgagggttgtcaagttttgctcagatctaatcagagaagtctccctccagtccagaagcataagccaaaaaaggaaaacaaaatgtctcagctatgcttggtatccaaagggataaggagctgtttttcttggaagaaatctttgttttcctttataccttgggctggccttgccccactacctcaccccctttcattttgagcctagtgattagtctctgacccatacgtgcaagttttacattttggaaggtgagggaaagaataagggaaaattaaaaattgtttacatacaatttcaacattataagctgcactatagagatcttggagctaagattttatataaattttcaaaagtaaaatagccgccttagttgctgttctatcccaaggtcttagcagagtgtttgtcacatagtatgtgttaaataaatatccactgtgtgactgaatacatgattggtgacttaatccatgaatatacagaaaaacaaattcttgctggaaaattagtttaaaaaaatgacaatatcccaggaagaagaaaacttcaatttacctgagacttgatgtcacttgtcttggaaaatttggcttttgaaagtcattctacctcaacatttcagaaattatgcttggctattggaacacagatttattagcaagtacaatcttctaattattgatttttgcttttgttataaaaaaaggatttccacagaaaataattcaaaatctctcagaataaacctctcctcttcctcctcctcctccttccctccttcttttttttttttttttttttttttggtttctctttggtgggctttttccttagcctgagggctctgatgcatgaggatcctgatagcctgaatgtaggtctgccctgcagactccagatggcaaaatacagcctctctccttgtgcccctaataaactgaacatttatataaggtggcaaccacactaatgctcttgagcattgacactggtgtaggcatggcccacttttctcttggtttctaaatatttgcatctattttctcattctaattaattccgtgtgtatatgtatatatatgtgtacagattatttccattaaaccccaaatgtgttaaagaaattttaagaaacatctccgacattatcaagtatgtataaagtatgtgtggatgggtagataagactgtgctgttccagagagataaggcaaactttttcttcccatttcacaaccaatgtattcaacagggacctgggtttctgctgttctgtttattttgaaggtgtgaaaaggacattgatgagtgtgcctctgatccgtgtgtcaatggaggtctgtgccaggacttactcaacaaattccagtgcctctgtgatgttgcctttgctggcgagcgctgcgaggtggacgtaagcagcctctccttttatgtctctctcttattctggcagaatctttttcagcttctttcttacctcattttgcgtatgaatgacgagccagttgttgagtggggtgaacaggaagattattaacatacatttgaacattcccaaatgaaaaaaaaagccattgaatttcaagaaatgccttgattcattttagatctctggggaagaaaaaggaaataaaaaccatctcaataattaaggtaaattcaaggcttattttaaacatatcagaagcactttgtctgtgtataaaatattttcctattctaactttaaatatgaaaaaagtgttcttaatataactagaaatatctccttattgtgtgtatttagtacaaacatattatcattctcaacacttctatatgtgaatgaccactgcaatttcttcccactccatttctgggtattttcacattttaagttgccctccatcactatgattctattttcatttctgttctttcattcttatctattatttatgacacaaaaattgagaattacaggccaggtgtggtggttcactcctataatcccagcactatgggaggctgaagtgggcggaacacctgaggccaggagtttgagaccagcctagccaacgtggtgaaaacctgtctctactaaaaatacaaaagtaactgggagtggtggcacatgcctgtaatcccagctactcaggagggtgaagcaggagacttgcttgaacccaggaggcggccgttgcaatgagccaagattgtgccactgcactccagcctgggcgacaggtgagattctgtctaaaaaaaaaaaaaaaaaaagagagaattaccgattaaaattactgattatattcatctatgtttttacatgaagctattcaaatgaattgttacgttttctctgatatatgattaaatatataaagagaaatcaggaatttacatcgagtccctaaattgtagaaaaacaattatctagtatcagtactcaaattatacctccctggtataatttctgattccataaaactgtctctctaacaaagttacaaataatcctttctctatttcctttcctgcaatactttcccttttcctaacaaatagaacaatttttctgttgtttctaaatttatgagctccttgacttttctatcaaatggactaatttcagttgcttttcaatgaatatttaataaaaataagcactgtagtttatacataaatttaaaagtatatattgtaaaacttgaattttcttagaagcatggttttctaagatttgcaagtaaatttattttcttaagtatctttcagaaaaaaatatgaaagcatagtatacatcataaccaaaatatatttgacattatgattttttaaaataaatgtatacctgaaataatggatctataaagtatactaagatatgcaaaaattaatatattctttattataaatatttcagagattataaaataataatttaaaaaaactttcttaatgtttttattgtttccaccagtacgttatcatttatgctaaatatctttgtgtagatatacccttccaaagaagacgttatttgtgttcatttaaaggaaaaatagtttgatcctatgaattaattcagaaagcaactaaaataacaatggcctgccaaatgtcattttgtaaatatacgtctatgactttaggagctgtcctggtttgaaaacatgaggacagtttatccattggatgccatctatttagtcccaattaagaaagttgtttttttgtgagaatgaccaaggtaaatttaaatataccattcaaacaaacaaggacaaaataatatccttgttatagagtacatgtagcatatagtatgaagtaatatactacaaaagcaaagaaagtgtattctatcttgcaatagtaatagacaatttttatatagcaaattcatatcctttggagtagtgacaatcatttcaaactgggagcaactaattgtgaagattttccttcttactcatccattttcttcacatccaaggctgaacgtgtgatgctgctgcttcagatgatttgttccaaagttaaattttgtgacaaaagacatggggaaaaccttcccatcaatatttacattcacaagtatttgcaataagcataaaatagattatagccagaccatatgtatagttttcacatttactcccttctagacatacctgtacttatgtacttacaggctgttccaaatgtaatatgttctctaccaaatgtggttaagaaatattcactcacaatttctttctgtgtacaattctgatgcctctgttgtcactgtaattgtcagttgcttttctgttttccaaatgtcttcttgtcataaggtatctgactttaaaaaatgttttcccttttctttttattcttctgtattttccagctgcatgtgtgtgactatggcttttacatatttgcacagaaaaataaaacctttgtttctg

SEQ ID NO: 6922 - DNA, 4932 bp, Homo sapiens
  source 1..4932: mol_type = unassigned DNA
tgtaagtagggtgggacagagatggcacctgggggttctgaggcacccgctcctctctgagacagacagggatcaggagccggactgggaccagaccaccagcaacacaccagaggatgttctctaaataagaccatggcacttaagaacattaactaccttctcatcttctacctcagtttctcactgcttatctacataaaaaattccttttgcaataaaaacaacaccaggtgcctctcaaattcttgccaaaacaattctacatgcaaagatttttcaaaagacaatgattgttcttgttcagacacagccaataatttggacaaagactgtgacaacatgaaagacccttgcttctccaatccctgtcaaggaagtgccacttgtgtgaacaccccaggagaaaggagctttctgtgcaaatgtcctcctgggtacagtgggacaatctgtgaaactaccattggttcctgtggcaagaactcctgccaacatggaggtatttgccatcaggaccctatttatcctgtctgcatctgccctgctggatatgctggaagattctgtgagatagatcacgatgagtgtgcttccagcccttgccaaaatggggccgtgtgccaggatggaattgatggttactcctgcttctgtgtcccaggatatcaaggcagacactgcgacttggaagtggatgaatgtgcttcagatccctgcaagaacgaggctacatgcctcaatgaaataggaagatatacttgtatctgtccccacaattattctggtgtaaactgtgaattggaaattgacgaatgttggtcccagccttgtttaaatggtgcaacttgtcaggatgctctgggggcctatttctgcgactgtgcccctggattcctgggggatcactgtgaactcaacactgatgagtgtgccagtcaaccttgtctccatggagggctgtgtgtggatggagaaaacagatatagctgtaactgcacgggtagtggattcacagggacacactgtgagaccttgatgcctctttgttggtcaaaaccttgtcacaataatgctacatgtgaggacagtgttgacaattacacttgtcactgctggcctggatacacaggtgcccagtgtgagatcgacctcaatgaatgcaatagtaacccctgccagtccaatggggaatgtgtggagctgtcctcagagaaacaatatggacgcatcactggactgccttcttctttcagctaccatgaagcctcaggttatgtctgtatctgtcagcctggattcacaggaatccactgcgaagaagacgtcaatgaatgttcttcaaacccttgccaaaatggtggtacttgtgagaacttgcctgggaattatacttgccattgcccatttgataacctttctagaactttttatggaggaagggactgttctgatattctcctgggctgtacccatcagcaatgtctaaataatggaacatgcatccctcacttccaagatggccagcatggattcagctgcctatgtccatctggctacaccgggtccctgtgtgaaatcgcaaccacactttcatttgagggcgatggcttcctgtgggtcaaaagtggctcagtgacaaccaagggctcagtttgtaacatagccctcaggtttcagactgttcagccaatggctcttctacttttccgaagcaacagggatgtgtttgtgaagctggagctgctaagtggctacattcacttatcaattcaggtcaataatcagtcaaaggtgcttctgttcatttcccacaacaccagcgatggagagtggcatttcgtggaggtaatatttgcagaggctgtgacccttaccttaatcgacgactcctgtaaggagaaatgcatcgcgaaagctcctactccacttgaaagtgatcaatcaatatgtgcttttcagaactcctttttgggtggtttaccagtgggaatgaccagcaatggtgttgctctgcttaacttctataatatgccatccacaccttcgtttgtaggctgtctccaagacattaaaattgattggaatcacattaccctggagaacatctcgtctggctcatcattaaatgtcaaggcaggctgtgtgagaaaggattggtgtgaaagccaaccttgtcaaagcagaggacgctgcatcaacttgtggctgagttaccagtgtgactgccacaggccctatgaaggccccaactgtctgagagagtatgtggcaggcagatttggccaggatgactccactggttatgtcatctttactcttgatgagagctatggagacaccatcagcctctccatgtttgtccgaacgcttcaaccatcaggcttacttctagctttggaaaacagcacttatcaatatatccgtgtctggctagagcgcggcagactagcaatgctgactccaaactctcccaaattagtagtaaaatttgttcttaatgatggaaatgtccacttgatatctttgaaaatcaagccatataaaattgaactgtatcagtcttcacaaaacctaggatttatttctgcttctacgtggaaaatcgaaaagggagatgtcatctacattggtggcctacctgacaagcaagagactgaacttaatggtggattcttcaaaggctgtatccaagatgtaagactaaacaaccaaaatctggaattctttccaaatccaacaaacaatgcatctctcaatccagttcttgtcaatgtaacccaaggctgtgctggagacaacagctgcaagtccaacccctgtcacaatggaggtgtttgccattcccggtgggatgacttctcctgttcctgtcctgccctcacaagtgggaaagcctgtgaggaggttcagtggtgtggattcagcccgtgtcctcacggagcccagtgccagccggtgcttcaaggatttgaatgtattgcaaatgctgtttttaatggacaaagcggtcaaatattattcagaagcaatgggaatattaccagagaactcaccaatatcacatttggtttcagaacaagggatgcaaatgtaataatattgcatgcagaaaaagagcctgaatttcttaatattagcattcaagattccagattattctttcaattgcaaagtggcaacagcttttatatgctaagtctgacaagtttgcagtcagtgaatgatggcacatggcacgaagtgaccctttccatgacagacccactgtcccagacctccaggtggcaaatggaagtggacaacgaaacaccttttgtgaccagcacaattgctactggaagcctcaactttttgaaggataatacagatatttatgtgggagacagagctattgacaatataaagggcctgcaagggtgtctaagtacaatagaaatcggaggcatttatctctcttactttgaaaatgttcatggtttcattaataaacctcaggaagagcaatttctcaaaatctctaccaattcagtggtcactggctgtttgcagttaaatgtctgcaactccaacccctgtttgcatggaggaaactgtgaagacatctatagctcttatcattgctcctgtcccttgggatggtcagggaaacactgtgaactcaacatcgatgaatgcttttcaaacccctgtatccatggcaactgctctgacagagttgcagcctaccactgcacatgtgagcctggatacactggtgtgaactgtgaagtggatatagacaactgccagagtcaccagtgtgcaaatggagccacctgcattagtcatactaatggctattcttgcctctgttttggaaattttacaggaaaattttgcagacagagcagattaccctcaacagtctgtgggaatgagaagacaaatctcacttgctacaatggaggcaactgcacagagttccagactgaattaaaatgtatgtgccggccaggttttactggagaatggtgtgaaaaggacattgatgagtgtgcctctgatccgtgtgtcaatggaggtctgtgccaggacttactcaacaaattccagtgcctctgtgatgttgcctttgctggcgagcgctgcgaggtggacttggcagatgacttgatctccgacattttcaccactattggctcagtgactgtcgccttgttactgatcctcttgctggccattgttgcttctgttgtcacctccaacaaaagggcaactcagggaacctacagccccagccgtcaggagaaggagggctcccgagtggaaatgtggaacttgatgccaccccctgcaatggagagactgatttaggagcattgtgtcccttcgagatggggatccacacactgtgaatgtgatgactgtacttcaggtatctctgacatacctgacaatgttaatctgcaactgggattacactggaactacaggaatgattcctttgaccaccttaaaaactttcacagtggttccgctcgacaccattgttttattatattatatcagccaattgcaaaaaaagtctgtgccagtaatttcagccttataattagcaaaaacatcttccagagaataaagtcttctgtggctttagtggctatcactgaaactctttcctcttttcaacctgggaacaaattttagttttcattttaggtttctgtactttctgtagtttctgtgtaaactgccatatgtttacatggaaactacaggaaaaaattggctacatttctcacttctcctatcatgtggtcaaagttattgttgtataccagcgatgggatgtatacttttgtccttcattcatggattcagagaaagctctgggaatgacttatggtccaaaaaagtgacccaatggcaacaaataaaaattgaaatgca

SEQ ID NO: 6923 - DNA, 3743 bp, Homo sapiens
  source 1..3743: mol_type = unassigned DNA
atgatcagaaactcactctgtcaacctagtaggtgtttggatggatacctcttttttaacagaaagatgtttggagccaggacacatggttttcacattttaatggcaatgctcataggaatccactgcgaagaagacgtcaatgaatgttcttcaaacccttgccaaaatggtggtacttgtgagaacttgcctgggaattatacttgccattgcccatttgataacctttctagaactttttatggaggaagggactgttctgatattctcctgggctgtacccatcagcaatgtctaaataatggaacatgcatccctcacttccaagatggccagcatggattcagctgcctatgtccatctggctacaccgggtccctgtgtgaaatcgcaaccacactttcatttgagggcgatggcttcctgtgggtcaaaagtggctcagtgacaaccaagggctcagtttgtaacatagccctcaggtttcagactgttcagccaatggctcttctacttttccgaagcaacagggatgtgtttgtgaagctggagctgctaagtggctacattcacttatcaattcaggtcaataatcagtcaaaggtgcttctgttcatttcccacaacaccagcgatggagagtggcatttcgtggaggtaatatttgcagaggctgtgacccttaccttaatcgacgactcctgtaaggagaaatgcatcgcgaaagctcctactccacttgaaagtgatcaatcaatatgtgcttttcagaactcctttttgggtggtttaccagtgggaatgaccagcaatggtgttgctctgcttaacttctataatatgccatccacaccttcgtttgtaggctgtctccaagacattaaaattgattggaatcacattaccctggagaacatctcgtctggctcatcattaaatgtcaaggcaggctgtgtgagaaaggattggtgtgaaagccaaccttgtcaaagcagaggacgctgcatcaacttgtggctgagttaccagtgtgactgccacaggccctatgaaggccccaactgtctgagagagtatgtggcaggcagatttggccaggatgactccactggttatgtcatctttactcttgatgagagctatggagacaccatcagcctctccatgtttgtccgaacgcttcaaccatcaggcttacttctagctttggaaaacagcacttatcaatatatccgtgtctggctagagcgcggcagactagcaatgctgactccaaactctcccaaattagtagtaaaatttgttcttaatgatggaaatgtccacttgatatctttgaaaatcaagccatataaaattgaactgtatcagtcttcacaaaacctaggatttatttctgcttctacgtggaaaatcgaaaagggagatgtcatctacattggtggcctacctgacaagcaagagactgaacttaatggtggattcttcaaaggctgtatccaagatgtaagactaaacaaccaaaatctggaattctttccaaatccaacaaacaatgcatctctcaatccagttcttgtcaatgtaacccaaggctgtgctggagacaacagctgcaagtccaacccctgtcacaatggaggtgtttgccattcccggtgggatgacttctcctgttcctgtcctgccctcacaagtgggaaagcctgtgaggaggttcagtggtgtggattcagcccgtgtcctcacggagcccagtgccagccggtgcttcaaggatttgaatgtattgcaaatgctgtttttaatggacaaagcggtcaaatattattcagaagcaatgggaatattaccagagaactcaccaatatcacatttggtttcagaacaagggatgcaaatgtaataatattgcatgcagaaaaagagcctgaatttcttaatattagcattcaagattccagattattctttcaattgcaaagtggcaacagcttttatatgctaagtctgacaagtttgcagtcagtgaatgatggcacatggcacgaagtgaccctttccatgacagacccactgtcccagacctccaggtggcaaatggaagtggacaacgaaacaccttttgtgaccagcacaattgctactggaagcctcaactttttgaaggataatacagatatttatgtgggagacagagctattgacaatataaagggcctgcaagggtgtctaagtacaatagaaatcggaggcatttatctctcttactttgaaaatgttcatggtttcattaataaacctcaggaagagcaatttctcaaaatctctaccaattcagtggtcactggctgtttgcagttaaatgtctgcaactccaacccctgtttgcatggaggaaactgtgaagacatctatagctcttatcattgctcctgtcccttgggatggtcagggaaacactgtgaactcaacatcgatgaatgcttttcaaacccctgtatccatggcaactgctctgacagagttgcagcctaccactgcacatgtgagcctggatacactggtgtgaactgtgaagtggatatagacaactgccagagtcaccagtgtgcaaatggagccacctgcattagtcatactaatggctattcttgcctctgttttggaaattttacaggaaaattttgcagacagagcagattaccctcaacagtctgtgggaatgagaagacaaatctcacttgctacaatggaggcaactgcacagagttccagactgaattaaaatgtatgtgccggccaggttttactggagaatggtgtgaaaaggacattgatgagtgtgcctctgatccgtgtgtcaatggaggtctgtgccaggacttactcaacaaattccagtgcctctgtgatgttgcctttgctggcgagcgctgcgaggtggacttggcagatgacttgatctccgacattttcaccactattggctcagtgactgtcgccttgttactgatcctcttgctggccattgttgcttctgttgtcacctccaacaaaagggcaactcagggaacctacagccccagccgtcaggagaaggagggctcccgagtggaaatgtggaacttgatgccaccccctgcaatggagagactgatttaggagcattgtgtcccttcgagatggggatccacacactgtgaatgtgatgactgtacttcaggtatctctgacatacctgacaatgttaatctgcaactgggattacactggaactacaggaatgattcctttgaccaccttaaaaactttcacagtggttccgctcgacaccattgttttattatattatatcagccaattgcaaaaaaagtctgtgccagtaatttcagccttataattagcaaaaacatcttccagagaataaagtcttctgtggctttagtggctatcactgaaactctttcctcttttcaacctgggaacaaattttagttttcattttaggtttctgtactttctgtagtttctgtgtaaactgccatatgtttacatggaaactacaggaaaaaattggctacatttctcacttctcctatcatgtggtcaaagttattgttgtataccagcgatgggatgtatacttttgtccttcattcatggattcagagaaagctctgggaatgacttatggtccaaaaaagtgacccaatggcaacaaataaaaattgaaatgc

SEQ ID NO: 6924 - DNA, 1031 bp, Homo sapiens
  source 1..1031: mol_type = unassigned DNA
gaaaaggacattgatgagtgtgcctctgatccgtgtgtcaatggaggtctgtgccaggacttactcaacaaattccagtgcctctgtgatgttgcctttgctggcgagcgctgcgaggtggactactgagtggtaccagcttgctctggttggtcttcattcctgagtagttccattgtcctgaatatttatttgcctttgctatagaattcgcatcccaatgatttcaatctttccagttggcagatgacttgatctccgacattttcaccactattggctcagtgactgtcgccttgttactgatcctcttgctggccattgttgcttctgttgtcacctccaacaaaagggcaactcagggaacctacagccccagccgtcaggagaaggagggctcccgagtggaaatgtggaacttgatgccaccccctgcaatggagagactgatttaggagcattgtgtcccttcgagatggggatccacacactgtgaatgtgatgactgtacttcaggtatctctgacatacctgacaatgttaatctgcaactgggattacactggaactacaggaatgattcctttgaccaccttaaaaactttcacagtggttccgctcgacaccattgttttattatattatatcagccaattgcaaaaaaagtctgtgccagtaatttcagccttataattagcaaaaacatcttccagagaataaagtcttctgtggctttagtggctatcactgaaactctttcctcttttcaacctgggaacaaattttagttttcattttaggtttctgtactttctgtagtttctgtgtaaactgccatatgtttacatggaaactacaggaaaaaattggctacatttctcacttctcctatcatgtggtcaaagttattgttgtataccagcgatgggatgtatacttttgtccttcattcatggattcagagaaagctctgggaatgacttatggtccaaaaaagtgacccaatggcaacaaataaaaattgaaatgca

SEQ ID NO: 6925 - DNA, 4691 bp, Homo sapiens
  source 1..4691: mol_type = unassigned DNA
atgtgcgcgcacgccgctttacgcatgctccttaagttccccgtactccctcggagaccctagctacacgccgaatccgttactccgggttttcgcagtggctcggtggcctaccccgatcgaaacctagtctggaactgaacctacaatatctctgagggaggacacatctatgactagcagtggcatgtgctcaggaaagattccttttgcaataaaaacaacaccaggtgcctctcaaattcttgccaaaacaattctacatgcaaagatttttcaaaagacaatgattgttcttgttcagacacagccaataatttggacaaagactgtgacaacatgaaagacccttgcttctccaatccctgtcaaggaagtgccacttgtgtgaacaccccaggagaaaggagctttctgtgcaaatgtcctcctgggtacagtgggacaatctgtgaaactaccattggttcctgtggcaagaactcctgccaacatggaggtatttgccatcaggaccctatttatcctgtctgcatctgccctgctggatatgctggaagattctgtgagatagatcacgatgagtgtgcttccagcccttgccaaaatggggccgtgtgccaggatggaattgatggttactcctgcttctgtgtcccaggatatcaaggcagacactgcgacttggaagtggatgaatgtgcttcagatccctgcaagaacgaggctacatgcctcaatgaaataggaagatatacttgtatctgtccccacaattattctggtgtaaactgtgaattggaaattgacgaatgttggtcccagccttgtttaaatggtgcaacttgtcaggatgctctgggggcctatttctgcgactgtgcccctggattcctgggggatcactgtgaactcaacactgatgagtgtgccagtcaaccttgtctccatggagggctgtgtgtggatggagaaaacagatatagctgtaactgcacgggtagtggattcacagggacacactgtgagaccttgatgcctctttgttggtcaaaaccttgtcacaataatgctacatgtgaggacagtgttgacaattacacttgtcactgctggcctggatacacaggtgcccagtgtgagatcgacctcaatgaatgcaatagtaacccctgccagtccaatggggaatgtgtggagctgtcctcagagaaacaatatggacgcatcactggactgccttcttctttcagctaccatgaagcctcaggttatgtctgtatctgtcagcctggattcacaggaatccactgcgaagaagacgtcaatgaatgttcttcaaacccttgccaaaatggtggtacttgtgagaacttgcctgggaattatacttgccattgcccatttgataacctttctagaactttttatggaggaagggactgttctgatattctcctgggctgtacccatcagcaatgtctaaataatggaacatgcatccctcacttccaagatggccagcatggattcagctgcctatgtccatctggctacaccgggtccctgtgtgaaatcgcaaccacactttcatttgagggcgatggcttcctgtgggtcaaaagtggctcagtgacaaccaagggctcagtttgtaacatagccctcaggtttcagactgttcagccaatggctcttctacttttccgaagcaacagggatgtgtttgtgaagctggagctgctaagtggctacattcacttatcaattcaggtcaataatcagtcaaaggtgcttctgttcatttcccacaacaccagcgatggagagtggcatttcgtggaggtaatatttgcagaggctgtgacccttaccttaatcgacgactcctgtaaggagaaatgcatcgcgaaagctcctactccacttgaaagtgatcaatcaatatgtgcttttcagaactcctttttgggtggtttaccagtgggaatgaccagcaatggtgttgctctgcttaacttctataatatgccatccacaccttcgtttgtaggctgtctccaagacattaaaattgattggaatcacattaccctggagaacatctcgtctggctcatcattaaatgtcaaggcaggctgtgtgagaaaggattggtgtgaaagccaaccttgtcaaagcagaggacgctgcatcaacttgtggctgagttaccagtgtgactgccacaggccctatgaaggccccaactgtctgagagagtatgtggcaggcagatttggccaggatgactccactggttatgtcatctttactcttgatgagagctatggagacaccatcagcctctccatgtttgtccgaacgcttcaaccatcaggcttacttctagctttggaaaacagcacttatcaatatatccgtgtctggctagagcgcggcagactagcaatgctgactccaaactctcccaaattagtagtaaaatttgttcttaatgatggaaatgtccacttgatatctttgaaaatcaagccatataaaattgaactgtatcagtcttcacaaaacctaggatttatttctgcttctacgtggaaaatcgaaaagggagatgtcatctacattggtggcctacctgacaagcaagagactgaacttaatggtggattcttcaaaggctgtatccaagatgtaagactaaacaaccaaaatctggaattctttccaaatccaacaaacaatgcatctctcaatccagttcttgtcaatgtaacccaaggctgtgctggagacaacagctgcaagaggcagaccaatgtgggaagggcactcactgagttgggatccagaggacctaagtaccaagtttcactgtttcgcttctgtgtaggatcttgggcaactggaaacaccttctttttatcatctataaaaccaggatccaacccctgtcacaatggaggtgtttgccattcccggtgggatgacttctcctgttcctgtcctgccctcacaagtgggaaagcctgtgaggaggttcagtggtgtggattcagcccgtgtcctcacggagcccagtgccagccggtgcttcaaggatttgaatgtattgcaaatgctgtttttaatggacaaagcggtcaaatattattcagaagcaatgggaatattaccagagaactcaccaatatcacatttggtttcagaacaagggatgcaaatgtaataatattgcatgcagaaaaagagcctgaatttcttaatattagcattcaagattccagattattctttcaattgcaaagtggcaacagcttttatatgctaagtctgacaagtttgcagtcagtgaatgatggcacatggcacgaagtgaccctttccatgacagacccactgtcccagacctccaggtggcaaatggaagtggacaacgaaacaccttttgtgaccagcacaattgctactggaagcctcaactttttgaaggataatacagatatttatgtgggagacagagctattgacaatataaagggcctgcaagggtgtctaagtacaatagaaatcggaggcatttatctctcttactttgaaaatgttcatggtttcattaataaacctcaggaagagcaatttctcaaaatctctaccaattcagtggtcactggctgtttgcagttaaatgtctgcaactccaacccctgtttgcatggaggaaactgtgaagacatctatagctcttatcattgctcctgtcccttgggatggtcagggaaacactgtgaactcaacatcgatgaatgcttttcaaacccctgtatccatggcaactgctctgacagagttgcagcctaccactgcacatgtgagcctggatacactggtgtgaactgtgaagtggatatagacaactgccagagtcaccagtgtgcaaatggagccacctgcattagtcatactaatggctattcttgcctctgttttggaaattttacaggaaaattttgcagacagagcagattaccctcaacagtctgtgggaatgagaagacaaatctcacttgctacaatggaggcaactgcacagagttccagactgaattaaaatgtatgtgccggccaggttttactggagaatggtgtgaaaaggacattgatgagtgtgcctctgatccgtgtgtcaatggaggtctgtgccaggacttactcaacaaattccagtgcctctgtgatgttgcctttgctggcgagcgctgcgaggtggacttggcagatgacttgatctccgacattttcaccactattggctcagtgactgtcgccttgttactgatcctcttgctggccattgttgcttctgttgtcacctccaacaaaagggcaactcagggaacctacagccccagccgtcaggagaaggagggctcccgagtggaaatgtggaacttgatgccaccccctgcaatggagagactgatttaggagcattgtgtcccttcgagatggggatccacacactgtgaatgtgatgactgtacttcaggtatctctgacatacctgacaatgttaatctgcaactgggattacactggaactacaggaatgattcctttgaccaccttaaaaactttcacagtggttccgctcgacaccattgttttattatattatatcagccaattgc

SEQ ID NO: 6926 - DNA, 2942 bp, Homo sapiens
  source 1..2942: mol_type = unassigned DNA
attttgaatctaagtccctgtattttctgtgaaggagctgtaagtagggtgggacagagatggcacctgggggttctgaggcacccgctcctctctgagacagacagggatcaggagccggactgggaccagaccaccagcaacacaccagaggatgttctctaaataagaccatggcacttaagaacattaactaccttctcatcttctacctcagtttctcactgcttatctacataaaaaattccttttgcaataaaaacaacaccaggtgcctctcaaattcttgccaaaacaattctacatgcaaagatttttcaaaagacaatgattgttcttgttcagacacagccaataatttggacaaagactgtgacaacatgaaagacccttgcttctccaatccctgtcaaggaagtgccacttgtgtgaacaccccaggagaaaggagctttctgtgcaaatgtcctcctgggtacagtgggacaatctgtgaaactaccattggttcctgtggcaagaactcctgccaacatggaggtatttgccatcaggaccctatttatcctgtctgcatctgccctgctggatatgctggaagattctgtgagatagatcacgatgagtgtgcttccagcccttgccaaaatggggccgtgtgccaggatggaattgatggttactcctgcttctgtgtcccaggatatcaaggcagacactgcgacttggaagtggatgaatgtgcttcagatccctgcaagaacgaggctacatgcctcaatgaaataggaagatatacttgtatctgtccccacaattattctggtgtaaactgtgaattggaaattgacgaatgttggtcccagccttgtttaaatggtgcaacttgtcaggatgctctgggggcctatttctgcgactgtgcccctggattcctgggggatcactgtgaactcaacactgatgagtgtgccagtcaaccttgtctccatggagggctgtgtgtggatggagaaaacagatatagctgtaactgcacgggtagtggattcacagggacacactgtgagaccttgatgcctctttgttggtcaaaaccttgtcacaataatgctacatgtgaggacagtgttgacaattacacttgtcactgctggcctggatacacaggtgcccagtgtgagatcgacctcaatgaatgcaatagtaacccctgccagtccaatggggaatgtgtggagctgtcctcagagaaacaatatggacgcatcactggactgccttcttctttcagctaccatgaagcctcaggttatgtctgtatctgtcagcctggattcacaggaatccactgcgaagaagacgtcaatgaatgttcttcaaacccttgccaaaatggtggtacttgtgagaacttgcctgggaattatacttgccattgcccatttgataacctttctagaactttttatggaggaagggactgttctgatattctcctgggctgtacccatcagcaatgtctaaataatggaacatgcatccctcacttccaagatggccagcatggattcagctgcctatgtccatctggctacaccgggtccctgtgtgaaatcgcaaccacactttcatttgagggcgatggcttcctgtgggtcaaaagtggctcagtgacaaccaagggctcagtttgtaacatagccctcaggtttcagactgttcagccaatggctcttctacttttccgaagcaacagggatgtgtttgtgaagctggagctgctaagtggctacattcacttatcaattcaggtcaataatcagtcaaaggtgcttctgttcatttcccacaacaccagcgatggagagtggcatttcgtggaggtaatatttgcagaggctgtgacccttaccttaatcgacgactcctgtaaggagaaatgcatcgcgaaagctcctactccacttgaaagtgatcaatcaatatgtgcttttcagaactcctttttgggtggtttaccagtgggaatgaccagcaatggtgttgctctgcttaacttctataatatgccatccacaccttcgtttgtaggctgtctccaagacattaaaattgattggaatcacattaccctggagaacatctcgtctggctcatcattaaatgtcaaggcaggctgtgtgagaaaggattggtgtgaaagccaaccttgtcaaagcagaggacgctgcatcaacttgtggctgagttaccagtgtgactgccacaggccctatgaaggccccaactgtctgagaggaaaattttgcagacagagcagattaccctcaacagtctgtgggaatgagaagacaaatctcacttgctacaatggaggcaactgcacagagttccagactgaattaaaatgtatgtgccggccaggttttactggagaatggtgtgaaaaggacattgatgagtgtgcctctgatccgtgtgtcaatggaggtctgtgccaggacttactcaacaaattccagtgcctctgtgatgttgcctttgctggcgagcgctgcgaggtggacttggcagatgacttgatctccgacattttcaccactattggctcagtgactgtcgccttgttactgatcctcttgctggccattgttgcttctgttgtcacctccaacaaaagggcaactcagggaacctacagccccagccgtcaggagaaggagggctcccgagtggaaatgtggaacttgatgccaccccctgcaatggagagactgatttaggagcattgtgtcccttcgagatggggatccacacactgtgaatgtgatgactgtacttcaggtatctctgacatacctgacaatgttaatctgcaactgggattacactggaactacaggaatgattcctttgaccaccttaaaaactttcacagt

SEQ ID NO: 6927 - DNA, 1671 bp, Homo sapiens
  source 1..1671: mol_type = unassigned DNA
acactgcgtgaattctcctctgtgcactccattatgcttcatgggcagtgattcatgaactacagaaatggtctcagagagagccactgaagaggctggtgagaatctgctgtgcataagcaaaaactccaattgaagctgaaagtgtaaactgtgaattggaaattgacgaatgttggtcccagccttgtttaaatggtgcaacttgtcaggatgctctgggggcctatttctgcgactgtgcccctggattcctgggggatcactgtgaactcaacactgatgagtgtgccagtcaaccttgtctccatggagggctgtgtgtggatggagaaaacagatatagctgtaactgcacgggtagtggattcacagggacacactgtgagaccttgatgcctctttgttggtcaaaaccttgtcacaataatgctacatgtgaggacagtgttgacaattacacttgtcactgctggcctggatacacaggtgcccagtgtgagatcgacctcaatgaatgcaatagtaacccctgccagtccaatggggaatgtgtggagctgtcctcagagaaacaatatggacgcatcactggactgccttcttctttcagctaccatgaagcctcaggttatgtctgtatctgtcagcctggattcacaggaatccactgcgaagaagacgtcaatgaatgttcttcaaacccttgccaaaatggtggtacttgtgagaacttgcctgggaattatacttgccattgcccatttgataacctttctagaactttttatggaggaagggactgttctgatattctcctgggctgtacccatcagcaatgtctaaataatggaacatgcatccctcacttccaagatggccagcatggattcagctgcctatgtccatctggctacaccgggtccctgtgtgaaatcgcaaccacactttcatttgagggcgatggcttcctgtgggtcaaaagtggctcagtgacaaccaagggctcagtttgtaacatagccctcaggtttcagactgttcagccaatggctcttctacttttccgaagcaacagggatgtgtttgtgaagctggagctgctaagtggctacattcacttatcaattcaggtcaataatcagtcaaaggtgcttctgttcatttcccacaacaccagcgatggagagtggcatttcgtggaggctgtctccaagacattaaaattgattggaatcacattaccctggagaacatctcgtctggctcatcattaaatgtcaaggcaggctgtgtgagaaaggattggtgtgaaagccaaccttgtcaaagcagaggacgctgcatcaacttgtggctgagttaccagtgtgactgccacaggccctatgaaggccccaactgtctgagagagtatgtggcaggcagatttggccaggatgactccactggttatgtcatctttactcttgatgagagctatggagacaccatcagcctctccatgtttgtccgaacgcttcaaccatcaggcttacttctagctttggaaaacagcacttatcaatatatccgtgtctggctagagcgcggcagactagcaatgctgactccaaactctcccaaattagtagtaaaatttgttcttaatgatggaaatgtccacttgat

SEQ ID NO: 6928 - DNA, 3474 bp, Homo sapiens
  source 1..3474: mol_type = unassigned DNA
actgctgtaactttcttctgcggggagggcaaaaggttcttctgctgcagcatgaaatggttgcatgctgccaactgccccgcatctgctgaaaggaggccctgctgtttatggggactgcttatggggtcaccacatagctgaccttgctctgtctcttctctatgaatccactgcgaagaagacgtcaatgaatgttcttcaaacccttgccaaaatggtggtacttgtgagaacttgcctgggaattatacttgccattgcccatttgataacctttctagaactttttatggaggaagggactgttctgatattctcctgggctgtacccatcagcaatgtctaaataatggaacatgcatccctcacttccaagatggccagcatggattcagctgcctatgtccatctggctacaccgggtccctgtgtgaaatcgcaaccacactttcatttgagggcgatggcttcctgtgggtcaaaagtggctcagtgacaaccaagggctcagtttgtaacatagccctcaggtttcagactgttcagccaatggctcttctacttttccgaagcaacagggatgtgtttgtgaagctggagctgctaagtggctacattcacttatcaattcaggtcaataatcagtcaaaggtgcttctgttcatttcccacaacaccagcgatggagagtggcatttcgtggaggtaatatttgcagaggctgtgacccttaccttaatcgacgactcctgtaaggagaaatgcatcgcgaaagctcctactccacttgaaagtgatcaatcaatatgtgcttttcagaactcctttttgggtggtttaccagtgggaatgaccagcaatggtgttgctctgcttaacttctataatatgccatccacaccttcgtttgtaggctgtctccaagacattaaaattgattggaatcacattaccctggagaacatctcgtctggctcatcattaaatgtcaaggcaggctgtgtgagaaaggattggtgtgaaagccaaccttgtcaaagcagaggacgctgcatcaacttgtggctgagttaccagtgtgactgccacaggccctatgaaggccccaactgtctgagagagtatgtggcaggcagatttggccaggatgactccactggttatgtcatctttactcttgatgagagctatggagacaccatcagcctctccatgtttgtccgaacgcttcaaccatcaggcttacttctagctttggaaaacagcacttatcaatatatccgtgtctggctagagcgcggcagactagcaatgctgactccaaactctcccaaattagtagtaaaatttgttcttaatgatggaaatgtccacttgatatctttgaaaatcaagccatataaaattgaactgtatcagtcttcacaaaacctaggatttatttctgcttctacgtggaaaatcgaaaagggagatgtcatctacattggtggcctacctgacaagcaagagactgaacttaatggtggattcttcaaaggctgtatccaagatgtaagactaaacaaccaaaatctggaattctttccaaatccaacaaacaatgcatctctcaatccagttcttgtcaatgtaacccaaggctgtgctggagacaacagctgcaagtccaacccctgtcacaatggaggtgtttgccattcccggtgggatgacttctcctgttcctgtcctgccctcacaagtgggaaagcctgtgaggaggttcagtggtgtggattcagcccgtgtcctcacggagcccagtgccagccggtgcttcaaggatttgaatgtattgcaaatgctgtttttaatggacaaagcggtcaaatattattcagaagcaatgggaatattaccagagaactcaccaatatcacatttggtttcagaacaagggatgcaaatgtaataatattgcatgcagaaaaagagcctgaatttcttaatattagcattcaagattccagattattctttcaattgcaaagtggcaacagcttttatatgctaagtctgacaagtttgcagtcagtgaatgatggcacatggcacgaagtgaccctttccatgacagacccactgtcccagacctccaggtggcaaatggaagtggacaacgaaacaccttttgtgaccagcacaattgctactggaagcctcaactttttgaaggataatacagatatttatgtgggagacagagctattgacaatataaagggcctgcaagggtgtctaagtacaatagaaatcggaggcatttatctctcttactttgaaaatgttcatggtttcattaataaacctcaggaagagcaatttctcaaaatctctaccaattcagtggtcactggctgtttgcagttaaatgtctgcaactccaacccctgtttgcatggaggaaactgtgaagacatctatagctcttatcattgctcctgtcccttgggatggtcagggaaacactgtgaactcaacatcgatgaatgcttttcaaacccctgtatccatggcaactgctctgacagagttgcagcctaccactgcacatgtgagcctggatacactggtgtgaactgtgaagtggatatagacaactgccagagtcaccagtgtgcaaatggagccacctgcattagtcatactaatggctattcttgcctctgttttggaaattttacaggaaaattttgcagacagagcagattaccctcaacagtctgtgggaatgagaagacaaatctcacttgctacaatggaggcaactgcacagagttccagactgaattaaaatgtatgtgccggccaggttttactggagaatggtgtgaaaaggacattgatgagtgtgcctctgatccgtgtgtcaatggaggtctgtgccaggacttactcaacaaattccagtgcctctgtgatgttgcctttgctggcgagcgctgcgaggtggacttggcagatgacttgatctccgacattttcaccactattggctcagtgactgtcgccttgttactgatcctcttgctggccattgttgcttctgttgtcacctccaacaaaagggcaactcagggaacctacagccccagccgtcaggagaaggagggctcccgagtggaaatgtggaacttgatgccaccccctgcaatggagagactgatttaggagcattgtgtcccttcgagatggggatccacacactgtgaatgtgatgactgtacttcaggtatctctgacatacctgacaatgttaatctgcaactgggattacactggaactacaggaatgattcctttgaccaccttaaaaactttcacagtggttccgctcgacaccattgttttattatattatatcagccaattgcaaaaaaagtctgtgccagtaatttcagccttataattagcaaaaacatcttccag

SEQ ID NO: 6929 - DNA, 3885 bp, Homo sapiens
  source 1..3885: mol_type = unassigned DNA
atggcacttaagaacattaactaccttctcatcttctacctcagtttctcactgcttatctacataaaaaattccttttgcaataaaaacaacaccaggtgcctctcaaattcttgccaaaacaattctacatgcaaagatttttcaaaagacaatgattgttcttgttcagacacagccaataatttggacaaagactgtgacaacatgaaagacccttgcttctccaatccctgtcaaggaagtgccacttgtgtgaacaccccaggagaaaggagctttctgtgcaaatgtcctcctgggtacagtgggacaatctgtgaaactaccattggttcctgtggcaagaactcctgccaacatggaggtatttgccatcaggaccctatttatcctgtctgcatctgccctgctggatatgctggaagattctgtgagatagatcacgatgagtgtgcttccagcccttgccaaaatggggccgtgtgccaggatggaattgatggttactcctgcttctgtgtcccaggatatcaaggcagacactgcgacttggaagtggatgaatgtgcttcagatccctgcaagaacgaggctacatgcctcaatgaaataggaagatatacttgtatctgtccccacaattattctggatacacaggtgcccagtgtgagatcgacctcaatgaatgcaatagtaacccctgccagtccaatggggaatgtgtggagctgtcctcagagaaacaatatggacgcatcactggactgccttcttctttcagctaccatgaagcctcaggttatgtctgtatctgtcagcctggattcacaggaatccactgcgaagaagacgtcaatgaatgttcttcaaacccttgccaaaatggtggtacttgtgagaacttgcctgggaattatacttgccattgcccatttgataacctttctagaactttttatggaggaagggactgttctgatattctcctgggctgtacccatcagcaatgtctaaataatggaacatgcatccctcacttccaagatggccagcatggattcagctgcctatgtccatctggctacaccgggtccctgtgtgaaatcgcaaccacactttcatttgagggcgatggcttcctgtgggtcaaaagtggctcagtgacaaccaagggctcagtttgtaacatagccctcaggtttcagactgttcagccaatggctcttctacttttccgaagcaacagggatgtgtttgtgaagctggagctgctaagtggctacattcacttatcaattcaggtcaataatcagtcaaaggtgcttctgttcatttcccacaacaccagcgatggagagtggcatttcgtggaggtaatatttgcagaggctgtgacccttaccttaatcgacgactcctgtaaggagaaatgcatcgcgaaagctcctactccacttgaaagtgatcaatcaatatgtgcttttcagaactcctttttgggtggtttaccagtgggaatgaccagcaatggtgttgctctgcttaacttctataatatgccatccacaccttcgtttgtaggctgtctccaagacattaaaattgattggaatcacattaccctggagaacatctcgtctggctcatcattaaatgtcaaggcaggctgtgtgagaaaggattggtgtgaaagccaaccttgtcaaagcagaggacgctgcatcaacttgtggctgagttaccagtgtgactgccacaggccctatgaaggccccaactgtctgagagagtatgtggcaggcagatttggccaggatgactccactggttatgtcatctttactcttgatgagagctatggagacaccatcagcctctccatgtttgtccgaacgcttcaaccatcaggcttacttctagctttggaaaacagcacttatcaatatatccgtgtctggctagagcgcggcagactagcaatgctgactccaaactctcccaaattagtagtaaaatttgttcttaatgatggaaatgtccacttgatatctttgaaaatcaagccatataaaattgaactgtatcagtcttcacaaaacctaggatttatttctgcttctacgtggaaaatcgaaaagggagatgtcatctacattggtggcctacctgacaagcaagagactgaacttaatggtggattcttcaaaggctgtatccaagatgtaagactaaacaaccaaaatctggaattctttccaaatccaacaaacaatgcatctctcaatccagttcttgtcaatgtaacccaaggctgtgctggagacaacagctgcaagtccaacccctgtcacaatggaggtgtttgccattcccggtgggatgacttctcctgttcctgtcctgccctcacaagtgggaaagcctgtgaggaggttcagtggtgtggattcagcccgtgtcctcacggagcccagtgccagccggtgcttcaaggatttgaatgtattgcaaatgctgtttttaatggacaaagcggtcaaatattattcagaagcaatgggaatattaccagagaactcaccaatatcacatttggtttcagaacaagggatgcaaatgtaataatattgcatgcagaaaaagagcctgaatttcttaatattagcattcaagattccagattattctttcaattgcaaagtggcaacagcttttatatgctaagtctgacaagtttgcagtcagtgaatgatggcacatggcacgaagtgaccctttccatgacagacccactgtcccagacctccaggtggcaaatggaagtggacaacgaaacaccttttgtgaccagcacaattgctactggaagcctcaactttttgaaggataatacagatatttatgtgggagacagagctattgacaatataaagggcctgcaagggtgtctaagtacaatagaaatcggaggcatttatctctcttactttgaaaatgttcatggtttcattaataaacctcaggaagagcaatttctcaaaatctctaccaattcagtggtcactggctgtttgcagttaaatgtctgcaactccaacccctgtttgcatggaggaaactgtgaagacatctatagctcttatcattgctcctgtcccttgggatggtcagggaaacactgtgaactcaacatcgatgaatgcttttcaaacccctgtatccatggcaactgctctgacagagttgcagcctaccactgcacatgtgagcctggatacactggtgtgaactgtgaagtggatatagacaactgccagagtcaccagtgtgcaaatggagccacctgcattagtcatactaatggctattcttgcctctgttttggaaattttacaggaaaattttgcagacagagcagattaccctcaacagtctgtgggaatgagaagacaaatctcacttgctacaatggaggcaactgcacagagttccagactgaattaaaatgtatgtgccggccaggttttactggagaatggtgtgaaaaggacattgatgagtgtgcctctgatccgtgtgtcaatggaggtctgtgccaggacttactcaacaaattccagtgcctctgtgatgttgcctttgctggcgagcgctgcgaggtggacttggcagatgacttgatctccgacattttcaccactattggctcagtgactgtcgccttgttactgatcctcttgctggccattgttgcttctgttgtcacctccaacaaaagggcaactcagggaacctacagccccagccgtcaggagaaggagggctcccgagtggaaatgtggaacttgatgccaccccctgcaatggagagactgatttag

SEQ ID NO: 6930 - DNA, 3659 bp, Homo sapiens
  source 1..3659: mol_type = unassigned DNA
agtgctggttggagggacgaggggggtgcggagccagccaggccgccctcccgttctcacagcagccgagcagagcgcagagcgggctgccatggcgctggccaggcctgggaccccggacccccaggccctggcctctgtcctgctactgctgctctgggcccctgccctttccctcctggctgggacggtgccttcagagccccccagtgcctgtgcctcagacccgtgcgctccagggaccgagtgccaggctaccgagagtggtggctatacctgtgggcccatggagccccggggctgtgccacccagccatgccaccacggcgctctgtgtgtgccccagggtccagatcccaccggcttccgctgctactgcgtgccgggtttccagggcccacgctgcgagctggacatcgatgagtgtgcatcccggccgtgccaccatggggccacctgccgcaacctggccgatcgctacgagtgccattgcccccttggctatgcaggcgtgacctgcgagatggaggtggacgagtgcgcctcagcgccctgcctgcacgggggctcgtgcctggacggcgtgggctccttccgctgtgtgtgcgcgccaggctacgggggcacccgttgccagctggacctcgacgagtgccagagccagccgtgcgcacatgggggcacgtgccacgacctggtcaacgggttccggtgcgactgcgcgggcaccggctacgagggcacgcactgcgagcgggaggtgctggagtgcgcatcggcgccctgcgagcacaacgcgtcctgcctcgagggcctcgggagcttccgctgcctctgttggccaggctacagcggcgagctgtgcgaggtggacgaggacgagtgtgcatcgagcccctgccagcatgggggccgatgcctgcagcgctctgacccggccctctacgggggtgtccaggccgccttccctggcgccttcagcttccgccatgctgcgggtttcctgtgccactgccctcctggctttgagggagccgactgcggtgtggaggtggacgagtgtgcctcacggccatgcctcaacggaggccactgccaggacctgcccaatggcttccagtgtcactgcccagatggctacgcagggccgacatgtgaggaagatgtggatgaatgcctgtcggatccctgcctgcacggcggaacctgcagtgacactgtggcaggctatatctgcaggtgcccagagacctggggtgggcgcgactgttctgtgcagctcactggctgccagggccacacctgcccgctggctgccacctgcatccctatcttcgagtctggggtccacagttacgtctgccactgcccacctggtacccatggaccgttctgtggccagaataccaccttctctgtgatggctgggagccccattcaggcatcagtgccagctggtggccccctgggtctggcactgaggtttcgcaccacactgcccgctgggaccttggccactcgcaatgacaccaaggaaagcttggagctggcattggtggcagccacacttcaggccacactctggagctacagcaccactgtgcttgtcctgagactgccggacctggccctaaacgatggccattggcaccaggtggaggttgtgctccatctagcgaccctggagctacggctctggcatgagggctgccctgcccggctctgtgtggcctctggtcctgtggccctggcttccacggcttcggcaactccgctgcctgccgggatctcctctgcccagctgggggacgcgacctttgcaggctgcctccaggacgtgcgtgtggatggccacctcctgctgcctgaggatctcggtgagaacgtcctcctgggctgtgagcgccgagagcagtgccggcctctgccttgtgtccacggagggtcctgtgtggatctgtggactcatttccgttgcgactgtgcccggccccatagaggtcccacgtgcgctgatgagattcctgctgccacctttggcttgggaggcgccccaagctctgcctcctttctgctccaagagctgccaggtcccaacctcacagtgtctttccttctccgcactcgggagtccgctggcctgttgctccagtttgccaatgactccgcagctggcctaacagtattcctgagtgagggtcggatccgggctgaggtgccgggcagtcctgctgtagtgctccctgggcgctgggatgatgggctccgtcacctggtgatgctcagcttcgggcctgaccagctgcaggacctggggcagcacgtgcacgtgggtgggaggctccttgctgccgacagccagccctggggtgggcccttccgaggctgcctccaggacctgcgactcgatggctgccacctccccttctttcctctgccactggataactcaagccagcccagcgagctcggcggcaggcagtcctggaacctcactgcgggctgcgtctccgaggacatgtgcagtcctgacccctgtttcaatggtgggacttgcctcgtcacctggaatgacttccactgtacctgccctgccaatttcacggggcctacgtgtgcccagcagctgtggtgtcccggccagccctgtctcccacctgccacgtgtgaggaggtccctgatggctttgtgtgtgtggcggaggccacgttccgcgagggtccccccgccgcgttcagcgggcacaacgcgtcgtcagggcgcttgctcggcggcctgtcgctggcctttcgcacgcgcgactccgaggcctggctgctgcgtgccgcggcgggcgccctggaaggcgtgtggctggcggtgcgcaatggctcgctggcggggggcgtgcgcggaggccatggcctgcccggcgctgtgctgcccataccggggccgcgcgtggccgatggtgcctggcaccgcgtgcgtctggccatggagcgcccggcggccaccacctcgcgctggctgctgtggctggatggtgccgccaccccggtggcgctgcgcggcctggccagtgacctgggcttcctgcagggcccgggtgctgtgcgcatcctgctggctgagaacttcaccggctgcttgggccgcgtggcgctgggcggcctgcccctgcccttggcgcggccccggcccggcgcggcccctggcgcccgagagcacttcgcgtcttggcctgggacgccggccccgatcctcggctgccgcggcgcgcccgtgtgtgcgccctcgccctgtctgcacgacggtgcctgccgtgacctcttcgacgcctttgcctgcgcctgcggcccggggtgggaaggcccgcgctgcgaagcccacgtcgacccctgtcactccgccccctgcgcccgtggccgctgtcacacgcaccccgacggccgcttcgagtgccgctgcccgcctggcttcgggggcccgcgctgcaggtgggatggctgggcaggggggtgggctgcgaatgccccctggggctatggtggggcagagaagtctgccaggtctgtggatgagtcgcttcccttccctggtcctcatgtccttatctgtgacatgaggaggacagtttaatttgataaatttcctgataaaatacagatcaaaacac

SEQ ID NO: 6931 - DNA, 4553 bp, Homo sapiens
  source 1..4553: mol_type = unassigned DNA
atggcaatggagccgggggctctgtggaccttcctgggccacctgtggctcctggcagggccgacatgtgaggaagatgtggatgaatgcctgtcggatccctgcctgcacggcggaacctgcagtgacactgtggcaggctatatctgcaggtgcccagagacctggggtgggcgcgactgttctgtgcagctcactggctgccagggccacacctgcccgctggctgccacctgcatccctatcttcgagtctggggtccacagttacgtctgccactgcccacctggtacccatggaccgttctgtggccagaataccaccttctctgtgatggctgggagccccattcaggcatcagtgccagctggtggccccctgggtctggcactgaggtttcgcaccacactgcccgctgggaccttggccactcgcaatgacaccaaggaaagcttggagctggcattggtggcagccacacttcaggccacactctggagctacagcaccactgtgcttgtcctgagactgccggacctggccctaaacgatggccattggcaccaggtggaggttgtgctccatctagcgaccctggagctacggctctggcatgagggctgccctgcccggctctgtgtggcctctggtcctgtggccctggcttccacggcttcggcaactccgctgcctgccgggatctcctctgcccagctgggggacgcgacctttgcaggctgcctccaggacgtgcgtgtggatggccacctcctgctgcctgaggatctcggtgagaacgtcctcctgggctgtgagcgccgagagcagtgccggcctctgccttgtgtccacggagggtcctgtgtggatctgtggactcatttccgttgcgactgtgcccggccccatagaggtcccacgtgcgctgatgagattcctgctgccacctttggcttgggaggcgccccaagctctgcctcctttctgctccaagagctgccaggtcccaacctcacagtgtctttccttctccgcactcgggagtccgctggcctgttgctccagtttgccaatgactccgcagctggcctaacagtattcctgagtgagggtcggatccgggctgaggtgccgggcagtcctgctgtagtgctccctgggcgctgggatgatgggctccgtcacctggtgatgctcagcttcgggcctgaccagctgcaggacctggggcagcacgtgcacgtgggtgggaggctccttgctgccgacagccagccctggggtgggcccttccgaggctgcctccaggacctgcgactcgatggctgccacctccccttctttcctctgccactggataactcaagccagcccagcgagctcggcggcaggcagtcctggaacctcactgcgggctgcgtctccgaggacatgtgcagtcctgacccctgtttcaatggtgggacttgcctcgtcacctggaatgacttccactgtacctgccctgccaatttcacggggcctacgtgtgcccagcagctgtggtgtcccggccagccctgtctcccacctgccacgtgtgaggaggtccctgatggctttgtgtgtgtggcggaggccacgttccgcgagggtccccccgccgcgttcagcgggcacaacgcgtcgtcagggcgcttgctcggcggcctgtcgctggcctttcgcacgcgcgactccgaggcctggctgctgcgtgccgcggcgggcgccctggaaggcgtgtggctggcggtgcgcaatggctcgctggcggggggcgtgcgcggaggccatggcctgcccggcgctgtgctgcccataccggggccgcgcgtggccgatggtgcctggcaccgcgtgcgtctggccatggagcgcccggcggccaccacctcgcgctggctgctgtggctggatggtgccgccaccccggtggcgctgcgcggcctggccagtgacctgggcttcctgcagggcccgggtgctgtgcgcatcctgctggctgagaacttcaccggctgcttgggccgcgtggcgctgggcggcctgcccctgcccttggcgcggccccggcccggcgcggcccctggcgcccgagagcacttcgcgtcttggcctgggacgccggccccgatcctcggctgccgcggcgcgcccgtgtgtgcgccctcgccctgtctgcacgacggtgcctgccgtgacctcttcgacgcctttgcctgcgcctgcggcccggggtgggaaggcccgcgctgcgaagcccacgtcgacccctgtcactccgccccctgcgcccgtggccgctgtcacacgcaccccgacggccgcttcgagtgccgctgcccgcctggcttcgggggcccgcgctgcaggttgcctgtcccatccaaggagtgcagcctgaatgtcacctgcctcgatggcagcccatgtgagggtggctctcccgctgccaactgcagctgcctggagggtcttgctggccagaggtgtcaggtccccactctcccctgtgaagccaacccctgcttgaatgggggcacctgccgggcagctggaggggtgtctgaatgtatctgcaatgccagattctccggccagttctgtgaagtggcgaagggcctgcccctgccgctgccattcccactgctggaggtggccgtacctgcagcctgtgcctgcctcctcctcctcctcctgggcctcctttcagggatcctggcagcccgaaagcgccgccagtctgagggcacctacagcccaagccagcaggaggtggctggggcccggctggagatggacagtgtcctcaaggtgccaccggaggagagactcatctaggccagcctggctgctggcaccagcacctggaggtcctgaatggtttctacctggagacccaaggaagctgcttccagggctcgggacattgctacggaagtgtccccttggctggcagcctctgcctctgcctctgccccatcctggatggaggacgaggggagcaactcagggaaacagaggcctagagaggctgcggacttctccatcccaccctcggggttccgccttggcaggtgtacggctgtgcgtgggagggcacacgtgggttcacagtgtgttcaggagtgtgtgtatctggaggagtgtgtgtgtgagtgtgtacctgggcctgtgttagtctgcagatgctagtgtgagtgtgtcctgacatggctccagggcgtgtctgccgtgtttactgtgtgtctatgactgtgatgggtgtagctgatcccaggaggtggcggctgcgccatggggtcaaccattacagtcctagggcaggggcggcccaaggctgcatgttctccaggaggccaggccggggttgcccaggcacctccttccccgcctctgggggctgctcctgctgtggaggcagctgggaagtcagggaaggccactagcagaggctgagtgggcttctggctcctagaacaaatgtcccttcaggcaggtctgtctgccagaagccagagccagtcatgcgagggaaccacagacccacccgccccctcagccggagcagcccgagggagcagaggaggggctgcctggagcttcccaccctgctgtggtcatttgtcaaagggggaaggcacccactgcctacctcacagggctgttgtgaggatcagagaggacgacagtggggaaagaatctggaagtcttcaactgccgtctgatgggaaggaccgtctgggtgtccttctgggatgaggatgacagagcaacccttctcctgccctgaacccccccagctcacctgaccacctctggttctccagctccggtccttcctagcagcctggtgagctcactccttcccctgatgactggctgcctctacacagactcggcgagaggacttgaaggaagccctctgggttgtctgctgagtacaggggctcagtgaacactggcgctgcctctgagtcggggctgggcctgcagaggccgactcagaggagactctgctgcttgctcccagccccttccccggcgatgcccatcacactgtgacctcccatccctgaagggcacctgcctgagggcctggcctccttccagcttcatggacctggagatgtgccctttcatccttcctgcttcccaggccagtagatccgtttacacttttgggtcgacagtcagcttttccttttggttttggcgggtcccagaggcatgggtgtccagtccaatgtggggagccacgtgacaacgtgggggactgggacatgggactgggaagtcagcagacgctgggatagagagggccctgaacaccaggctcaggggcttgcttggtccttatcctgtaggaggtgggaccacctttccctgaactttctctacaacccttgggagcgtggggaggaggcggctggttccagggtcagtttactaagttagagatttggaaaacctgtgtcagctgtaactcctaggatattttatgtggaacctaacatgcagatgaaagctg

SEQ ID NO: 6932 - DNA, 5550 bp, Homo sapiens
  source 1..5550: mol_type = unassigned DNA
catggcgctggccaggcctgggaccccggacccccaggccctggcctctgtcctgctactgctgctctgggcccctgccctttccctcctggctgggacggtgccttcagagccccccagtgcctgtgcctcagacccgtgcgctccagggaccgagtgccaggctaccgagagtggtggctatacctgtgggcccatggagccccggggctgtgccacccagccatgccaccacggcgctctgtgtgtgccccagggtccagatcccaccggcttccgctgctactgcgtgccgggtttccagggcccacgctgcgagctggacatcgatgagtgtgcatcccggccgtgccaccatggggccacctgccgcaacctggccgatcgctacgagtgccattgcccccttggctatgcaggcgtgacctgcgagatggaggtggacgagtgcgcctcagcgccctgcctgcacgggggctcgtgcctggacggcgtgggctccttccgctgtgtgtgcgcgccaggctacgggggcacccgttgccagctggacctcgacgagtgccagagccagccgtgcgcacatgggggcacgtgccacgacctggtcaacgggttccggtgcgactgcgcgggcaccggctacgagggcacgcactgcgagcgggaggtgctggagtgcgcatcggcgccctgcgagcacaacgcgtcctgcctcgagggcctcgggagcttccgctgcctctgttggccaggctacagcggcgagctgtgcgaggtggacgaggacgagtgtgcatcgagcccctgccagcatgggggccgatgcctgcagcgctctgacccggccctctacgggggtgtccaggccgccttccctggcgccttcagcttccgccatgctgcgggtttcctgtgccactgccctcctggctttgagggagccgactgcggtgtggaggtggacgagtgtgcctcacggccatgcctcaacggaggccactgccaggacctgcccaatggcttccagtgtcactgcccagatggctacgcagggccgacatgtgaggaagatgtggatgaatgcctgtcggatccctgcctgcacggcggaacctgcagtgacactgtggcaggctatatctgcaggtgcccagagacctggggtgggcgcgactgttctgtgcagctcactggctgccagggccacacctgcccgctggctgccacctgcatccctatcttcgagtctggggtccacagttacgtctgccactgcccacctggtacccatggaccgttctgtggccagaataccaccttctctgtgatggctgggagccccattcaggcatcagtgccagctggtggccccctgggtctggcactgaggtttcgcaccacactgcccgctgggaccttggccactcgcaatgacaccaaggaaagcttggagctggcattggtggcagccacacttcaggccacactctggagctacagcaccactgtgcttgtcctgagactgccggacctggccctaaacgatggccattggcaccaggtggaggttgtgctccatctagcgaccctggagctacggctctggcatgagggctgccctgcccggctctgtgtggcctctggtcctgtggccctggcttccacggcttcggcaactccgctgcctgccgggatctcctctgcccagctgggggacgcgacctttgcaggctgcctccaggacgtgcgtgtggatggccacctcctgctgcctgaggatctcggtgagaacgtcctcctgggctgtgagcgccgagagcagtgccggcctctgccttgtgtccacggagggtcctgtgtggatctgtggactcatttccgttgcgactgtgcccggccccatagaggtcccacgtgcgctgatgagattcctgctgccacctttggcttgggaggcgccccaagctctgcctcctttctgctccaagagctgccaggtcccaacctcacagtgtctttccttctccgcactcgggagtccgctggcctgttgctccagtttgccaatgactccgcagctggcctaacagtattcctgagtgagggtcggatccgggctgaggtgccgggcagtcctgctgtagtgctccctgggcgctgggatgatgggctccgtcacctggtgatgctcagcttcgggcctgaccagctgcaggacctggggcagcacgtgcacgtgggtgggaggctccttgctgccgacagccagccctggggtgggcccttccgaggctgcctccaggacctgcgactcgatggctgccacctccccttctttcctctgccactggataactcaagccagcccagcgagctcggcggcaggcagtcctggaacctcactgcgggctgcgtctccgaggacatgtgcagtcctgacccctgtttcaatggtgggacttgcctcgtcacctggaatgacttccactgtacctgccctgccaatttcacggggcctacgtgtgcccagcagctgtggtgtcccggccagccctgtctcccacctgccacgtgtgaggaggtccctgatggctttgtgtgtgtggcggaggccacgttccgcgagggtccccccgccgcgttcagcgggcacaacgcgtcgtcagggcgcttgctcggcggcctgtcgctggcctttcgcacgcgcgactccgaggcctggctgctgcgtgccgcggcgggcgccctggaaggcgtgtggctggcggtgcgcaatggctcgctggcggggggcgtgcgcggaggccatggcctgcccggcgctgtgctgcccataccggggccgcgcgtggccgatggtgcctggcaccgcgtgcgtctggccatggagcgcccggcggccaccacctcgcgctggctgctgtggctggatggtgccgccaccccggtggcgctgcgcggcctggccagtgacctgggcttcctgcagggcccgggtgctgtgcgcatcctgctggctgagaacttcaccggctgcttgggccgcgtggcgctgggcggcctgcccctgcccttggcgcggccccggcccggcgcggcccctggcgcccgagagcacttcgcgtcttggcctgggacgccggccccgatcctcggctgccgcggcgcgcccgtgtgtgcgccctcgccctgtctgcacgacggtgcctgccgtgacctcttcgacgcctttgcctgcgcctgcggcccggggtgggaaggcccgcgctgcgaagcccacgtcgacccctgtcactccgccccctgcgcccgtggccgctgtcacacgcaccccgacggccgcttcgagtgccgctgcccgcctggcttcgggggcccgcgctgcaggttgcctgtcccatccaaggagtgcagcctgaatgtcacctgcctcgatggcagcccatgtgagggtggctctcccgctgccaactgcagctgcctggagggtcttgctggccagaggtgtcaggtccccactctcccctgtgaagccaacccctgcttgaatgggggcacctgccgggcagctggaggggtgtctgaatgtatctgcaatgccagattctccggccagttctgtgaagtggcgaagggcctgcccctgccgctgccattcccactgctggaggtggccgtacctgcagcctgtgcctgcctcctcctcctcctcctgggcctcctttcagggatcctggcagcccgaaagcgccgccagtctgagggcacctacagcccaagccagcaggaggtggctggggcccggctggagatggacagtgtcctcaaggtgccaccggaggagagactcatctaggccagcctggctgctggcaccagcacctggaggtcctgaatggtttctacctggagacccaaggaagctgcttccagggctcgggacattgctacggaagtgtccccttggctggcagcctctgcctctgcctctgccccatcctggatggaggacgaggggagcaactcagggaaacagaggcctagagaggctgcggacttctccatcccaccctcggggttccgccttggcaggtgtacggctgtgcgtgggagggcacacgtgggttcacagtgtgttcaggagtgtgtgtatctggaggagtgtgtgtgtgagtgtgtacctgggcctgtgttagtctgcagatgctagtgtgagtgtgtcctgacatggctccagggcgtgtctgccgtgtttactgtgtgtctatgactgtgatgggtgtagctgatcccaggaggtggcggctgcgccatggggtcaaccattacagtcctagggcaggggcggcccaaggctgcatgttctccaggaggccaggccggggttgcccaggcacctccttccccgcctctgggggctgctcctgctgtggaggcagctgggaagtcagggaaggccactagcagaggctgagtgggcttctggctcctagaacaaatgtcccttcaggcaggtctgtctgccagaagccagagccagtcatgcgagggaaccacagacccacccgccccctcagccggagcagcccgagggagcagaggaggggctgcctggagcttcccaccctgctgtggtcatttgtcaaagggggaaggcacccactgcctacctcacagggctgttgtgaggatcagagaggacgacagtggggaaagaatctggaagtcttcaactgccgtctgatgggaaggaccgtctgggtgtccttctgggatgaggatgacagagcaacccttctcctgccctgaacccccccagctcacctgaccacctctggttctccagctccggtccttcctagcagcctggtgagctcactccttcccctgatgactggctgcctctacacagactcggcgagaggacttgaaggaagccctctgggttgtctgctgagtacaggggctcagtgaacactggcgctgcctctgagtcggggctgggcctgcagaggccgactcagaggagactctgctgcttgctcccagccccttccccggcgatgcccatcacactgtgacctcccatccctgaagggcacctgcctgagggcctggcctccttccagcttcatggacctggagatgtgccctttcatccttcctgcttcccaggccagtagatccgtttacacttttgggtcgacagtcagcttttccttttggttttggcgggtcccagaggcatgggtgtccagtccaatgtggggagccacgtgacaacgtgggggactgggacatgggactgggaagtcagcagacgctgggatagagagggccctgaacaccaggctcaggggcttgcttggtccttatcctgtaggaggtgggaccacctttccctgaactttctctacaacccttgggagcgtggggaggaggcggctggttccagggtcagtttactaagttagagatttggaaaacctgtgtcagctgtaactcctaggatattttatgtggaacctaacatgcagatgaaagctg

SEQ ID NO: 6933 - DNA, 525 bp, Homo sapiens
  source 1..525: mol_type = unassigned DNA
acggaccgagggttcgagggagggacacggaccaggaacctgagctaggtcaaagacgcccgggccaggtgccccgtcgcaggtgcccctggccggagatgcggtaggaggggcgagcgcgagaagccccttcctcggcgctgccaacccgccacccagcccatggcgaaccccgggctggggctgcttctggcgctgggcctgccgttcctgctggcccgctggggccgagcctgggggcaaatacagaccacttctgcaaatgagaatagcactgttttgccttcatccaccagctccagctccgatggcaacctgcgtccagaagccatcactgctatcatcgtggtcttctccctcttggctgccttgctcctggctgtggggctggcactgttggtgcggaagcttcgggagaagcggcagacggagggcacctaccggcccagtagcgaggagcaggtgggtgcccgcgtgccaccgacccccaacctcaagttgccgccggaagagcggctcatctga

SEQ ID NO: 6934 - DNA, 760 bp, Homo sapiens
  source 1..760: mol_type = unassigned DNA
cggagccggtggggtcggacccacagaacgaccgacggaccgagggttcgagggagggacacggaccaggaacctgagctaggtcaaagacgcccgggccaggtgccccgtcgcaggtgcccctggccggagatgcggtaggaggggcgagcgcgagaagccccttcctcggcgctgccaacccgccacccagcccatggcgaaccccgggctggggctgcttctggcgctgggcctgccgttcctgctggcccgctggggccgagcctgggggcaaatacagaccacttctgcaaatgagaatagcactgttttgccttcatccaccagctccagctccgatggcaacctgcgtccagaagccatcactgctatcatcgtggtcttctccctcttggctgccttgctcctggctgtggggctggcactgttggtgcggaagcttcgggagaagcggcagacggagggcacctaccggcccagtagcgaggagcagttctcccatgcagccgaggcccgggcccctcaggactccaaggagacggtgcagggctgcctgcccatctaggtcccctctcctgcatctgtctcccttcattgctgtgtgaccttggggaaaggcagtgccctctctgggcagtcagatccacccagtgcttaatagcagggaagaaggtacttcaaagactctgcccctgaggtcaagagaggatggggctattcacttttatatatttatataaaattagtagtgagatgt

SEQ ID NO: 6935 - DNA, 1078 bp, Homo sapiens
  source 1..1078: mol_type = unassigned DNA
accgacggaccgagggttcgagggagggacacggaccaggaacctgagctaggtcaaagacgcccgggccaggtgccccgtcgcaggtgcccctggccggagatgcggtaggaggggcgagcgcgagaagccccttcctcggcgctgccaacccgccacccagcccatggcgaaccccgggctggggctgcttctggcgctgggcctgccgttcctgctggcccgctggggccgagcctgggggcaaatacagaccacttctgcaaatgagaatagcactgttttgccttcatccaccagctccagctccgatggcaacctgcgtccagaagccatcactgctatcatcgtggtcttctccctcttggctgccttgctcctggctgtggggctggcactgttggtgcggaagcttcgggagaagcggcagacggagggcacctaccggcccagtagcgaggagcaggtgggtgcccgcgtgccaccgacccccaacctcaagttgccgccggaagagcggctcatctgaacgctggggcctgctgcagccaccaacactgcccaggactgcgggttgctggcttgtacaccgcagctgccaccgagacaccagcctctgatggctcaggaggacttgtggggagaggctgggggcacccatgtggtgggctctgtgcagcatgttgcctctgcttggctgtgcctgcagctcagggtgctggggctcgggacccacccccctgcttgcggaaccaacttttctctgtgtgtccagcaggccccacaaccccctctcctttctttcagttctcccatgcagccgaggcccgggcccctcaggactccaaggagacggtgcagggctgcctgcccatctaggtcccctctcctgcatctgtctcccttcattgctgtgtgaccttggggaaaggcagtgccctctctgggcagtcagatccacccagtgcttaatagcagggaagaaggtacttcaaagactctgcccctgaggtcaagagaggatggggctattcacttttatatatttatataaaattagtagtgagatgtaacaaaa

SEQ ID NO: 6936 - DNA, 2053 bp, Homo sapiens
  source 1..2053: mol_type = unassigned DNA
agcttcttctagaagcaggccctgaacaggacgtgggtaagagatccgctgtcccttgagacttggcctactcccggcactccgcggacagccccagcctgcggacagccccagcctgcgtcacttgtccgcatgccagctccacccgggcggacccacacatggttcctacttcagtctctggaagatttggacacaagtttaaggaaactgaactcccgcctgtttgtagtccggggacagccagccgacgtgttcccaaggctgttcaaggaatggggagtgacccgcttgacctttgaatatgactctgaaccctttgggaaagaacgggatgcagccatcatgaagatggccaaggaggctggtgtggaagtagtgacggagaattctcataccctctatgacctggacaggatcattgagctgaatgggcagaagccaccccttacatacaagcgctttcaggccatcatcagccgcatggagctgcccaagaagccagtgggcttggtgaccagccagcagatggagagctgcagggccgagatccaggagaaccacgacgagacctacggcgtgccctccctggaggagctggggttccccactgaaggacttggtccagctgtctggcagggaggagagacagaagctctggcccgcctggataagcacttggaacggaaggcctgggttgccaactatgagagaccccgaatgaacgccaactccctcctggccagccccacaggcctcagcccctacctgcgctttggttgtctctcctgccgcctcttctactaccgcctgtgggacctgtataaaaaggtgaagcggaacagcacacctcccctctccctatttgggcaactcctatggcgagagttcttctacacggcagctaccaacaaccccaggtttgaccgcatggaggggaaccccatctgcatccagatcccctgggaccgcaatcctgaggccctggccaagtgggctgagggcaagacaggcttcccttggattgatgccatcatgacccaactgaggcaggagggctggatccaccacctggcccggcatgccgtggcctgcttcctgacccgcggggacctctgggtcagctgggagagcggggtccgggtatttgatgagctgctcctggatgcagatttcagcgtgaacgcaggcagctggatgtggctgtcctgcagtgctttcttccagcagttcttccactgctactgccctgtgggctttggccgtcgcacggaccccagtggggactacatcaggcgatacctgcccaaattgaaagcgttcccctctcgatacatctatgagccctggaatgccccagagtcaattcagaaggcagccaagtgcatcattggtgtggactacccacggcccatcgtcaaccatgccgagaccagccggcttaacattgaacgaatgaagcagatttaccagcagctttcgcgctaccggggactctgtctactggcatctgtcccttcctgtgtggaagacctcagtcaccctgtggcagagcccagctcgagccaggctggcagcatgagcagtgcaggcccaagaccactacccagtggcccagcatcccccaaacgcaagctggaagcagccgaggaaccacctggtgaagaactcagcaaacgggcccgggtggcagagttgccaaccccagagctgccgagcaaggatgcctgagactgcagagcccttgctccgtgagcaaagcctgggtgcccaagcagccaccgcagcagcagagtacaacctgcagagaagctgatcaccgggcagagatagagcgagcatgtgtgtgtgtgtgcgcgtgtgcagaggagggagtggtgtgcctgtttgtgtgtgcatgcatctgttgacactcatgattctgaatgttgcctgggctgggggagtacctgtagcacgccagtgctgtttcccggcctccagacacaaggctcgaggttatggcagtgactttcagctgagacctgttcctgcaagccagctgccttgtctg

SEQ ID NO: 6937 - DNA, 4203 bp, Homo sapiens
  source 1..4203: mol_type = unassigned DNA
gtcataggtcactgggcgggctatgggcggggtccacgtcgcctaccggggcggagcgggggtggctggagcagtctggacagtcatggcggcgactgtggcgacggcggcagctgtggccccggcgccagcgcccggcacggacagcgcctcttcggtgcactggttccgcaaagggctgcgactccacgacaacccggcgttgctggcggccgtgcgcggggcgcgctgcgtgcgctgcgtttacattctcgacccgtggttcgcggcctcctcctcagtcgggatcaaccgatggaggttcctacttcagtctctggaagatttggacacaagtttaaggaaactgaactcccgcctgtttgtagtccggggacagccagccgacgtgttcccaaggctgttcaaggaatggggagtgacccgcttgacctttgaatatgactctgaaccctttgggaaagaacgggatgcagccatcatgaagatggccaaggaggctggtgtggaagtagtgacggagaattctcataccctctatgacctggacaggatcattgagctgaatgggcagaagccaccccttacatacaagcgctttcaggccatcatcagccgcatggagctgcccaagaagccagtgggcttggtgaccagccagcagatggagagctgcagggccgagatccaggagaaccacgacgagacctacggcgtgccctccctggaggagctggggttccccactgaaggacttggtccagctgtctggcagggaggagagacagaagctctggcccgcctggataagcacttggaacggaaggcctgggttgccaactatgagagaccccgaatgaacgccaactccctcctggccagccccacaggcctcagcccctacctgcgctttggttgtctctcctgccgcctcttctactaccgcctgtgggacctgtataaaaaggtgaagcggaacagcacacctcccctctccctatttgggcaactcctatggcgagagttcttctacacggcagctaccaacaaccccaggtttgaccgcatggaggggaaccccatctgcatccagatcccctgggaccgcaatcctgaggccctggccaagtgggctgagggcaagacaggcttcccttggattgatgccatcatgacccaactgaggcaggagggctggatccaccacctggcccggcatgccgtggcctgcttcctgacccgcggggacctctgggtcagctgggagagcggggtccgggtatttgatgagctgctcctggatgcagatttcagcgtgaacgcaggcagctggatgtggctgtcctgcagtgctttcttccagcagttcttccactgctactgccctgtgggctttggccgtcgcacggaccccagtggggactacatcaggcgatacctgcccaaattgaaagcgttcccctctcgatacatctatgagccctggaatgccccagagtcaattcagaaggcagccaagtgcatcattggtgtggactacccacggcccatcgtcaaccatgccgagaccagccggcttaacattgaacgaatgaagcagatttaccagcagctttcgcgctaccggggactctgtctactggcatctgtcccttcctgtgtggaagacctcagtcaccctgtggcagagcccagctcgagccaggctggcagcatgagcagtgcaggcccaagaccactacccagtggcccagcatcccccaaacgcaagctggaagcagccgaggaaccacctggtgaagaactcagcaaacgggcccgggtggcagagttgccaaccccagagctgccgagcaaggatgcctgagactgcagagcccttgctccgtgagcaaagcctgggtgcccaagcagccaccgcagcagcagagtacaacctgcagagaagctgatcaccgggcagagatagagcgagcatgtgtgtgtgtgtgcgcgtgtgcagaggagggagtggtgtgcctgtttgtgtgtgcatgcatctgttgacactcatgattctgaatgttgcctgggctgggggagtacctgtagcacgccagtgctgtttcccggcctccagacacaaggctcgaggttatggcagtgactttcagctgagacctgttcctgcaagccagctgccttgtctgaacagaacgtagtggtaggaccctagctgggattctggcatctgcctccctagacctccttccctccctcctcacgtcaggctgtggagcaggagcacagcagttctggctgttgtccaaagcatgggattctggaggcagccagagccctgctgagttcctgctttctgacctggaggctgagcaggccggagtggatggatgctgtccagacgtagccacctggcctctgtttcttattttaaaattctctgctactgggctcagtcccaggcccttccttgggcttctgggactgagcatgaggccatagacagatctaaaaagtttccaccaccctacagaagtacacacagatacctgactggtgtggggtatgcctggtactgtaataggagcctaagacagcacacctaccttttcaggatttagaacctaaaattagaaagagaatcccagctgtcattgttccttccccagaagctaagagccagcctcagagcctacccaggagctgtgaaggggcaagggtcaaactgactcactctaccaggaggagaccaggttgcagtggcgtaaggccccctggtttctctggccacactccaaggcaccacagtgctgccagtgaggacagctgacacccagccagggaaaccattctagtctttattctgttggcttccagggcctgtcctggacttgtcagcatccagactgccatgtcagctatcccagtagctgagctccaaggactcaggcagagggactcagggatggggactgccaggggcagttggcaaaagtccaagtagagattacacccagaacaccattccttccaggagcagtaggtgggaggtttgacccagagaagccaatccttgcattccaggagtggcctgtgcctcccacctcttccttcccactgccaaaggcctgtgttgagaaagatgtcatgcaaaaggacgacggtggccaactaaagcaagtcttccttccaccctgtggcctgcacttgagccacaaagtgtgtgtgtgtgtgtgcgtgtgtggtacgtgtgtgtgtgtgtggctatgaggctgattcctgtttggatttttgtcctcacgtgtatcattaagctggcctttgggccttttcctttctacctcccctgtgacctttcctagcctcagatctgttaattcttttggccccagccctgtccctcactgtcctctgtccttggaccagaaccctggggtcagacccatctcctgtagctgtccatcacactgacaggcttcttcctgagatatcctcaggttttctcagccagagagctgcctttagagtccaactgttgtacgtatgtcaccttcactagaaatgtcccatcatcgtgggaggggagcagggcacaggggatggtgtgcattcagagcattgggttgggggcttccctgttccctcagccccagtcgagaggaaagagaatcgggccactgccagaaagagagtcaagcaaacctggaagggcaaatctgagagtgggaaggccaaaggccgaggcccagatttagtattcactagcagcgccttcgggtagcaggatgattccttttcctgcctgtctgctgctggctctcttccctaaggtacaggttggcaggaccacctccgcctacttctccaccatccctagcatgtcagcccgttcccagatcaacctgccagtggagtcaggcagtgcactcctggagccaagagggaagggcagggtagagagggtatgtccagtagcctggagctccatggtggcttcatgcctcccttctcccagctcaggtggccctgagggctccctcggaacagtgcctcaaatcctgacccaagggccagcatggggaagagatggttgcaggcaaaatgcactttatagagattttctattgctgggaaggtgtgtttctcccacaatttgtttgtgaatattcacttgttttataaatgtctgacctgtcttgagta

SEQ ID NO: 6938 - DNA, 1139 bp, Homo sapiens
  source 1..1139: mol_type = unassigned DNA
agggagggctcggccttggctccacactgcgctgcccagaggccccgctgactcctgccagcctccaggtccccgtggtaccaaagctgaacatggacgtgaccatccagcacccctggttcaagcgcaccctggggcccttctaccccagccggctgttcgaccagtttttcggcgagggcctttttgagtatgacctgctgcccttcctgtcgtccaccatcagcccctactaccgccagtccctcttccgcaccgtgctggactccggcatctctgaggttcgatccgaccgggacaagttcgtcatcttcctcgatgtgaagcacttctccccggaggacctcaccgtgaaggtgcaggacgactttgtggagatccacggaaagcacaacgagcgccaggacgaccacggctacatttcccgtgagttccaccgccgctaccgcctgccgtccaacgtggaccagtcggccctctcttgctccctgtctgccgatggcatgctgaccttctgtggccccaagatccagactggcctggatgccacccacgccgagcgagccatccccgtgtcgcgggaggagaagcccacctcggctccctcgtcctaagcaggcattgcctcggctggctcccctgcagccctggcccatcatggggggagcaccctgagggcggggtgtctgtcttcctttgcttcccttttttcctttccaccttctcacatggaatgagggtttgagagagcagccaggagagcttagggtctcagggtgtcccagaccccgacaccggccagtggcggaagtgaccgcacctcacactcctttagatagcagcctggctcccctggggtgcaggcgcctcaactctgctgagggtccagaaggagggggtgacctccggccaggtgcctcctgacacacctgcagcctccctccgcggcgggccctgcccacacctcctggggcgcgtgaggcccgtggggccggggcttctgtgcacctgggctctcgcggcctcttctctcagaccgtcttcctccaacccctctatgtagtgccgctcttggggacatgggtcgcccatgagagcgcagcccgcggcaatcaataaacagcaggtgatacaagcaa

SEQ ID NO: 6939 - DNA, 848 bp, Homo sapiens
  source 1..848: mol_type = unassigned DNA
gccattgggtgtggacagaaagctagtgaaacaagaccatgacaagtcactggccggctcagacgtgtttgtgtctctcttttcttagctcaaagcttcacaagactgcatatataaggggctggctgtagctgcagctgaaggagctgaccagccagctgacccctcacactcacctagccaccatggacatcgccatccaccacccctggatccgccgccccttctttcctttccactcccccagccgcctctttgaccagttcttcggagagcacctgttggagtctgatcttttcccgacgtctacttccctgagtcccttctaccttcggccaccctccttcctgcgggcacccagctggtttgacactggactctcagagatgcgcctggagaaggacaggttctctgtcaacctggatgtgaagcacttctccccagaggaactcaaagttaaggtgttgggagatgtgattgaggtgcatggaaaacatgaagagcgccaggatgaacatggtttcatctccagggagttccacaggaaataccggatcccagctgatgtagaccctctcaccattacttcatccctgtcatctgatggggtcctcactgtgaatggaccaaggaaacaggtctctggccctgagcgcaccattcccatcacccgtgaagagaagcctgctgtcaccgcagcccccaagaaatagatgccctttcttgaattgcattttttaaaacaagaaagtttccccaccagtgaatgaaagtcttgtgactagtgctgaagcttattaatgctaagggcaggcccaaattatcaagctaataaaatatcattcagc

SEQ ID NO: 6940 - DNA, 1017 bp, Homo sapiens
  source 1..1017: mol_type = unassigned DNA
gggtgccattgggtgtggacagaaagctagtgaaacaagaccatgacaagtcactggccggctcagacgtgtttgtgtctctcttttcttagctcagtgagtactgggtatgtgtcacattgccaaatcccggatcacaagtctccatgaactgctggtgagctaggataataaaacccctgacatcaccattccagaagcttcacaagactgcatatataaggggctggctgtagctgcagctgaaggagctgaccagccagctgacccctcacactcacctagccaccatggacatcgccatccaccacccctggatccgccgccccttctttcctttccactcccccagccgcctctttgaccagttcttcggagagcacctgttggagtctgatcttttcccgacgtctacttccctgagtcccttctaccttcggccaccctccttcctgcgggcacccagctggtttgacactggactctcagagatgcgcctggagaaggacaggttctctgtcaacctggatgtgaagcacttctccccagaggaactcaaagttaaggtgttgggagatgtgattgaggtgcatggaaaacatgaagagcgccaggatgaacatggtttcatctccagggagttccacaggaaataccggatcccagctgatgtagaccctctcaccattacttcatccctgtcatctgatggggtcctcactgtgaatggaccaaggaaacaggtctctggccctgagcgcaccattcccatcacccgtgaagagaagcctgctgtcaccgcagcccccaagaaatagatgccctttcttgaattgcattttttaaaacaagaaagtttccccaccagtgaatgaaagtcttgtgactagtgctgaagcttattaatgctaagggcaggcccaaattatcaagctaataaaatatcattcagcaacagataactgtcttgtgtttgaatattccacacacttttaaataaatatacagataccacag

SEQ ID NO: 6941 - DNA, 965 bp, Homo sapiens
  source 1..965: mol_type = unassigned DNA
agcaagaggggagtcaggaggagtagggaacgggagggaggccacactgtagctaggaggagaaggcagctcggaagaggggaaagagaacggaaaggtaagggaggaggaggaggagaaggaggaggagggggaggaggaggaggcaccaaacggcctgggtggatagaagggggacaaggaggcacacccaggccggcaaagagcaggtatcagcactgcaagcaccaagtgtgtcttgagctcagtgagtactgggtatgtgtcacattgccaaatcccggatcacaagtctccatgaactgctggtgagctaggataataaaacccctgacatcaccattccagaagcttcacaagactgcatatataaggggctggctgtagctgcagctgaaggagctgaccagccagctgacccctcacactcacctagccaccatggacatcgccatccaccacccctggatccgccgccccttctttcctttccactcccccagccgcctctttgaccagttcttcggagagcacctgttggagtctgatcttttcccgacgtctacttccctgagtcccttctaccttcggccaccctccttcctgcgggcacccagctggtttgacactggactctcagagatgcgcctggagaaggacaggttctctgtcaacctggatgtgaagcacttctccccagaggaactcaaagttaaggtgttgggagatgtgattgaggtgcatggaaaacatgaagagcgccaggatgaacatggtttcatctccagggagttccacaggaaataccggatcccagctgatgtagaccctctcaccattacttcatccctgtcatctgatggggtcctcactgtgaatggaccaaggaaacaggtctctggccctgagcgcaccattcccatcacccgtgaagagaagcctgctgtcaccgcagcccccaagaa

SEQ ID NO: 6942 - DNA, 887 bp, Homo sapiens
  source 1..887: mol_type = unassigned DNA
aacagggagcactgaatttgctcagtgagtactgggtatgtgtcacattgccaaatcccggatcacaagtctccatgaactgctggtgagctaggataataaaacccctgacatcaccattccagaagcttcacaagactgcatatataaggggctggctgtagctgcagctgaaggagctgaccagccagctgacccctcacactcacctagccaccatggacatcgccatccaccacccctggatccgccgccccttctttcctttccactcccccagccgcctctttgaccagttcttcggagagcacctgttggagtctgatcttttcccgacgtctacttccctgagtcccttctaccttcggccaccctccttcctgcgggcacccagctggtttgacactggactctcagagatgcgcctggagaaggacaggttctctgtcaacctggatgtgaagcacttctccccagaggaactcaaagttaaggtgttgggagatgtgattgaggtgcatggaaaacatgaagagcgccaggatgaacatggtttcatctccagggagttccacaggaaataccggatcccagctgatgtagaccctctcaccattacttcatccctgtcatctgatggggtcctcactgtgaatggaccaaggaaacaggtctctggccctgagcgcaccattcccatcacccgtgaagagaagcctgctgtcaccgcagcccccaagaaatagatgccctttcttgaattgcattttttaaaacaagaaagtttccccaccagtgaatgaaagtcttgtgactagtgctgaagcttattaatgctaagggcaggcccaaattatcaagctaataaaatatcattcagcaacaga

SEQ ID NO: 6943 - DNA, 624 bp, Homo sapiens
  source 1..624: mol_type = unassigned DNA
ataccttctccgaagcgctgctcacccaggcggctcgggttggcaaattcgtactcggcggtggccgggtgggcatgtggcactgagcggcccgacatggctgcagatgcagcagaagccctggtccgaggtgcagccccaacaggcgcagcgcgacccctccagctgcccggagagccagggctcgataggagctcagtgagtactgggtatgtgtcacattgccaaatcccggatcacaagtctccatgaactgctggtgagctaggataataaaacccctgacatcaccattccagaagcttcacaagactgcatatataaggggctggctgtagctgcagctgaaggagctgaccagccagctgacccctcacactcacctagccaccatggacatcgccatccaccacccctggatccgccgccccttctttcctttccactcccccagccgcctctttgaccagttcttcggagagcacctgttggagtctgatcttttcccgacgtctacttccctgagtcccttctaccttcggccaccctccttcctgcgggcacccagctggtttgacactggactctcagagatgcgcctggagaaggacaggttctctgtca

SEQ ID NO: 6944 - DNA, 695 bp, Homo sapiens
  source 1..695: mol_type = unassigned DNA
agaaatgcctggaacttgccctcactgagcctaagctcggaggcccctgccctgctgccctccccagctggggcggcccgaggccggacatagtagccatggtagagtctcagtgagtactgggtatgtgtcacattgccaaatcccggatcacaagtctccatgaactgctggtgagctaggataataaaacccctgacatcaccattccagaagcttcacaagactgcatatataaggggctggctgtagctgcagctgaaggagctgaccagccagctgacccctcacactcacctagccaccatggacatcgccatccaccacccctggatccgccgccccttctttcctttccactcccccagccgcctctttgaccagttcttcggagagcacctgttggagtctgatcttttcccgacgtctacttccctgagtcccttctaccttcggccaccctccttcctgcgggcacccagctggtttgacactggactctcagagatgcgcctggagaaggacaggttctctgtcaacctggatgtgaagcacttctccccagaggaactcaaagttaaggtgttgggagatgtgattgaggtgcatggaaaacatgaagagcgccaggatgaacatggtttcatctccagggagttccacaggaaataccggatcccagctgatgtagaccc

SEQ ID NO: 6945 - DNA, 1013 bp, Homo sapiens
  source 1..1013: mol_type = unassigned DNA
aaacggcctgggtggatagaagggggacaaggaggcacacccaggccggcaaagagcaggtatcagcactgcaagcaccaagtgtgtcttgagggggtggggtctttctgcccagatgtgggatcctctcctaaacccaggtcaacccagggcacgaggcagatggctgctcagtgagtactgggtatgtgtcacattgccaaatcccggatcacaagtctccatgaactgctggtgagctaggataataaaacccctgacatcaccattccagaagcttcacaagactgcatatataaggggctggctgtagctgcagctgaaggagctgaccagccagctgacccctcacactcacctagccaccatggacatcgccatccaccacccctggatccgccgccccttctttcctttccactcccccagccgcctctttgaccagttcttcggagagcacctgttggagtctgatcttttcccgacgtctacttccctgagtcccttctaccttcggccaccctccttcctgcgggcacccagctggtttgacactggactctcagagatgcgcctggagaaggacaggttctctgtcaacctggatgtgaagcacttctccccagaggaactcaaagttaaggtgttgggagatgtgattgaggtgcatggaaaacatgaagagcgccaggatgaacatggtttcatctccagggagttccacaggaaataccggatcccagctgatgtagaccctctcaccattacttcatccctgtcatctgatggggtcctcactgtgaatggaccaaggaaacaggtctctggccctgagcgcaccattcccatcacccgtgaagagaagcctgctgtcaccgcagcccccaagaaatagatgccctttcttgaattgcattttttaaaacaagaaagtttccccaccagtgaatgaaagtcttgtgactagtgctgaagcttattaatgctaagggcaggcccaaattatcaagcta

SEQ ID NO: 6946 - DNA, 1119 bp, Homo sapiens
  source 1..1119: mol_type = unassigned DNA
ggcgcagggagcagggagatgtagacctcattgacctctgtgtccaaatgtcggccaccccgaggtgcttccaggtttaagatgccatcatgggagagagcagctcggactcgccaggggtcgacatcagcaggcaggacataggtgcggcagaactctcgggacacgaagccgtggcggtccaggcgctgggggtgccgggcagacacctccagcaggttatccacagtcctcacagtcacctcgtctgggctcagtgagtactgggtatgtgtcacattgccaaatcccggatcacaagtctccatgaactgctggtgagctaggataataaaacccctgacatcaccattccagaagcttcacaagactgcatatataaggggctggctgtagctgcagctgaaggagctgaccagccagctgacccctcacactcacctagccaccatggacatcgccatccaccacccctggatccgccgccccttctttcctttccactcccccagccgcctctttgaccagttcttcggagagcacctgttggagtctgatcttttcccgacgtctacttccctgagtcccttctaccttcggccaccctccttcctgcgggcacccagctggtttgacactggactctcagagatgcgcctggagaaggacaggttctctgtcaacctggatgtgaagcacttctccccagaggaactcaaagttaaggtgttgggagatgtgattgaggtgcatggaaaacatgaagagcgccaggatgaacatggtttcatctccagggagttccacaggaaataccggatcccagctgatgtagaccctctcaccattacttcatccctgtcatctgatggggtcctcactgtgaatggaccaaggaaacaggtctctggccctgagcgcaccattcccatcacccgtgaagagaagcctgctgtcaccgcagcccccaagaaatagatgccctttcttgaattgcattttttaaaacaagaaagtttccccaccagtgaatgaaagtcttgtgactagtgctgaagcttattaatgctaagggcaggcccaaattatcaagctaataaaatatcattcagcaacaga

SEQ ID NO: 6947 - DNA, 479 bp, Homo sapiens
  source 1..479: mol_type = unassigned DNA
aggaggaggaggcaccaaacggcctgggtggatagaagggggacaaggaggcacacccaggccggcaaagagcagctcagtgagtactgggtatgtgtcacattgccaaatcccggatcacaagtctccatgaactgctggtgagctaggataataaaacccctgacatcaccattccagaagcttcacaagactgcatatataaggggctggctgtagctgcagctgaaggagctgaccagccagctgacccctcacactcacctagccaccatggacatcgccatccaccacccctggatccgccgccccttctttcctttccactcccccagccgcctctttgaccagttcttcggagagcacctgttggagtctgatcttttcccgacgtctacttccctgagtcccttctaccttcggccaccctccttcctgcgggcacccagctggtttgacactggactctcagagatgcg

SEQ ID NO: 6948 - DNA, 798 bp, Homo sapiens
  source 1..798: mol_type = unassigned DNA
accagatggagacccaggctgagcagcaggagctggaaacccttccaaccaccaagatggctcagaccaaccctacgccggggtccctggggccatggaagataaccatctatgatcaggagaactttcagggcaagaggatggagttcaccagctcctgtccaaatgtctctgagcgcagttttgataatgtccggtccctgaaggtggaaagtggcgcctggattggttatgagcataccagcttctgtgggcaacagtttatcctggagagaggagaataccctcgctgggatgcctggagtgggagtaatgcctaccacattgagcgtctcatgtccttccgccccatctgttcagctaatcataaggagtctaagatgaccatctttgagaaggaaaactttattggacgccagtgggagatctctgacgactacccctccttgcaagccatgggctggttcaacaacgaagtcggctccatgaagatacaaagtggggcctgggtttgctaccaatatcctggatatcgtgggtatcagtatatcttggaatgtgaccatcatggaggagactataaacattggagagagtggggctctcatgcccagacttcgcagatccaatcgattcgccgaatccaacagtagctgattaaaagctccaagtacgataattcctcaagcatgagaccttgctaagcactctagaataagttttatgttctgctcacagacattgctttcaaatgttagctgctgaaatccacaataaacgtcatttaaaaaaaaaaaa

SEQ ID NO: 6949 - DNA, 893 bp, Homo sapiens
  source 1..893: mol_type = unassigned DNA
gccggtccatttccctcgcgtgccgcgctcacccacccggtgaatgccctctgctggggtggggaagggaggggagcgcgggaagactgcgagcccctggcagccgggtccagagctaggccgggtccagcccccgggttcttcatccgctacccaggttgggcaggctgtgtgtggctcgaaacggggctcttgagacgctgagcgcgtggtgccacccttcctgtccgcagcggcatgagcagcgcccccgcgccgggcccggcgcccgccagcctcacgctctgggacgaggaggacttccagggccgtcgctgtcggctgctaagcgactgtgcgaacgtctgcgagcgcggaggcctgcccagggtgcgctcggtcaaggtggaaaacggcgtttgggtggcctttgagtaccccgacttccagggacagcagttcattctggagaagggagactatcctcgctggagcgcctggagtggcagcagcagccacaacagcaaccagctgctgtccttccggccagtgctctgcgcgaaccacaatgacagccgtgtgacactgtttgagggggacaacttccaaggctgcaagtttgacctcgttgatgactacccatccctgccctccatgggctgggccagcaaggatgtgggttccctcaaagtcagctccggagcgtgggtggcctaccagtacccaggctaccgaggctaccagtatgtgttggagcgggaccggcacagcggagagttctgtacttacggtgagctcggcacacaggcccacactgggcagctgcagtccatccggagagtccagcactaggctccacggccccagacaccttccctgaggacactcaataaaggttcctgaatcttcctgcc

SEQ ID NO: 6950 - DNA, 708 bp, Homo sapiens
  source 1..708: mol_type = unassigned DNA
gcctcgcagccggtccatttccctcgcgtgccgcgctcacccacccgcggcatgagcagcgcccccgcgccgggcccggcgcccgccagcctcacgctctgggacgaggaggacttccagggccgtcgctgtcggctgctaagcgactgtgcgaacgtctgcgagcgcggaggcctgcccagggtgcgctcggtcaaggtggaaaacggcgtttgggtggcctttgagtaccccgacttccagggacagcagttcattctggagaagggagactatcctcgctggagcgcctggagtggcagcagcagccacaacagcaaccagctgctgtccttccggccagtgctctgcgcgaaccacaatgacagccgtgtgacactgtttgagggggacaacttccaaggctgcaagtttgacctcgttgatgactacccatccctgccctccatgggctgggccagcaaggatgtgggttccctcaaagtcagctccggagcgtgggtggcctaccagtacccaggctaccgaggctaccagtatgtgttggagcgggaccggcacagcggagagttctgtacttacggtgagctcggcacacaggcccacactgggcagctgcagtccatccggagagtccagcactaggctccacggccccagacaccttccctgaggacactcaataaaggttcctgaatcttcctgccc

SEQ ID NO: 6951 - DNA, 493 bp, Homo sapiens
  source 1..493: mol_type = unassigned DNA
ccctcgcgtgccgcgctcacccacccggttgggcaggctgtgtgtggctcgaaacggggctcttgagacgctgagcgcgtggtgccacccttcctgtccgcagcggcatgagcagcgcccccgcgccgggcccggcgcccgccagcctcacgctctgggacgaggaggacttccagggccgtcgctgtcggctgctaagcgactgtgcgaacgtctgcgagcgcggaggcctgcccagggtgcgctcggtcaaggtggaaaacggcgtttgggtggcctttgagtaccccgacttccagggacagcagttcattctggagaagggagactatcctcgctggagcgcctggagtggcagcagcagccacaacagcaaccagctgctgtccttccggccagtgctctgcgcgaaccacaatgacagccgtgtgacactgtttgagggggacaacttccaaggctgcaagtttgacctcgttgatgactacccatc

SEQ ID NO: 6952 - DNA, 811 bp, Homo sapiens
  source 1..811: mol_type = unassigned DNA
acatgttccctgggcctatctcggaaggggccacaatgaccctgcaatgcacaaagtcagcgggaccctggaagatggtggtgtgggatgaggacggcttccagggccggcggcacgagttcacggccgagtgccccagcgtgctggagcttggcttcgagactgtgcgatctttgaaagtgctgagtggagcgtgggtgggctttgagcatgctggcttccaagggcagcagtacattctggaacgaggcgaatatccaagctgggatgcctggggcggcaacacggcctaccccgccgagaggctcacctccttccggcctgcggcctgtgctaaccaccgtgactcgaggctgacaatcttcgagcaagagaacttcctgggcaagaaaggagagctgagcgatgactatccttccctccaggccatgggatgggaaggcaatgaagtagggtccttccacgtccactctggggcctgggtttgctcccagtttccgggctaccgaggatttcagtatgtgctggaatgcgatcaccattccggtgactacaaacatttccgggagtggggctctcatgccccgaccttccaggtgcagagcatccgcaggatccagcagtgaacaggggtgcggcacggaggagcgcatgcgtgcttatctgcaatggaggcgctctggaggctgtggtgtgttctctccttctgcctccccctgtaacctgtgtgaacccagcacccatgtgaactggtccgtgcacagtcagcacaaaaaactcaaacgaataaaaaagagaaagtctggtatta

SEQ ID NO: 6953 - DNA, 1102 bp, Homo sapiens
  source 1..1102: mol_type = unassigned DNA
acagactatagggcctgatgtctgccagactataaaatggggggtcggactctagtcacccatagcacctgcccgcctgcctgtcctccagcaggaagtagcaagtccccagacttttgcaggcgggaaccatgtctcaggctgcaaaggcctcggcctcggccacagtggcggtgaacccagggcctgacaccaaggggaagggggccccacctgcaggaacatcccctagtcccggcactaccctggccccaacaaccgtgcctattaccagcgccaaggcggcggaactgcctcctgggaactacaggctggtggtcttcgaactggaaaacttccagggccgtcgagcagaattctcgggggagtgctcaaatctggcagaccgtggcttcgaccgtgtgcgcagcatcattgtctccgcgggaccctgggtcgcctttgagcagtccaacttccgcggggagatgttcatcctggagaagggcgagtaccctcgctggaacacatggtcgagcagctaccgcagtgatcggctcatgtccttccggcccatcaaaatggatgcccaggagcacaaaatctccctgtttgaaggggccaacttcaagggcaacaccatagagatccagggggacgacgcacccagtctctgggtctacggcttcagtgaccgcgtgggcagcgtgaaggtctccagtggaacatgggttggctatcagtatcctggctaccgcgggtaccagtacctcctagagcctggtgacttccggcactggaatgagtggggagccttccagccacagatgcagtccctgcgtcgcctgcgtgacaagcagtggcacctcgaggggtccttccctgtcctggccacagagccccccaagtgagtccacacctcactctgctaccttgccccaacccttcttcatgttcaattatttcccccatttttcccaggcaaataaaattccctaaagccaaaatttctcctggatctgtaaacagatgtgtgccttgaggtcccccatagttactgggatgtgacttcctcgctcttaataattacaacgataataaaagcagcaaacactgaaaagtt

SEQ ID NO: 6954 - DNA, 886 bp, Homo sapiens
  source 1..886: mol_type = unassigned DNA
ggtgagagcttaatccagcattctcaccctgcttttcgcaggagcacagcggtcactcatcttggcaccggcacttctggggaaggtataaatgccacctcccgctggccgagcttcacggcactcgcaggggctggtgtcactggtcattcctgcacaggacagtccaccatggcctcagatcaccagacccaggcgggcaagccacagtccctcaaccccaagatcatcatctttgagcaggaaaactttcaaggccactcgcatgagctcaatgggccctgccccaacctgaaggaaactggcgtggagaaggcaggttctgtcctagtgcaggctggaccctgggtgggctatgaacaggccaactgcaagggcgagcagtttgtgtttgagaagggtgagtacccccgctgggactcatggaccagcagccgaaggacggactccctcagctccctgaggcccatcaaagtggacagccaagagcacaagatcatcctctatgaaaaccccaacttcaccgggaagaagatggaaatcatagatgacgatgtacccagcttccacgcccatggctaccaggagaaggtgtcatctgtgcgggtgcagagtggcacgtgggttggctaccagtaccccggctaccgtgggctgcagtacctgctggagaagggagactacaaggacagcagcgactttggggcccctcacccccaggtgcagtccgtgcgccgtatccgcgacatgcagtggcaccaacgtggtgccttccacccctccaactagtgccctccccaccatgcctccttcccaggacccaggtctgctgcccaggaaccctccagacctcccagagagtgaataaagtgtgacttgcaacttg

SEQ ID NO: 6955 - DNA, 867 bp, Homo sapiens
  source 1..867: mol_type = unassigned DNA
agacaggcgagtctgcagacggccgtggctcctctgttcttcccgaggctacagcaacagccagaggtgttcctggggagatggcggaacagcacggagcacccgaacaggctgcagctggcaagagccatggagaccttgggggcagctacaaggtgatcttgtacgaactagagaacttccaaggcaaacgctgcgagctctcggccgagtgccccagcctgaccgacagcctgctggagaaggtgggctccatccaagtggagtccgggccgtggctggcatttgagtccagggccttccgcggggagcagtttgttctggagaagggggattatcctcgctgggatgcctggtccaacagccgtgatagtgacagccttctgtccctccggcctctgaatattgatagtccacatcacaagctgcatctgtttgagaacccagctttcagtggccgcaagatggagatagtggatgatgacgtgcccagcctgtgggctcatggcttccaggaccgtgtggcgagtgtccgtgccatcaacgggacgtgggttggctatgagttccccggctaccgtgggcgccagtacgtgtttgagcggggcgagtaccgccactggaatgagtgggacgccagccagccgcagctgcagtctgtgcgccgcatccgtgaccagaagtggcacaagcggggccgcttccccagcagctgaaaggcacccagacttcaaggacccagacccaccctggggggctgcaagggcaagaagaggaggctccagggttggggcgagggccgacctgtccacccttccctggaatctgctcaataaagcctggggttggtcccccacccgccacgtt

SEQ ID NO: 6956 - DNA, 609 bp, Homo sapiens
  source 1..609: mol_type = unassigned DNA
atcaccctctgtcaacaaccatggggaagatcaccttctacgaggaccgagactttcagggtcgctgctacaattgcatcagtgactgccccaacctgcgggtctacttcagccgctgcaactccatccgagtagacagcggctgctggatgctctatgagcgtcccaattaccagggccaccagtacttcctgcgccgaggcaagtaccccgactatcagcactggatgggcctcagcgactcggtccaatcctgccgtataattcctcataccagctcgcacaagttaaggctgtacgagagagatgactaccgaggccttatgtctgagctcactgatgactgcgcctgtgttccagaactgttccgtctccctgagatctattccctccacgtactggagggctgctgggtcctctatgaaatgcccaactaccgggggcggcagtatctgctgaggcctggggactacagaaggtaccacgactgggggggtgcagatgccaaagtcggctctttgagacgggtcaccgatttgtactaagctgtgcctgccttgttgtgatccccatagaaacataataaatatacaagttgtgttccctgca

SEQ ID NO: 6957 - DNA, 641 bp, Homo sapiens
  source 1..641: mol_type = unassigned DNA
ccgcagtcccacacagcaaccagaaaacatctgctcacttccttcaaaatgggaaagatcaccttctacgaggacagggccttccagggccgcagctacgaatgcaccactgactgccccaacctacaaccctatttcagccgctgcaactccatcagggtggagagcggctgctggatgatctatgagcgccccaactaccagggccaccagtacttcctgcggcgtggggagtaccctgactaccagcaatggatgggcctcagcgactccatccgctcctgctgcctcatccccccgcactctggcgcttacagaatgaagatctacgacagagatgaattgaggggacaaatgtcagagctcacagacgactgtatctctgttcaggaccgcttccacctcactgaaattcactccctcaatgtgctggagggcagctggatcctctatgagatgcccaactacagggggaggcagtatctgctgaggccgggggagtacaggaggtttcttgattggggggctccaaatgccaaagttggctctcttagacgagtcatggatttgtactgaagtatttacgttttccacttttctcctttaaaatctaataaaatatttagcttgtgtttctggca

SEQ ID NO: 6958 - DNA, 629 bp, Homo sapiens
  source 1..629: mol_type = unassigned DNA
ccatcacactgaactcgcatcatccgtgtcaaccagccatggggaagatcaccttctatgaggacagggccttccagggccgcagctacgaaaccaccactgactgccccaacctgcagccgtatttcagccgctgcaactccatccgggtggagagcggctgctggatgctctatgagcgtcccaactaccaaggtcaacaatacttgctgcggcgaggggagtaccccgactaccagcaatggatgggcctcagcgactccatccgctcctgttgtctcatcccccaaacagtctcccacaggctgcggctgtacgagagggaagaccacaaaggcctcatgatggagctgagtgaagactgccccagcatccaggaccgcttccacctcagcgagatccgttccctccacgtgctggagggctgctgggtcctctacgagctgcccaactaccgggggcggcaatacctgctgaggccccaagagtacaggcggtgccaggactggggggccatggatgctaaggcaggctctttgcggagagtggtggatttgtattaaaatagcttaacactaccaatttcccattttggaacctaataaatatttagtctgcattgctggcaa

SEQ ID NO: 6959 - DNA, 619 bp, Homo sapiens
  source 1..619: mol_type = unassigned DNA
ctcagcaccgccgtgcgcccagccagccatggggaagatcaccctctacgaggaccggggcttccagggccgccactatgaatgcagcagcgaccaccccaacctgcagccctacttgagccgctgcaactcggcgcgcgtggacagcggctgctggatgctctatgagcagcccaactactcgggcctccagtacttcctgcgccgcggcgactatgccgaccaccagcagtggatgggcctcagcgactcggtccgctcctgccgcctcatcccccactctggctctcacaggatcagactctatgagagagaggactacagaggccagatgatagagttcactgaggactgctcctgtcttcaggaccgcttccgcttcaatgaaatccactccctcaacgtgctggagggctcctgggtcctctacgagctgtccaactaccgaggacggcagtacctgctgatgccaggggactataggcgctaccaggactggggggccacgaatgccagagtgggctctctgaggagagtcatagatttctcctgaaatatgtcctcttttgttgtttcttaatttggaaactaataaaatattttctgtgtgttcctggca

SEQ ID NO: 6960 - DNA, 759 bp, Homo sapiens
  source 1..759: mol_type = unassigned DNA
ctattctcatgactaagcaaatgtttgactgaaaccagcccatataaatgtcactgtgcctctaactctctgtagccattcctgaatttctttcagcactgggaaaaccagtctatgcaccaaaaatgtctaaaactggaaccaagattactttctatgaagacaaaaattttcaaggccgtcgctatgactgtgattgcgactgtgcagatttccacacatacctaagtcgctgcaactccattaaagtggaaggaggcacctgggctgtttatgaaaggcccaactttgctgggtacatgtacatcttaccacagggagagtaccctgaataccagcgttggatgggcctcaacgaccgcctcagctcctgcagagctgttcatctgcctagtggaggccagtataagattcagatctttgagaaaggggattttagtggtcagatgtatgaaaccaccgaagattgcccttccatcatggagcaatttcacatgcgagagatccactcctgtaaggtgctggagggtgtctggattttctatgagctacccaactaccgtggcaggcagtacctcctggacaagaaggagtaccggaagcccatcgattggggtgcagcctccccagctgtccagtctttccgccgcattgtggagtaatgacatgaatggggccatattcttcctggggcccaaatgctggctggccttgtggtccaaataggcatcatcaataaaacagttggcatgcatccca

SEQ ID NO: 6961 - DNA, 1132 bp, Homo sapiens
  source 1..1132: mol_type = unassigned DNA
cccgccaccacgcccggccaattttttttgtatttttagtagagacggggtttcaccgtgttagtcaggatggtctcgatttcctgacctcgtgatccgcccatctcggcctcccaaagtgctgggattacaggcgtgagccaccgtgcccagccttctgttctatttaagaactttgatttccattccattttcatttattactgtttaggccgaattttcgctaaacttctgactttcatataaacatattgcttatagaacatcagaagactcgtctttgtgatgcccaaatgaaaaagttggtgaagcactgggaaaaccagtctatgcaccaaaaatgtctaaaactggaaccaagattactttctatgaagacaaaaattttcaaggccgtcgctatgactgtgattgcgactgtgcagatttccacacatacctaagtcgctgcaactccattaaagtggaaggaggcacctgggctgtttatgaaaggcccaactttgctgggtacatgtacatcttaccacagggagagtaccctgaataccagcgttggatgggcctcaacgaccgcctcagctcctgcagagctgttcatctgcctagtggaggccagtataagattcagatctttgagaaaggggattttagtggtcagatgtatgaaaccaccgaagattgcccttccatcatggagcaatttcacatgcgagagatccactcctgtaaggtgctggagggtgtctggattttctatgagctacccaactaccgtggcaggcagtacctcctggacaagaaggagtaccggaagcccatcgattggggtgcagcctccccagctgtccagtctttccgccgcattgtggagtaatgacatgaatggggccatattcttcctggggcccaaatgctggctggccttgtggtccaaataggcatcatcaataaaacagttggcatgcatcccactgctgactataatgcctctccttaaatgcttctagggaccagcaatacagtgctcgccacagtgggcagtcacacaaagctacccatctgccagatcaccaatctagatctttgtgccaaacaaaatgagatctcattaaaaggttagaaagtcata

SEQ ID NO: 6962 - DNA, 1485 bp, Homo sapiens
  source 1..1485: mol_type = unassigned DNA
agagctcgcagctccgccggcgcctggtcccagcgcccgcggcgccgcgtccccggcccaaccatggcgtcctccgcggccggctgcgtggtgatcgttggcagtggagtcattgggcgaagctgggccatgctgtttgccagtggaggcttccaggtgaaactctatgacattgagcaacagcagataaggaacgccctggaaaacatcagaaaggagatgaagttgctggagcaggcaggttctctgaaaggctccctgagtgtggaagagcagctgtcactcatcagtggttgtcccaatatccaagaagcagtagagggtgccatgcacattcaggaatgtgttccagaagatctagaactgaagaagaagatttttgctcagttagattccatcattgatgatcgagtgatcttaagcagttccacttcttgtctcatgccttccaagttgtttgctggcttggtccatgtgaagcaatgcatcgtggctcatcctgtgaatccgccatactacatcccgctggttgagctggtcccccacccggagacggcccctacgacagtggacagaacccacgccctgatgaagaagattggacagtgccccatgcgagtccagaaggaggtggccggcttcgttctgaaccgcctgcaatatgcaatcatcagcgaggcctggcggctagtggaggaaggaatcgtgtctcctagtgacctggaccttgtcatgtcagaagggttgggcatgcggtatgcattcattggacccctggaaaccatgcatctcaatgcagaaggtatgttaagctactgcgacagatacagcgaaggcataaaacatgtcctacagacttttggacccattccagagttttccagggccactgctgagaaggttaaccaggacatgtgcatgaaggtccctgatgacccggagcacttagctgccaggaggcagtggagggacgagtgcctcatgagactcgccaagttgaagagtcaagtgcagccccagtgaatttcttgtaatgcagcttccactcctctcattggaggccctatttgggaacactgcaagcccttaatcagccctctgtgacataggtagcagcccacggagatcctaagctggctgtcttgtgtgcagcctgagtggggtggtgcaggccggtagtctgcccgtcactttggatcatagccctgggcctggcggcacagcagcacttgcgttctcggggctgtcgatttcctgccacctgggcagataacctggagattttcaccttttcttttcagcttgattgcatttgactatattttacagccagtgattgtagtttcatgttaatatgtggcaaaatatttttgtaattattttctaatccctttctgagtactctggggccctgcatttatgaggcacctaccttcattttgctaacgcttattctgaataaaagtttttgattccttaaagaca

SEQ ID NO: 6963 - DNA, 1471 bp, Homo sapiens
  source 1..1471: mol_type = unassigned DNA
cttgtctgccactatgtgagatatacctttcaccttctgccgtgattgtgaggcctcctcagccacgtggaactgtaaaaactcctggaagaaaagatcctgcaatttggctttttgtgagatggaaaagattacaccttgccctgcaaacttcccccctttaaaggcgaaggtttgttagagcagcgggcgcgctcataaagggcacagccgagggtacgtggatcgcggtgcggagactgaggttagaaggcacaggtggcgagatgagccgggtaccagcgttcctgagcgcggccgaggtggaggaacacctccgcagctccagcctcctcatcccgcctctagagacggccctggccaacttctccagcggtcccgaaggaggggtcatgcagcccgtgcgcaccgtggtgccggtgaccaagcacaggggctacctgggggtcatgcccgcctacagtgctgcagaggatgcactgaccaccaagttggtcaccttctacgaggaccgcggcatcacctcggtcgtcccttcccaccaggctactgtgctactctttgagcccagcaatggcaccctgctggcggtcatggatggaaatgtcataactgcaaagagaacagctgcagtttctgccattgccaccaagtttctgaaacctcccagcagtgaagtgctgtgcatccttggggctggggtccaggcctacagccattatgagatcttcacagagcagttctcctttaaggaggtgaggatatggaaccgcaccaaagaaaatgcagagaagtttgcagacacagtgcaaggagaggtacgggtctgttcttcggtccaggaggctgtggcaggtgcagatgtgatcatcacagtcaccctggcaacagagcccattttgtttggtgaatgggtgaagccaggggctcacatcaatgctgttggagccagcagacctgactggagagaactggatgatgagctcatgaaagaagctgtgctgtacgtggattcccaggaggctgccctgaaggagtctggagatgtcctgctgtcaggggccgagatctttgctgagctgggagaagtgattaagggagtgaaaccagcccactgtgagaagaccaccgtgttcaagtctttgggaatggcagtggaagacacagttgcagccaaactcatctatgattcctggtcatctggtaaataaaacaaaggaacttgatgttgagatggatgcttgaggaatattgctgctggttctcataatttctagagtaaatgagggagtccagtccccagtgaactctccttttgtgcttatcatgttttaccttaaatgctgagatcctcatttatgtttgtagttggaaagcaaagctaggtagccatttcttctgttctaccaagttataatagcattcatttccctttatatttccctgaaataaagcacattccaattgtgca

SEQ ID NO: 6964 - DNA, 1273 bp, Homo sapiens
  source 1..1273: mol_type = unassigned DNA
ataaagggcacagccgagggtacgtggatcgcggtgcggagactgaggttagaaggcacaggtggcgagatgagccgggtaccagcgttcctgagcgcggccgaggtggaggaacacctccgcagctccagcctcctcatcccgcctctagagacggccctggccaacttctccagcggtcccgaaggaggggtcatgcagcccgtgcgcaccgtggtgccggtgaccaagcacaggggctacctgggggtcatgcccgcctacagtgctgcagaggatgcactgaccaccaagttggtcaccttctacgaggaccgcggcatcacctcggtcgtcccttcccaccaggctactgtgctactctttgagcccagcaatggcaccctgctggcggtcatggatggaaatgtcataactgcaaagagaacagctgcagtttctgccattgccaccaagtttctgaaacctcccagcagtgaagtgctgtgcatccttggggctggggtccaggcctacagccattatgagatcttcacagagcagttctcctttaaggaggtgaggatatggaaccgcaccaaagaaaatgcagagaagtttgcagacacagtgcaaggagaggtacgggtctgttcttcggtccaggaggctgtggcaggtgcagatgtgatcatcacagtcaccctggcaacagagcccattttgtttggtgaatgggtgaagccaggggctcacatcaatgctgttggagccagcagacctgactggagagaactggatgatgagctcatgaaagaagctgtgctgtacgtggattcccaggaggctgccctgaaggagtctggagatgtcctgctgtcaggggccgagatctttgctgagctgggagaagtgattaagggagtgaaaccagcccactgtgagaagaccaccgtgttcaagtctttgggaatggcagtggaagacacagttgcagccaaactcatctatgattcctggtcatctggtaaataaaacaaaggaacttgatgttgagatggatgcttgaggaatattgctgctggttctcataatttctagagtaaatgagggagtccagtccccagtgaactctccttttgtgcttatcatgttttaccttaaatgctgagatcctcatttatgtttgtagttggaaagcaaagctaggtagccatttcttctgttctaccaagttataatagcattcatttccctttatatttccctgaaataaagcacattccaattgtgc

SEQ ID NO: 6965 - DNA, 1273 bp, Homo sapiens; identical to SEQ ID NO: 6964
  source 1..1273: mol_type = unassigned DNA

SEQ ID NO: 6966 - DNA, 1400 bp, Homo sapiens
  source 1..1400: mol_type = unassigned DNA
gtaaaaactcctggaagaaaagatcctgcaatttggctttttgtgagatggaaaagattacaccttgccctgcaaacttcccccctttaaaggcgaaggtttgttagagcagcgggcgcgctcataaagggcacagccgagggtacgtggatcgcggtgcggagactgaggttagaaggcacaggtggcgagatgagccgggtaccagcgttcctgagcgcggccgaggtggaggaacacctccgcagctccagcctcctcatcccgcctctagagacggccctggccaacttctccagcggtcccgaaggaggggtcatgcagcccgtgcgcaccgtggtgccggtgaccaagcacaggggctacctgggggtcatgcccgcctacagtgctgcagaggatgcactgaccaccaagttggtcaccttctacgaggaccgcggcatcacctcggtcgtcccttcccaccaggctactgtgctactctttgagcccagcaatggcaccctgctggcggtcatggatggaaatgtcataactgcaaagagaacagctgcagtttctgccattgccaccaagtttctgaaacctcccagcagtgaagtgctgtgcatccttggggctggggtccaggcctacagccattatgagatcttcacagagcagttctcctttaaggaggtgaggatatggaaccgcaccaaagaaaatgcagagaagtttgcagacacagtgcaaggagaggtacgggtctgttcttcggtccaggaggctgtggcaggtgcagatgtgatcatcacagtcaccctggcaacagagcccattttgtttggtgaatgggtgaagccaggggctcacatcaatgctgttggagccagcagacctgactggagagaactggatgatgagctcatgaaagaagctgtgctgtacgtggattcccaggaggctgccctgaaggagtctggagatgtcctgctgtcaggggccgagatctttgctgagctgggagaagtgattaagggagtgaaaccagcccactgtgagaagaccaccgtgttcaagtctttgggaatggcagtggaagacacagttgcagccaaactcatctatgattcctggtcatctggtaaataaaacaaaggaacttgatgttgagatggatgcttgaggaatattgctgctggttctcataatttctagagtaaatgagggagtccagtccccagtgaactctccttttgtgcttatcatgttttaccttaaatgctgagatcctcatttatgtttgtagttggaaagcaaagctaggtagccatttcttctgttctaccaagttataatagcattcatttccctttatatttccctgaaataaagcacattccaattgtgcagtg

SEQ ID NO: 6967 - DNA, 1888 bp, Homo sapiens
  source 1..1888: mol_type = unassigned DNA
agaaggtgtggcagtcctcatttctgtggaatctgaagaagcccacgcagattttaattcccactctagattctgtatctagatcaccatggcgactggacagaagttgatgagagctgttagagtttttgaatttggtgggccagaagtcctgaaattgcgatcagatattgcagtaccgattccaaaagaccatcaggttctaatcaaggtccatgcatgtggtgtcaaccccgtggagacatacattcgctctggtacttatagtagaaaaccactcttaccctatactcctggctcagatgtggctggggtgatagaagctgttggagataatgcatctgctttcaagaaaggtgacagagttttcactagcagcacgatctctgggggttatgcagagtatgctcttgcagcagaccacactgtttacaaactacctgaaaaactggactttaaacaaggagctgccatcggcattccatattttactgcttatcgagctctgatccacagtgcctgtgtgaaagctggagagagtgttctggttcatggggcaagtggaggagttggattagcagcatgccaaattgctagagcttatggcttaaagattttgggcactgctggtactgaggaaggacaaaagattgttttgcaaaatggagcccatgaagtgttcaatcacagagaagtgaattacattgataaaattaagaagtatgttggtgagaaaggaattgatataattattgaaatgttagctaatgtaaatcttagtaaagacttgagtcttctgtcacatggaggacgagtgatagttgttggcagcagaggtactattgaaataaacccacgagacaccatggcaaaggagtcgagtataattggagttactctcttttcctcaaccaaggaggaatttcagcaatatgcagcagcccttcaagctggaatggaaattggctggttgaaacctgtgataggttctcaatatccattggagaaggtggccgaggctcatgaaaatatcattcatggtagtggggctactggaaaaatgattcttctcttatgatgattaattctttcatggatttcctatgtaattagaggtactgtctttcccccagttgtacttaccctatcttttctttaattaacattcgattccatgagcttcttatgtgaaaaaataagatttttctttagagagcagaagcagaagagtaaaatttattgtatagctagcaatatttttttatgccatctgtctcaaatcaaagagtcatcatagtaggaaataacatgttagttgtcatttggcatgagtgtgcattccagtaattcttaattgatatttgattaattccatacctttgattaaaacatgctagttcaaaataagactgctcagtttccaagggttttcaagcctacttacctttataaaggttctctagtctctgattagccatgactgtattggactttgaacattttctgaactaaaaacctctattctaaactaatctcatttggatgtgtaagtcttttgtaaaggcaagaataaataatatccaggacaatttattagttttctcagtattttcccaaatattagaatatttacttcattattggttggctgccaatgaccccatatgttctgtgagaatagtagctttatctttgatataatacatagtctccaaataggtaatacttcgcaattgattagattttcagagtagatttagagttatctgtttttctggtgagggtcaaatatttttgttaattaagctcacaaatttgataaattaagaattatctgcatttgtctcgtaacataataatgtgtaataaagtctatagaaaattaaaa

SEQ ID NO: 6968 - DNA, 888 bp, Homo sapiens
  source 1..888: mol_type = unassigned DNA
gcacatcctgggtggagcctgcaaaagttggagaaggtgtggcagtcctcatttctgtggaatctgaagaagcccacgcagattttaattcccactctagattctggcttcatcgttatgaagcatatgatgatcccgtggatagtatctagatcaccatggcgactggacagaagttgatgagagctgttagagtttttgaatttggtgggccagaagtcctgaaattgcgatcagatattgcagtaccgattccaaaagaccatcaggttctaatcaaggtccatgcatgtggtgtcaaccccgtggagacatacattcgctctggtacttatagtagaaaaccactcttaccctatactcctggctcagatgtggctggggtgatagaagctgttggagataatgcatctgctttcaagaaaggtgacagagttttcactagcagcacgatctctgggggttatgcagagtatgctcttgcagcagaccacactgtttacaaactacctgaaaaactggactttaaacaaggagctgccatcggcattccatattttactgcttatcgagctctgatccacagtgcctgtgtgaaagctggagagagtgttctggttcatggggcaagtggaggagttggattagcagcatgccaaattgctagagcttatggcttaaagattttgggcactgctggtactgaggaaggacaaaagattgttttgcaaaatggagcccatgaagtgttcaatcacagagaagtgaattacattgataaaattaagaagtatgttggtgagaaaggaattgatataattattgaaatgttagctaatgtaaatcttagtaaagacttgagtcttctgtcacatggaggacgagtga

SEQ ID NO: 6969 - DNA, 1292 bp, Homo sapiens
  source 1..1292: mol_type = unassigned DNA
tggcagtcctcatttctgtggaatctgaagaagcccacgcagattttaattcccactctagattctgtatctagatcaccatggcgactggacagaagttgatgagagctgttagagtttttgaatttggtgggccagaagtcctgaaattgcgatcagatattgcagtaccgattccaaaagaccatcaggttctaatcaaggtccatgcatgtggtgtcaaccccgtggagacatacattcgctctggtacttatagtagaaaaccactcttaccctatactcctggctcagatgtggctggggtgatagaagctgttggagataatgcatctgctttcaagaaaggtgacagagttttcactagcagcacgatctctgggggttatgcagagtatgctcttgcagcagaccacactgtttacaaactacctgaaaaactggactttaaacaaggagctgccatcggcattccatattttactgcttatcgagctctgatccacagtgcctgtgtgaaagctggagagagtgttctggttcatggggcaagtggaggagttggattagcagcatgccaaattgctagagcttatggcttaaagattttgggcactgctggtactgaggaaggacaaaagattgttttgcaaaatggagcccatgaagtgttcaatcacagagaagtgaattacattgataaaattaaggttgttggcagcagaggtactattgaaataaacccacgagacaccatggcaaaggagtcgagtataattggagttactctcttttcctcaaccaaggaggaatttcagcaatatgcagcagcccttcaagctggaatggaaattggctggttgaaacctgtgataggttctcaatatccattggagaaggtggccgaggctcatgaaaatatcattcatggtagtggggctactggaaaaatgattcttctcttatgatgattaattctttcatggatttcctatgtaattagaggtactgtctttcccccagttgtacttaccctatcttttctttaattaacattcgattccatgagcttcttatgtgaaaaaataagatttttctttagagagcagaagcagaagagtaaaatttattgtatagctagcaatatttttttatgccatctgtctcaaatcaaagagtcatcatagtaggaaataacatgttagttgtcatttggcatgagtgtgcattccagtaattcttaattgatatttgattaattccatacctttgattaaaacatgctagttcaa

SEQ ID NO: 6970 - DNA, 1588 bp, Homo sapiens
  source 1..1588: mol_type = unassigned DNA
agtcctcatttctgtggaatctgaagaagcccacgcagattttaattcccactctagattctggttctaatcaaggtccatgcatgtggtgtcaaccccgtggagacatacattcgctctggtacttatagtagaaaaccactcttaccctatactcctggctcagatgtggctggggtgatagaagctgttggagataatgcatctgctttcaagtgcctgtgtgaaagctggagagagtgttctggttcatggggcaagtggaggagttggattagcagcatgccaaattgctagagcttatggcttaaagattttgggcactgctggtactgaggaaggacaaaagattgttttgcaaaatggagcccatgaagtgttcaatcacagagaagtgaattacattgataaaattaagaagtatgttggtgagaaaggaattgatataattattgaaatgttagctaatgtaaatcttagtaaagacttgagtcttctgtcacatggaggacgagtgatagttgttggcagcagaggtactattgaaataaacccacgagacaccatggcaaaggagtcgagtataattggagttactctcttttcctcaaccaaggaggaatttcagcaatatgcagcagcccttcaagctggaatggaaattggctggttgaaacctgtgataggttctcaatatccattggagaaggtggccgaggctcatgaaaatatcattcatggtagtggggctactggaaaaatgattcttctcttatgatgattaattctttcatggatttcctatgtaattagaggtactgtctttcccccagttgtacttaccctatcttttctttaattaacattcgattccatgagcttcttatgtgaaaaaataagatttttctttagagagcagaagcagaagagtaaaatttattgtatagctagcaatatttttttatgccatctgtctcaaatcaaagagtcatcatagtaggaaataacatgttagttgtcatttggcatgagtgtgcattccagtaattcttaattgatatttgattaattccatacctttgattaaaacatgctagttcaaaataagactgctcagtttccaagggttttcaagcctacttacctttataaaggttctctagtctctgattagccatgactgtattggactttgaacattttctgaactaaaaacctctattctaaactaatctcatttggatgtgtaagtcttttgtaaaggcaagaataaataatatccaggacaatttattagttttctcagtattttcccaaatattagaatatttacttcattattggttggctgccaatgaccccatatgttctgtgagaatagtagctttatctttgatataatacatagtctccaaataggtaatacttcgcaattgattagattttcagagtagatttagagttatctgtttttctggtgagggtcaaatatttttgttaattaagctcacaaatttgataaattaagaattatctgcatttgtctcgtaacataataatgtgtaataaagtctatagaaaattaaaa

SEQ ID NO: 6971 - DNA, 2301 bp, Homo sapiens
  source 1..2301: mol_type = unassigned DNA
agtaggatgcggccagcgcaggagctggtggtgaaaaactgatctcgcatgttcagaaactgcacaagctctaccacatcctcgtcaacactgcccttccggctgaggtccgctttgctcaaacattgcgccttccatttcctgaactccgcgctgcgatccatgggtgacggactcagggtctgcgctcggctccttcatggtagcctcgtctctccctgggggcagccatattgaagcgagcggtggccgaaaaggtccaaacttcctcttcgttcttaatttgggaaattctagtgccttcgcctaggggtggagagaggcgcacatcctgggtggagcgaggcgcacatcctgggtggagcctgcaaaagttggagaaggtgtggcagtcctcatttctgtggaatctgaagaagcccacgcagattttaattcccactctagattctggcttcatcgttatgaagcatatgatgatcccgtggatagtatctagatcaccatggcgactggacagaagttgatgagagctgttagagtttttgaatttggtgggccagaagtcctgaaattgcgatcagatattgcagtaccgattccaaaagaccatcaggttctaatcaaggtccatgcatgtggtgtcaaccccgtggagacatacattcgctctggtacttatagtagaaaaccactcttaccctatactcctggctcagatgtggctggggtgatagaagctgttggagataatgcatctgctttcaagaaaggtgacagagttttcactagcagcacgatctctgggggttatgcagagtatgctcttgcagcagaccacactgtttacaaactacctgaaaaactggactttaaacaaggagctgccatcggcattccatattttactgcttatcgagctctgatccacagtgcctgtgtgaaagctggagagagtgttctggttcatggggcaagtggaggagttggattagcagcatgccaaattgctagagcttatggcttaaagattttgggcactgctggtactgaggaaggacaaaagattgttttgcaaaatggagcccatgaagtgttcaatcacagagaagtgaattacattgataaaattaagaagtatgttggtgagaaaggaattgatataattattgaaatgttagctaatgtaaatcttagtaaagacttgagtcttctgtcacatggaggacgagtgatagttgttggcagcagaggtactattgaaataaacccacgagacaccatggcaaaggagtcgagtataattggagttactctcttttcctcaaccaaggaggaatttcagcaatatgcagcagcccttcaagctggaatggaaattggctggttgaaacctgtgataggttctcaatatccattggagaaggtggccgaggctcatgaaaatatcattcatggtagtggggctactggaaaaatgattcttctcttatgatgattaattctttcatggatttcctatgtaattagaggtactgtctttcccccagttgtacttaccctatcttttctttaattaacattcgattccatgagcttcttatgtgaaaaaataagatttttctttagagagcagaagcagaagagtaaaatttattgtatagctagcaatatttttttatgccatctgtctcaaatcaaagagtcatcatagtaggaaataacatgttagttgtcatttggcatgagtgtgcattccagtaattcttaattgatatttgattaattccatacctttgattaaaacatgctagttcaaaataagactgctcagtttccaagggttttcaagcctacttacctttataaaggttctctagtctctgattagccatgactgtattggactttgaacattttctgaactaaaaacctctattctaaactaatctcatttggatgtgtaagtcttttgtaaaggcaagaataaataatatccaggacaatttattagttttctcagtattttcccaaatattagaatatttacttcattattggttggctgccaatgaccccatatgttctgtgagaatagtagctttatctttgatataatacatagtctccaaataggtaatacttcgcaattgattagattttcagagtagatttagagttatctgtttttctggtgagggtcaaatatttttgttaattaagctcacaaatttgataaattaagaattatctgcatttgtctcgtaacataataatgtgtaataaagtctatagaaaatt

SEQ ID NO: 6972 - DNA, 677 bp, Homo sapiens
  source 1..677: mol_type = unassigned DNA
aagccattcccctccaggggctgcaagttcccatccataaatcagtatctagatcaccatggcgactggacagaagttgatgagagctgttagagtttttgaatttggtgggccagaagtcctgaaattgcgatcagatattgcagtaccgattccaaaagaccatcaggttctaatcaaggtccatgcatgtggtgtcaaccccgtggagacatacattcgctctggtacttatagtagaaaaccactcttaccctatactcctggctcagatgtggctggggtgatagaagctgttggagataatgcatctgctttcaagaaaggtgacagagttttcactagcagcacgatctctgggggttatgcagagtatgctcttgcagcagaccacactgtttacaaactacctgaaaaactggactttaaacaaggagctgccatcggcattccatattttactgcttatcgagctctgatccacagtgcctgtgtgaaagctggagagagtgttctggttcatggggcaagtggaggagttggattagcagcatgccaaattgctagagcttatggcttaaagattttgggcactgctggtactgaggaaggacaaaagattgttttgcaaaatggagcccatgaagtgttcaatcacagagaagtgaattacattg

SEQ ID NO: 6973 - DNA, 1617 bp, Homo sapiens
  source 1..1617: mol_type = unassigned DNA
agcagggggcgggctctctgacgaaggactggaaggtggcggtggtgaaggtgcaggccgttggggcggctcagaggcaggtgactatgaaaggcttatatttccaacagagttccacagatgaagaaataacatttgtatttcaagaaaaggaagatcttcctgttacagaggataactttgtgaaacttcaagttaaagcttgtgctctgagccagataaatacaaagcttctggcagaaatgaagatgaaaaaggatttatttcctgttgggagagaaattgctggaattgtattagatgttggaagcaaggtatcattctttcaaccagatgatgaagtagttggaattttgcccctggactctgaagaccctggactttgtgaagttgttagagtacatgagcattacttggttcataaaccagaaaaggtcacatggacggaagcagcaggaagcattcgggatggagtgcgtgcctatacagctctgcattatctttctcatctctctcctggaaaatcagtgctgataatggatggagcaagtgcatttggtacaatagctattcagttagcacatcatagaggagccaaagtgatttcaacagcatgcagccttgaagataagcagtgccttgaaagattcagacctcccatagcccgagtgattgatgtatctaatgggaaagttcatgttgctgaaagctgtttggaagaaacaggtggcctgggagtagatattgtcctagatgctggagtgagattatatagtaaagatgatgaaccagctgtaaaactacaactactaccacataaacatgatatcatcacacttcttggtgttggaggccactgggtaacaacagaagaaaaccttcagttggatcctccagatagccactgccttttcctcaagggagcaacgttagctttcctgaatgatgaagtttggaatttgtcaaatgtacaacagggaaaatatctttgtatcttaaaggatgtgatggagaagttatcaactggtgttttcagacctcagttggatgaacccattccactgtatgaggcaaaagtttccatggaagctgttcagaaaaatcaaggaagaaaaaagcaagttgttcaattttaattttcttctttctcagacctcagtcggatgaacatattccagtatttgaagccagaattttctttggaaattgttgagaaaaaccaaggaagataaaacaagttgcatttttaagcacgtttctctgctaagacaagatgctcagttgacacatttgaaaagtgtttgaaaaattcttgtgcaaatgatcaagataattctataattaacatcttaagggaatttttctaaaaaccttttcattgtttctatatattttgcccctgctataaaattccttccatgaagaaaactgctgctttcagcaaaagtcacactactcttgataaaagctgttgcaggcctttgctaagctatcaaagtaacgtattaattttgtatcaactccgttctcaacaccttccttaagtctttgctgtcataatttaagcatttgagtatattttgaagtcttaaaagacttagcccataggcacttaaa

SEQ ID NO: 6974 - DNA, 607 bp, Homo sapiens
  source 1..607: mol_type = unassigned DNA
ggtggctcatgcctgtaatcccagcatttcgggaggccgaggcagacggatcacaaggtgactatgaaaggcttatatttccaacagagttccacagatgaagaaataacatttgtatttcaagaaaaggaagatcttcctgttacagaggataactttgtgaaacttcaagttaaagcttgtgctctgagccagataaatacaaagcttctggcagaaatgaagatgaaaaaggatttatttcctgttgggagagaaattgctggaattgtattagatgttggaagcaaggtatcattctttcaaccagatgatgaagtagttggaattttgcccctggactctgaagaccctggactttgtgaagttgttagagtacatgagcattacttggttcataaaccagaaaaggtcacatggacggaagcagcaggaagcattcgggatggagtgcgtgcctatacagctctgcattatctttctcatctctctcctggaaaatcagtgctgataatggatggagcaagtgcatttggtacaatagctattcagttagcacatcatagaggagccaaagtgatttcaacagcatgcagccttgaagata

SEQ ID NO: 6975 - DNA, 620 bp, Homo sapiens
  source 1..620: mol_type = unassigned DNA
ccgttccacgggattagcaaaactgcctccccgctgacagaactgagaatttctagaggcatttgtttgtatgggatttgctgttattatctaccctcttcattggccttgcctttattatctgtacgttttgatcaagaggagcagcaagagaagaatgccaacagacaagcacaaagaaacgcatctggccggagcctgcatgtatctaaatttccaggttgctgctgccctcagaatagcactgatgatggcaaagttctagaggaaactttcatattgaagaggctataaaaatctctatagcctccaactccacagagaagccgctaatctatttcttccaaagcaaagccttcttgagtctgaatcacaacaaaagattgcccataggaaatgtaatctccgaagttgttttctaatcccaaggcaagcagaagcgcaggaaggtgcggccgattcctcgccggtttcctttttttgggaattcggattgcattcgtgcaagcaagggactgcaattgtgtcttgggtccacaccacaaaaccgtgtcggtgactatgaaaggcttatatttccaacagagttccacagatgaagaaataacatttgtatttca

SEQ ID NO: 6976 - DNA, 2571 bp, Homo sapiens
  source 1..2571: mol_type = unassigned DNA
actggccccgcccaccgtgcgaacccaaagagggtgagccaaagaaatgtaagacaacagagtgacaagccgaatgagccaatcagcaggggctgtgtgggggcaggattagcactctccccctcctccccatgtaggcgtaacaggagatttatggtctgaggttgcctatcgtggtttatggagattttgttgcacgatttcggtgcatctgctcgttgccgtgagagacactagataggatgcacttaattgacttaattattggaggttttcaaggagagaataatgtggaaaggaaaaaggcgaagcacaacccaaaggggttggccgggcctatggttggaatgaggaagggtgtggtcttcggctaaaatttgcataaaacggaacccatccgggcgattccaacttcgcccatttattggtagtccttggggcggggcctcgcctctttctccgcccccgagcggaacatgacgggagatgtagttccgagaccggttgccatggcgttctggacagcctcgcgagtccgaccccgcccttcaggagtgacgagcggcctgaccaatgggagcagggggcgggctctctgacgaaggactggaaggtggcggtggtgaaggtgcaggccgttggggcggctcagaggcaggtgactatgaaaggcttatatttccaacagagttccacagatgaagaaataacatttgtatttcaagaaaaggaagatcttcctgttacagaggataactttgtgaaacttcaagttaaagcttgtgctctgagccagataaatacaaagcttctggcagaaatgaagatgaaaaaggatttatttcctgttgggagagaaattgctggaattgtattagatgttggaagcaaggtatcattctttcaaccagatgatgaagtagttggaattttgcccctggactctgaagaccctggactttgtgaagttgttagagtacatgagcattacttggttcataaaccagaaaaggtcacatggacggaagcagcaggaagcattcgggatggagtgcgtgcctatacagctctgcattatctttctcatctctctcctggaaaatcagtgctgataatggatggagcaagtgcatttggtacaatagctattcagttagcacatcatagaggagccaaagtgatttcaacagcatgcagccttgaagataagcagtgccttgaaagattcagacctcccatagagaacagtacaattgcctgatttcctgtcctttacagcccgagtgattgatgtatctaatgggaaagttcatgttgctgaaagctgtttggaagaaacaggtggcctgggagtagatattgtcctagatgctggagtgagattatatagtaaagatgatgaaccagctgtaaaactacaactactaccacataaacatgatatcatcacacttcttggtgttggaggccactgggtaacaacagaagaaaaccttcagttggatcctccagatagccactgccttttcctcaagggagcaacgttagctttcctgaatgatgaagtttggaatttgtcaaatgtacaacaggttaagtttccttaagtattccaaacagtattccaagtgccttgcaagtattcatttaaacattaaaacagccttttgagatgtaagtactgttatcatccccatttcacaggtgaagaaacagaagcacagagatgttgatacagactcaaggacgcagcaagtggcggagcaagaatcacactcaggcagtctctctcctttctgaacagagatgagccctaagatacctggaagattttgtttttaacctcacattaaggaaagcacacatcaccttgaaaggttgcacacttactcctatgatggtgccattgcacagaaacatttcagaatacttttctaaattaaagagtttgtggagtgttttataaatatcaatgctaggaaatctttatcaaatgaagataggtttgactttttgaaacaaaagtcattcagagataagtctggtgtgattgaagccaaatcattccagttgagtaaaaataataaaaagtttggaatatacaaacaatttcaaaaagaaaggtgcaaacctctttagagtagggtcaacttaagaattccttttatttctaaaatgactggcttagaggcagcagcacttggtaaaagttttaatgtattggataaaaaaaaagttatcattacttgatagagcatatgtgtgtgtctgaagaaagatttacatagccttacacttctctctactgaatatcatacgttacttttcttaaatgtgtctagtcatatatgtgtgatatgtataaaggccagttccctccaggagcaatgacagtctttattcggagctttaaggtagttatgtaggccgggcatggtggcacatgcctgtaatcccagctactcatgaggctgaggcagaagaatcgcttgaacctgggaggcagaggtttcagtgagccaagattgcactactacactccagcctggtgacagagtgagactccatctc

SEQ ID NO: 6977 - DNA, 3553 bp, Homo sapiens
  source 1..3553: mol_type = unassigned DNA
gtcgcgccattttgccggggtttgaatgtgaggcggagcggcggcaggagcgggtagtgccagctacggtccgcggctggggttccctcctccgtttctgtatccccacgagatcctatagcaatggaactcagcgatgcaaatctgcaaacactaacagaatatttaaagaaaacacttgatcctgatcctgccatccgacgtccagctgagaaatttcttgaatctgttgaaggaaatcagaattatccactgttgcttttgacattactggagaagtcccaggataatgttatcaaagtatgtgcttcagtaacattcaaaaactatattaaaaggaactggagaattgttgaagatgaaccaaacaaaatttgtgaagccgatcgagtggccattaaagccaacatagtgcacttgatgcttagcagcccagagcaaattcagaagcagttaagtgatgcaattagcattattggcagagaagattttccacagaaatggcctgacttgctgacagaaatggtgaatcgctttcagagtggagatttccatgttattaatggagtcctccgtacagcacattcattatttaaaagataccgtcatgaatttaagtcaaacgagttatggactgaaattaagcttgttctggatgcctttgctttgcctttgactaatctttttaaggccactattgaactctgcagtacccatgcaaatgatgcctctgccctgaggattctgttttcttccctgatcctgatctcaaaattgttctatagtttaaactttcaggatctccctgaattttttgaagataatatggaaacttggatgaataattttcatactctcttaacattggataataagcttttacaaactgatgatgaagaggaagccggcttattggagctcttaaaatcccagatttgtgataatgccgcactctatgcacaaaagtacgatgaagaattccagcgatacctgcctcgttttgttacagccatctggaatttactagttacaacgggtcaagaggttaaatatgatttgttggtaagtaatgcaattcaatttctggcttcagtttgtgagagacctcattataagaatctatttgaggaccagaacacgctgacaagtatctgtgaaaaggttattgtgcctaacatggaatttagagctgctgatgaagaagcatttgaagataattctgaggagtacataaggagagatttggaaggatctgatattgatactagacgcagggctgcttgtgatctggtacgaggattatgcaagttttttgagggacctgtgacaggaatcttctctggttatgttaattccatgctgcaggaatacgcaaaaaatccatctgtcaactggaaacacaaagatgcagccatctacctagtgacatctttggcatcaaaagcccaaacacagaagcatggaattacacaagcaaatgaacttgtaaacctaactgagttctttgtgaatcacatcctccctgatttaaaatcagctaatgtgaatgaatttcctgtccttaaagctgacggtatcaaatatattatgatttttagaaatcaagtgccaaaagaacatcttttagtctcgattcctctcttgattaatcatcttcaagctgaaagtattgttgttcatacttacgcagctcatgctcttgaacggctctttactatgcgagggcctaacaatgccactctctttacagctgcagaaatcgcaccgtttgttgagattctgctaacaaaccttttcaaagctctcacacttcctggctcttcagaaaatgaatatattatgaaagctatcatgagaagtttttctctcctacaagaagccataatcccctacatccctactctcatcactcagcttacacagaagctattagctgttagtaagaacccaagcaaacctcactttaatcactacatgtttgaagcaatatgtttatccataagaataacttgcaaagctaaccctgctgctgttgtaaattttgaggaggctttgtttttggtgtttactgaaatcttacaaaatgatgtgcaagaatttattccatacgtctttcaagtgatgtctttgcttctggaaacacacaaaaatgacatcccgtcttcctatatggccttatttcctcatctccttcagccagtgctttgggaaagaacaggaaatattcctgctctagtgaggcttcttcaagcattcttagaacgcggttcaaacacaatagcaagtgctgcagctgacaaaattcctgggttactaggtgtctttcagaagctgattgcatccaaagcaaatgaccaccaaggtttttatcttctaaacagtataatagagcacatgcctcctgaatcagttgaccaatataggaaacaaatcttcattctgctattccagagacttcagaattccaaaacaaccaagtttatcaagagttttttagtctttattaatttgtattgcataaaatatggggcactagcactacaagaaatatttgatggtatacaaccaaaaatgtttggaatggttttggaaaaaattattattcctgaaattcagaaggtatctggaaatgtagagaaaaagatctgtgcggttggcataaccaaattactaacagaatgtcccccaatgatggacactgagtataccaaactgtggactccattattacagtctttgattggtctttttgagttacccgaagatgataccattcctgatgaggaacattttattgacatagaagatacaccaggatatcagactgccttctcacagttggcatttgctgggaaaaaagagcatgatcctgtaggtcaaatggtgaataaccccaaaattcacctggcacagtcacttcacaagttgtctaccgcctgtccaggaagggttccatcaatggtgagcaccagcctgaatgcagaagcgctccagtatctccaagggtaccttcaggcagccagtgtgacactgctttaaactgcatttttctaatgggctaaacccagatggtttcctaggaaatcacaggcttctgagcacagctgcattaaaacaaaggaagttctccttttgaacttgtcacgaattccatcttgtaaaggatattaaatgttgctttaacctgaaccttgagcaaattagttggtttgtgtgatcatacagttatgtgggtggcttctagtttgcaacttcaagggacaagtattaatagttcagtgtatggcgttggtttgtgttgagcgtttgcacggtttggataatcttaaattttgacggacactgtggagactttctgttactaaatccttttgttttgaagctgttgctatttgtatttctcttgtcctttatattttttgtctgtttatttacgcttttattggaaatgtgaataagtaaagaattacttgtgttacttgccaagcagtgcacatttcatagtttcaaatctgtaatcagcaataaaaatcctaaaatatgtacctaagaa

SEQ ID NO: 6978 - DNA, 2749 bp, Homo sapiens
  source 1..2749: mol_type = unassigned DNA
atggaactcagcgatgcaaatctgcaaacactaacagaatatttaaagaaaacacttgatcctgatcctgccatccgacgtccagctgagaaatttcttgaatctgttgaaggaaatcagaattatccactgttgcttttgacattactggagaagtcccaggataatgttatcaaagtatgtgcttcagtaacattcaaaaactatattaaaaggaactggagaattgttgaagatgaaccaaacaaaatttgtgaagccgatcgagtggccattaaagccaacatagtgcacttgatgcttagcagcccagagcaaattcagaagcagttaagtgatgcaattagcattattggcagagaagattttccacagaaatggcctgacttgctgacagaaatggtgaatcgctttcagagtggagatttccatgttattaatggagtcctccgtacagcacattcattatttaaaagataccgtcatgaatttaagtcaaacgagttatggactgaaattaagcttgttctggatgcctttgctttgcctttgactaatctttttaaggccactattgaactctgcagtacccatgcaaatgatgcctctgccctgaggattctgttttcttccctgatcctgatctcaaaattgttctatagtttaaactttcaggatctccctgaattttttgaagataatatggaaacttggatgaataattttcatactctcttaacattggataataagcttttacaaactgatttggtaagtaatgcaattcaatttctggcttcagtttgtgagagacctcattataagaatctatttgaggaccagaacacgctgacaagtatctgtgaaaaggttattgtgcctaacatggaatttagagctgctgatgaagaagcatttgaagataattctgaggagtacataaggagagatttggaaggatctgatattgatactagacgcagggctgcttgtgatctggtacgaggattatgcaagttttttgagggacctgtgacaggaatcttctctggttatgttaattccatgctgcaggaatacgcaaaaaatccatctgtcaactggaaacacaaagatgcagccatctacctagtgacatctttggcatcaaaagcccaaacacagaagcatggaattacacaagcaaatgaacttgtaaacctaactgagttctttgtgaatcacatcctccctgatttaaaatcagctaatgtgaatgaatttcctgtccttaaagctgacggtatcaaatatattatgatttttagaaatcaagtgccaaaagaacatcttttagtctcgattcctctcttgattaatcatcttcaagctgaaagtattgttgttcatacttacgcagctcatgctcttgaacggctctttactatgcgagggcctaacaatgccactctctttacagctgcagaaatcgcaccgtttgttgagattctgctaacaaaccttttcaaagctctcacacttcctggctcttcagaaaatgaatatattatgaaagctatcatgagaagtttttctctcctacaagaagccataatcccctacatccctactctcatcactcagcttacacagaagctattagctgttagtaagaacccaagcaaacctcactttaatcactacatgtttgaagcaatatgtttatccataagaataacttgcaaagctaaccctgctgctgttgtaaattttgaggaggctttgtttttggtgtttactgaaatcttacaaaatgatgtgcaagaatttattccatacgtctttcaagtgatgtctttgcttctggaaacacacaaaaatgacatcccgtcttcctatatggccttatttcctcatctccttcagccagtgctttgggaaagaacaggaaatattcctgctctagtgaggcttcttcaagcattcttagaacgcggttcaaacacaatagcaagtgctgcagctgacaaaattcctgggttactaggtgtctttcagaagctgattgcatccaaagcaaatgaccaccaaggtttttatcttctaaacagtataatagagcacatgcctcctgaatcagttgaccaatataggaaacaaatcttcattctgctattccagagacttcagaattccaaaacaaccaagtttatcaagagttttttagtctttattaatttgtattgcataaaatatggggcactagcactacaagaaatatttgatggtatacaaccaaaaatgtttggaatggttttggaaaaaattattattcctgaaattcagaaggtatctggaaatgtagagaaaaagatctgtgcggttggcataaccaaattactaacagaatgtcccccaatgatggacactgagtataccaaactgtggactccattattacagtctttgattggtctttttgagttacccgaagatgataccattcctgatgaggaacattttattgacatagaagatacaccaggatatcagactgccttctcacagttggcatttgctgggaaaaaagagcatgatcctgtaggtcaaatggtgaataaccccaaaattcacctggcacagtcacttcacaagttgtctaccgcctgtccaggaagggttccatcaatggtgagcaccagcctgaatgcagaagcgctccagtatctccaagggtaccttcaggcagccagtgtgacactgctttaaa

SEQ ID NO: 6979 - DNA, 3055 bp, Homo sapiens
  source 1..3055: mol_type = unassigned DNA
tcaggctcgctgtcgcgccattttgccggggtttgaatgtgaggcggagcggcggcaggagcgggtagtgccagctacggtccgcggctggggttccctcctccgtttctgtatccccacgagatcctatagcaatggaactcagcgatgcaaatctgcaaacactaacagaatatttaaagaaaacacttgatcctgatcctgccatccgacgtccagctgagaaatttcttgaatctgttgaaggaaatcagaattatccactgttgcttttgacattactggagaagtcccaggataatgttatcaaagtatgtgcttcagtaacattcaaaaactatattaaaaggaactggagaattgttgaagatgaaccaaacaaaatttgtgaagccgatcgagtggccattaaagccaacatagtgcacttgatgcttagcagcccagagcaaattcagaagcagttaagtgatgcaattagcattattggcagagaagattttccacagaaatggcctgacttgctgacagaaatggtgaatcgctttcagagtggagatttccatgttattaatggagtcctccgtacagcacattcattatttaaaagataccgtcatgaatttaagtcaaacgagttatggactgaaattaagcttgttctggatgcctttgctttgcctttgactaatctttttaaggccactattgaactctgcagtacccatgcaaatgatgcctctgccctgaggattctgttttcttccctgatcctgatctcaaaattgttctatagtttaaactttcaggatctccctgaattttttgaagataatatggaaacttggatgaataattttcatactctcttaacattggataataagcttttacaaactgatgatgaagaggaagccggcttattggagctcttaaaatcccagatttgtgataatgccgcactctatgcacaaaagtacgatgaagaattccagcgatacctgcctcgttttgttacagccatctggaatttactagttacaacgggtcaagaggttaaatatgatttgttggtaagtaatgcaattcaatttctggcttcagtttgtgagagacctcattataagaatctatttgaggaccagaacacgctgacaagtatctgtgaaaagagtattgttgttcatacttacgcagctcatgctcttgaacggctctttactatgcgagggcctaacaatgccactctctttacagctgcagaaatcgcaccgtttgttgagattctgctaacaaaccttttcaaagctctcacacttcctggctcttcagaaaatgaatatattatgaaagctatcatgagaagtttttctctcctacaagaagccataatcccctacatccctactctcatcactcagcttacacagaagctattagctgttagtaagaacccaagcaaacctcactttaatcactacatgtttgaagcaatatgtttatccataagaataacttgcaaagctaaccctgctgctgttgtaaattttgaggaggctttgtttttggtgtttactgaaatcttacaaaatgatgtgcaagaatttattccatacgtctttcaagtgatgtctttgcttctggaaacacacaaaaatgacatcccgtcttcctatatggccttatttcctcatctccttcagccagtgctttgggaaagaacaggaaatattcctgctctagtgaggcttcttcaagcattcttagaacgcggttcaaacacaatagcaagtgctgcagctgacaaaattcctgggttactaggtgtctttcagaagctgattgcatccaaagcaaatgaccaccaaggtttttatcttctaaacagtataatagagcacatgcctcctgaatcagttgaccaatataggaaacaaatcttcattctgctattccagagacttcagaattccaaaacaaccaagtttatcaagagttttttagtctttattaatttgtattgcataaaatatggggcactagcactacaagaaatatttgatggtatacaaccaaaaatgtttggaatggttttggaaaaaattattattcctgaaattcagaaggtatctggaaatgtagagaaaaagatctgtgcggttggcataaccaaattactaacagaatgtcccccaatgatggacactgagtataccaaactgtggactccattattacagtctttgattggtctttttgagttacccgaagatgataccattcctgatgaggaacattttattgacatagaagatacaccaggatatcagactgccttctcacagttggcatttgctgggaaaaaagagcatgatcctgtaggtcaaatggtgaataaccccaaaattcacctggcacagtcacttcacaagttgtctaccgcctgtccaggaagggttccatcaatggtgagcaccagcctgaatgcagaagcgctccagtatctccaagggtaccttcaggcagccagtgtgacactgctttaaactgcatttttctaatgggctaaacccagatggtttcctaggaaatcacaggcttctgagcacagctgcattaaaacaaaggaagttctccttttgaacttgtcacgaattccatcttgtaaaggatattaaatgttgctttaacctgaaccttgagcaaattagttggtttgtgtgatcatacagttatgtgggtggcttctagtttgcaacttcaagggacaagtattaatagttcagtgtatggcgttggtttgtgttgagcgtttgcacggtttggataatcttaaattttgacggacactgtggagactttctgttactaaatccttttgttttgaagctgttgctatttgtatttctcttgtcctttatattttttgtctgtttatttacgcttttattggaaatgtgaataagtaaagaattacttgtgttacttgccaagcagtgcacatttcatagtttcaaatctgtaatcagcaataaaaatcctaaaatatgtacct

SEQ ID NO: 6980 - DNA, 2689 bp, Homo sapiens
  source 1..2689: mol_type = unassigned DNA
gccggggtttgaatgtgaggcggagcggcggcaggagcgggtagtgccagctacggtccgcggctggggttccctcctccgtttctgtatccccacgagatcctatagcaatggaactcagcgatgcaaatctgcaaacactaacagaatatttaaagaaaacacttgatcctgatcctgccatccgacgtccagctgagaaatttcttgaatctgttgaaggaaatcagaattatccactgttgcttttgacattactggagaagtcccaggataatgttatcaaatttaaactttcaggatctccctgaattttttgaagataatatggaaacttggatgaataattttcatactctcttaacattggataataagcttttacaaactgatgatgaagaggaagccggcttattggagctcttaaaatcccagatttgtgataatgccgcactctatgcacaaaagtacgatgaagaattccagcgatacctgcctcgttttgttacagccatctggaatttactagttacaacgggtcaagaggttaaatatgatttgttggtaagtaatgcaattcaatttctggcttcagtttgtgagagacctcattataagaatctatttgaggaccagaacacgctgacaagtatctgtgaaaaggttattgtgcctaacatggaatttagagctgctgatgaagaagcatttgaagataattctgaggagtacataaggagagatttggaaggatctgatattgatactagacgcagggctgcttgtgatctggtacgaggattatgcaagttttttgagggacctgtgacaggaatcttctctggttatgttaattccatgctgcaggaatacgcaaaaaatccatctgtcaactggaaacacaaagatgcagccatctacctagtgacatctttggcatcaaaagcccaaacacagaagcatggaattacacaagcaaatgaacttgtaaacctaactgagttctttgtgaatcacatcctccctgatttaaaatcagctaatgtgaatgaatttcctgtccttaaagctgacggtatcaaatatattatgatttttagaaatcaagtgccaaaagaacatcttttagtctcgattcctctcttgattaatcatcttcaagctgaaagtattgttgttcatacttacgcagctcatgctcttgaacggctctttactatgcgagggcctaacaatgccactctctttacagctgcagaaatcgcaccgtttgttgagattctgctaacaaaccttttcaaagctctcacacttcctggctcttcagaaaatgaatatattatgaaagctatcatgagaagtttttctctcctacaagaagccataatcccctacatccctactctcatcactcagcttacacagaagctattagctgttagtaagaacccaagcaaacctcactttaatcactacatgtttgaagcaatatgtttatccataagaataacttgcaaagctaaccctgctgctgttgtaaattttgaggaggctttgtttttggtgtttactgaaatcttacaaaatgatgtgcaagaatttattccatacgtctttcaagtgatgtctttgcttctggaaacacacaaaaatgacatcccgtcttcctatatggccttatttcctcatctccttcagccagtgctttgggaaagaacaggaaatattcctgctctagtgaggcttcttcaagcattcttagaacgcggttcaaacacaatagcaagtgctgcagctgacaaaattcctgggttactaggtgtctttcagaagctgattgcatccaaagcaaatgaccaccaaggtttttatcttctaaacagtataatagagcacatgcctcctgaatcagttgaccaatataggaaacaaatcttcattctgctattccagagacttcagaattccaaaacaaccaagtttatcaagagttttttagtctttattaatttgtattgcataaaatatggggcactagcactacaagaaatatttgatggtatacaaccaaaaatgtttggaatggttttggaaaaaattattattcctgaaattcagaaggtatctggaaatgtagagaaaaagatctgtgcggttggcataaccaaattactaacagaatgtcccccaatgatggacactgagtataccaaactgtggactccattattacagtctttgattggtctttttgagttacccgaagatgataccattcctgatgaggaacattttattgacatagaagatacaccaggatatcagactgccttctcacagttggcatttgctgggaaaaaagagcatgatcctgtaggtcaaatggtgaataaccccaaaattcacctggcacagtcacttcacaagttgtctaccgcctgtccaggaagggttccatcaatggtgagcaccagcctgaatgcagaagcgctccagtatctccaagggtaccttcaggcagccagtgtgacactgctttaaactgcatttttctaatgggctaaacccagatggtttcctaggaaatcacaggcttctgagcacagctgcattaaaacaaaggaagttctccttttgaacttgtcacgaattccatcttgtaaaggatattaaatgttgctttaacctg

SEQ ID NO: 6981 - DNA, 2740 bp, Homo sapiens
  source 1..2740: mol_type = unassigned DNA
ccgggccgcgcttcctctcgccaggcctgcgagcttcctcccagcggagccctgggcgagccgaggttggccgccgccgccgccgagcccgctgccgccctcccgctcctgccccacccgcgccttgcccgggggcttctgccggggtggggtccgagccgggcgaccgcccggctgcgccgccgtcggggccgtaacccggcccgccgtccctcccgccccagccagcctctggccgccggagcccgcggggcgtggagcgcgaggagccccgcggccccgatcgagcgtccggggcggcccccggcagccagcgcgacgttccaaaatcgaacctcagtggcggcgctcggaagcggaactctgccggggccgcgccggctacattgtttcctccccccgactccctcccgcccccttcccccgcctttcttccctccgcgacccgggccgtgcgtccgtccccctgcctctgcctggcggtccctcctcccctctccttgcacccatacctctttgtaccgcaccccctggggacccctgcgcccctcccctcccccctgaccgcatggaccgtcccgcaggccgctgatgccgcccgcggcgaggtggcccggaccgcagtgccccaagagagctctaatggtaccaagtgacaggttggctttactgtgactcggggacgccagagctcctgagaagatgtcagcaatacaggccgcctggccatccggtacagaatgtattgccaagtacaacttccacggcactgccgagcaggacctgcccttctgcaaaggagacgtgctcaccattgtggccgtcaccaaggaccccaactggtacaaagccaaaaacaaggtgggccgtgagggcatcatcccagccaactacgtccagaagcgggagggcgtgaaggcgggtaccaaactcagcctcatgccttggttccacggcaagatcacacgggagcaggctgagcggcttctgtacccgccggagacaggcctgttcctggtgcgggagagcaccaactaccccggagactacacgctgtgcgtgagctgcgacggcaaggtggagcactaccgcatcatgtaccatgccagcaagctcagcatcgacgaggaggtgtactttgagaacctcatgcagctggtggagcactacacctcagacgcagatggactctgtacgcgcctcattaaaccaaaggtcatggagggcacagtggcggcccaggatgagttctaccgcagcggctgggccctgaacatgaaggagctgaagctgctgcagaccatcgggaagggggagttcggagacgtgatgctgggcgattaccgagggaacaaagtcgccgtcaagtgcattaagaacgacgccactgcccaggccttcctggctgaagcctcagtcatgacgcaactgcggcatagcaacctggtgcagctcctgggcgtgatcgtggaggagaagggcgggctctacatcgtcactgagtacatggccaaggggagccttgtggactacctgcggtctaggggtcggtcagtgctgggcggagactgtctcctcaagttctcgctagatgtctgcgaggccatggaatacctggagggcaacaatttcgtgcatcgagacctggctgcccgcaatgtgctggtgtctgaggacaacgtggccaaggtcagcgactttggtctcaccaaggaggcgtccagcacccaggacacgggcaagctgccagtcaagtggacagcccctgaggccctgagagagaagaaattctccactaagtctgacgtgtggagtttcggaatccttctctgggaaatctactcctttgggcgagtgccttatccaagaattcccctgaaggacgtcgtccctcgggtggagaagggctacaagatggatgcccccgacggctgcccgcccgcagtctatgaagtcatgaagaactgctggcacctggacgccgccatgcggccctccttcctacagctccgagagcagcttgagcacatcaaaacccacgagctgcacctgtgacggctggcctccgcctgggtcatgggcctgtggggactgaacctggaagatcatggacctggtgcccctgctcactgggcccgagcctgaactgagccccagcgggctggcgggcctttttcctgcgtcccagcctgcacccctccggccccgtctctcttggacccacctgtggggcctggggagcccactgaggggccagggaggaaggaggccacggagcgggaggcagcgccccaccacgtcgggcttccctggcctcccgccactcgccttcttagagttttattcctttccttttttgagattttttttccgtgtgtttattttttattatttttcaagataaggagaaagaaagtacccagcaaatgggcattttacaagaagtacgaatcttatttttcctgtcctgcccgtgagggtgggggggaccgggcccctctctagggacccctcgccccagcctcattccccattctgtgtcccatgtcccgtgtctcctcggtcgccccgtgtttgcgcttgaccatgttgcactgtttgcatgcgcccgaggcagacgtctgtcaggggcttggatttcgtgtgccgctgccacccgcccacccgccttgtgagatggaattgtaataaaccacgccatgaggacaccgccgcccgcctcggcgcttcctccaccgag

SEQ ID NO: 6982 - DNA, 2281 bp, Homo sapiens
  source 1..2281: mol_type = unassigned DNA
aggggtctcatgaccccaccagggaggagccgtccaagagagttagcagctcccacttgcaagatgtctgtggcaaggcaggcactgttctggtgctgagagctcaactccagtcctcacagcagcccccagagccaaggagtatcaccagtccattgcacagatggggaagctgggttctagagtcacagccagcagagtaaagctctaatggtaccaagtgacaggttggctttactgtgactcggggacgccagagctcctgagaagatgtcagcaatacaggccgcctggccatccggtacagaatgtattgccaagtacaacttccacggcactgccgagcaggacctgcccttctgcaaaggagacgtgctcaccattgtggccgtcaccaaggaccccaactggtacaaagccaaaaacaaggtgggccgtgagggcatcatcccagccaactacgtccagaagcgggagggcgtgaaggcgggtaccaaactcagcctcatgccttggttccacggcaagatcacacgggagcaggctgagcggcttctgtacccgccggagacaggcctgttcctggtgcgggagagcaccaactaccccggagactacacgctgtgcgtgagctgcgacggcaaggtggagcactaccgcatcatgtaccatgccagcaagctcagcatcgacgaggaggtgtactttgagaacctcatgcagctggtggagcactacacctcagacgcagatggactctgtacgcgcctcattaaaccaaaggtcatggagggcacagtggcggcccaggatgagttctaccgcagcggctgggccctgaacatgaaggagctgaagctgctgcagaccatcgggaagggggagttcggagacgtgatgctgggcgattaccgagggaacaaagtcgccgtcaagtgcattaagaacgacgccactgcccaggccttcctggctgaagcctcagtcatgacgcaactgcggcatagcaacctggtgcagctcctgggcgtgatcgtggaggagaagggcgggctctacatcgtcactgagtacatggccaaggggagccttgtggactacctgcggtctaggggtcggtcagtgctgggcggagactgtctcctcaagttctcgctagatgtctgcgaggccatggaatacctggagggcaacaatttcgtgcatcgagacctggctgcccgcaatgtgctggtgtctgaggacaacgtggccaaggtcagcgactttggtctcaccaaggaggcgtccagcacccaggacacgggcaagctgccagtcaagtggacagcccctgaggccctgagagagaagaaattctccactaagtctgacgtgtggagtttcggaatccttctctgggaaatctactcctttgggcgagtgccttatccaagaattcccctgaaggacgtcgtccctcgggtggagaagggctacaagatggatgcccccgacggctgcccgcccgcagtctatgaagtcatgaagaactgctggcacctggacgccgccatgcggccctccttcctacagctccgagagcagcttgagcacatcaaaacccacgagctgcacctgtgacggctggcctccgcctgggtcatgggcctgtggggactgaacctggaagatcatggacctggtgcccctgctcactgggcccgagcctgaactgagccccagcgggctggcgggcctttttcctgcgtcccagcctgcacccctccggccccgtctctcttggacccacctgtggggcctggggagcccactgaggggccagggaggaaggaggccacggagcgggaggcagcgccccaccacgtcgggcttccctggcctcccgccactcgccttcttagagttttattcctttccttttttgagattttttttccgtgtgtttattttttattatttttcaagataaggagaaagaaagtacccagcaaatgggcattttacaagaagtacgaatcttatttttcctgtcctgcccgtgagggtgggggggaccgggcccctctctagggacccctcgccccagcctcattccccattctgtgtcccatgtcccgtgtctcctcggtcgccccgtgtttgcgcttgaccatgttgcactgtttgcatgcgcccgaggcagacgtctgtcaggggcttggatttcgtgtgccgctgccacccgcccacccgccttgtgagatggaattgtaataaaccacgccatgaggacaccgcc

SEQ ID NO: 6983 - DNA, 2219 bp, Homo sapiens
  source 1..2219: mol_type = unassigned DNA
ccgggccgcgcttcctctcgccaggcctgcgagcttcctcccagcggagccctgggcgagccgaggccgctgatgccgcccgcggcgaggtggcccggaccgcagtgccccaagagagctctaatggtaccaagtgacaggttggctttactgtgactcggggacgccagagctcctgagaagatgtcagcaatacaggccgcctggccatccggtacagaatgtattgccaagtacaacttccacggcactgccgagcaggacctgcccttctgcaaaggagacgtgctcaccattgtggccgtcaccaaggaccccaactggtacaaagccaaaaacaaggtgggccgtgagggcatcatcccagccaactacgtccagaagcgggagggcgtgaaggcgggtaccaaactcagcctcatgccttggttccacggcaagatcacacgggagcaggctgagcggcttctgtacccgccggagacaggcctgttcctggtgcgggagagcaccaactaccccggagactacacgctgtgcgtgagctgcgacggcaaggtggagcactaccgcatcatgtaccatgccagcaagctcagcatcgacgaggaggtgtactttgagaacctcatgcagctggtggagcactacacctcagacgcagatggactctgtacgcgcctcattaaaccaaaggtcatggagggcacagtggcggcccaggatgagttctaccgcagcggctgggccctgaacatgaaggagctgaagctgctgcagaccatcgggaagggggagttcggagacgtgatgctgggcgattaccgagggaacaaagtcgccgtcaagtgcattaagaacgacgccactgcccaggccttcctggctgaagcctcagtcatgacgcaactgcggcatagcaacctggtgcagctcctgggcgtgatcgtggaggagaagggcgggctctacatcgtcactgagtacatggccaaggggagccttgtggactacctgcggtctaggggtcggtcagtgctgggcggagactgtctcctcaagttctcgctagatgtctgcgaggccatggaatacctggagggcaacaatttcgtgcatcgagacctggctgcccgcaatgtgctggtgtctgaggacaacgtggccaaggtcagcgactttggtctcaccaaggaggcgtccagcacccaggacacgggcaagctgccagtcaagtggacagcccctgaggccctgagagagaagaaattctccactaagtctgacgtgtggagtttcggaatccttctctgggaaatctactcctttgggcgagtgccttatccaagaattcccctgaaggacgtcgtccctcgggtggagaagggctacaagatggatgcccccgacggctgcccgcccgcagtctatgaagtcatgaagaactgctggcacctggacgccgccatgcggccctccttcctacagctccgagagcagcttgagcacatcaaaacccacgagctgcacctgtgacggctggcctccgcctgggtcatgggcctgtggggactgaacctggaagatcatggacctggtgcccctgctcactgggcccgagcctgaactgagccccagcgggctggcgggcctttttcctgcgtcccagcctgcacccctccggccccgtctctcttggacccacctgtggggcctggggagcccactgaggggccagggaggaaggaggccacggagcgggaggcagcgccccaccacgtcgggcttccctggcctcccgccactcgccttcttagagttttattcctttccttttttgagattttttttccgtgtgtttattttttattatttttcaagataaggagaaagaaagtacccagcaaatgggcattttacaagaagtacgaatcttatttttcctgtcctgcccgtgagggtgggggggaccgggcccctctctagggacccctcgccccagcctcattccccattctgtgtcccatgtcccgtgtctcctcggtcgccccgtgtttgcgcttgaccatgttgcactgtttgcatgcgcccgaggcagacgtctgtcaggggcttggatttcgtgtgccgctgccacccgcccacccgccttgtgagatggaattgtaataaaccacgccatgaggacaccgccgcccgcctcggcgcttcctccaccg

SEQ ID NO: 6984 - DNA, 1728 bp, Homo sapiens
  source 1..1728: mol_type = unassigned DNA
cttccctccgcgacccgggccgtgcgtccgtccccctgcctctgcctggcggtccctcctcccctctccttgcacccatacctctttgtaccgcaccccctggggacccctgcgcccctcccctcccccctgaccgcatggaccgtcccgcaggccgctgatgccgcccgcggcgaggtggcccggaccgcagtgccccaagagagctctaatggtaccaagtgacaggttggctttactgtgactcggggacgccagagctcctgagaagatgtcagcaatacaggccgcctggccatccggtacagaatgtattgccaagtacaacttccacggcactgccgagcaggacctgcccttctgcaaaggagacgtgctcaccattgtggccgtcaccaaggaccccaactggtacaaagccaaaaacaaggtgggccgtgagggcatcatcccagccaactacgtccagaagcgggagggcgtgaaggcgggtaccaaactcagcctcatgccttggttccacggcaagctcagcatcgacgaggaggtgtactttgagaacctcatgcagctggtggagcactacacctcagacgcagatggactctgtacgcgcctcattaaaccaaaggtcatggagggcacagtggcggcccaggatgagttctaccgcagcggctgggccctgaacatgaaggagctgaagctgctgcagaccatcgggaagggggagttcggagacgtgatgctgggcgattaccgagggaacaaagtcgccgtcaagtgcattaagaacgacgccactgcccaggccttcctggctgaagcctcagtcatgacgcaactgcggcatagcaacctggtgcagctcctgggcgtgatcgtggaggagaagggcgggctctacatcgtcactgagtacatggccaaggggagccttgtggactacctgcggtctaggggtcggtcagtgctgggcggagactgtctcctcaagttctcgctagatgtctgcgaggccatggaatacctggagggcaacaatttcgtgcatcgagacctggctgcccgcaatgtgctggtgtctgaggacaacgtggccaaggtcagcgactttggtctcaccaaggaggcgtccagcacccaggacacgggcaagctgccagtcaagtggacagcccctgaggccctgagagagaagaaattctccactaagtctgacgtgtggagtttcggaatccttctctgggaaatctactcctttgggcgagtgccttatccaagaattcccctgaaggacgtcgtccctcgggtggagaagggctacaagatggatgcccccgacggctgcccgcccgcagtctatgaagtcatgaagaactgctggcacctggacgccgccatgcggccctccttcctacagctccgagagcagcttgagcacatcaaaacccacgagctgcacctgtgacggctggcctccgcctgggtcatgggcctgtggggactgaacctggaagatcatggacctggtgcccctgctcactgggcccgagcctgaactgagccccagcgggctggcgggcctttttcctgcgtcccagcctgcacccctccggccccgtctctcttggacccacctgtggggcctggggagcccactgaggggccagggaggaaggaggccacggagcgggaggcagcgccccaccacgtcgggcttccctg

SEQ ID NO: 6985 - DNA, 1109 bp, Homo sapiens
  source 1..1109: mol_type = unassigned DNA
tgagattagggggcgcagccagagcaggcctaggaaaacgccagcagcgtgtggcgatcacggtgatgaagcgcaatggtggccgccccgtgggctacccaggagcaggaggagggccgagggatccagcccggggaccggggtgaccagaagtcagcagcttcccagaagccccgaagccggggcatcctccactcactcttctgctgtgtctgccgggatgatggggaggccctgcctgctcacagcggggcgcccctgcttgtggaggagaatggcgccatccctaagaccccagtccaatacctgctccctgaggccaaggcccaggactcagacaagatctgcgtggtcatcgacctggacgagaccctggtgcacagctccttcaagccagtgaacaacgcggacttcatcatccctgtggagattgatggggtggtccaccaggtctacgtgttgaagcgtcctcacgtggatgagttcctgcagcgaatgggcgagctctttgaatgtgtgctgttcactgctagcctcgccaagtacgcagacccagtagctgacctgctggacaaatggggggccttccgggcccggctgtttcgagagtcctgcgtcttccaccgggggaactacgtgaaggacctgagccggttgggtcgagacctgcggcgggtgctcatcctggacaattcacctgcctcctatgtcttccatccagacaatgctgtaccggtggcctcgtggtttgacaacatgagtgacacagagctccacgacctcctccccttcttcgagcaactcagccgtgtggacgacgtgtactcagtgctcaggcagccacggccagggagctagtgagggtgatggggccaggacctgcccctgaccaatgatacccacacctcctcccaggaagactgcccaggcctttgttaggaaaacccatgggccgccgccacactcagtgccatggggaagcgggcgtctcccccaccagccccaccaggcggtgtaggggcagcaggctgcactgaggaccgtgagctccaggccccgtgtcagtgccttcaaacctcctcccctattctcaggggacctggggggcc

SEQ ID NO: 6986 - DNA, 3538 bp, Homo sapiens
  source 1..3538: mol_type = unassigned DNA
ggaactacagcgtcgccgcctgggttgtgtcgccgcggtaggcgctgcgctctgagcgcagcgcaggccccgtaccgaccgcccgcccgccctctgtccgcgatggaggtgccggccgcgggtcgcgttcctgccgagggcgccccgacggcggctgtggccgaggtgcgctgcccggggcccgcgccgctgcgcctgctggagtggagggtggcggcgggcgcggccgtgcgcatcggctcggtgctggccgtgttcgaggccgccgcctccgcgcagtcctccggggcctctcagtcccgtgtagcctccgggggctgcgtgcgccccgcgcggccggaacgcaggctgaggtcggagcgcgcgggcgtggtgcgggagctgtgcgcgcagccgggccaggtggtcgccccaggagcggttctggtgaggttggaaggatgcagccacccggttgtcatgaaaggcctgtgtgctgaatgtggccaagacctcacccagttgcagagtaagaacgggaagcagcaggtgccgctgtccacggcgaccgtgtccatggtgcacagcgtgccggagttgatggtgagctccgagcaagctgaacagctgggaagagaagaccagcagcgactgcaccgaaaccggaagctggtgctcatggtggacttggaccagacgttgattcacacaaccgagcagcactgtcagcagatgtcgaataaaggcatctttcacttccagctgggccggggtgagcccatgctgcacacgcgcctgcgtccacactgcaaggacttcctggagaagatcgccaagctgtacgagctgcacgtcttcaccttcggcagccggctgtacgcacacaccatcgcaggctttttagaccccgagaagaagcttttttctcaccgaatattatcaagggatgaatgtattgacccattttctaaaacgggaaaccttagaaatctctttccttgtggagactcaatggtttgcattattgatgatcgagaagatgtctggaagtttgcccccaatctgataactgtgaagaaatatgtatacttccagggcacgggtgatatgaatgcgccccctgggtcccgagaatctcagacgagaaagaaagtaaatcattctcgaggcactgaggtctcagagccatctccgcccgtgagagaccctgagggggtaacgcaggcccctggagtggagcccagcaatggcctggagaagcctgcacgggagctgaacggcagcgaggccgccaccccgcgggactcaccccgccccgggaagccagacgagagggacatctggccccctgcccaggcccccaccagcagccaagagctggcaggcgctcctgagccccagggatcctgtgcgcagggtggccgggtggcaccgggacagcggcctgcccagggtgccacgggcactgacctggactttgacttatccagcgacagcgagagcagcagtgagtccgagggcacgaagtcctcctcctccgcctctgatggcgaaagcgaggggaaaagaggccggcagaagccgaaggctgccccagagggagccggggcgctggcacagggcagttccctggagccggggcggcctgcagcaccgagtctccccggagaggccgagcctggcgcgcatgccccggacaaggagcctgagctgggtgggcaggaggagggcgagcgggatggcctctgcggcctgggcaacggctgtgccgacaggaaggaggcggagaccgagtcacagaacagcgagctgtcgggggtcactgcgggtgagtccctggaccagagcatggaggaggaggaggaggaggacacggatgaggatgaccacctcatctacctggaggagatcctggtccgtgtacacactgactactatgccaagtatgaccgctacctcaacaaggagatcgaggaggcgccggacatccgcaagatcgtgccggagctcaagagcaaggtgctggcagacgtggccataattttcagtgggctacacccgacaaacttcccgatagagaagacgcgggagcattaccacgccacggcgctgggagcgaagatcctcactcggctggtgctgagccccgacgcccctgacagggccacgcacctgatcgccgcgcgagctggcacagagaaggtgctgcaggcacaggagtgcggacacctgcacgtggtcaaccctgactggctgtggagctgcctggagcgctgggacaaggtggaggagcagctcttcccgctcagggacgatcacaccaaggcacagagggagaacagccctgcggcctttcccgaccgggagggtgtgccccccaccgccttgttccacccgatgccggttcttcccaaggcccagcctggccccgaggttcggatctacgactccaacacggggaagctcatcaggacgggcgcccgggggcccccagcaccctccagctccctacccatccgccaggagccctcttccttcaggtggacgacatccttggagaaggcagcgacgacagcgacagcgagaagaggaggcctgaggagcaggaggaggagccccagccccggaagccagggacccgcagggagcggacgctcggggcacctgcgtccagcgagaggagcgcggcagggggccgggggcccagaggccacaagaggaagctgaatgaagaggacgccgccagcgagtccagcagggagtccagcaacgaggatgagggcagcagctccgaggccgacgagatggccaaggcgctggaggcggagctcaacgacctcatgtgagcgcgggcagcgggcagggactgaagcctgaccgacctccagcagcactcggacgtccccggaccagccctcagtctcggtccacgctgctttcttcccaaaggacatgtatatttgcagagctccacatacagaaacacattattttgcagaaataggtgtttttaagaagttttactacaggaatgtctacttttgtaagtgacaggtgttaaaggcccaggtgtgctgtgccaaagagctcagcagaggctcacgtggcccaggctggtgcgcccgctgtctcggtaaggggcgggttggtgtgttttccccttgtgtaccagagcacattccttaggggacggctttgggggtcccacgagacatggactaggagtttaagcaggacagtgtgcgtgcacgagctccgagcccagcacagacatgcctggaacccccgccgcctgctgctccctcctagggaacccatttccggggaacgccgtgactgtcgggcagcctggagcttcctgcagcctcctacgcagggtccacgccacgtggcctgggctgccatcctgccgtcctcccactggcatcctggcaagggggcgttgcttttcctgggcggccttttatgtcttggagacacctgatgtaaagtttctgtaaatctatttcatatctgacccaccaaacagatttctctttaataaaaatcctttttgtaa

SEQ ID NO: 6987 - DNA, 3753 bp, Homo sapiens
  source 1..3753: mol_type = unassigned DNA
ggaagtcggcgcgggctaggcgacgggtggaagccggtaccgagaggaactacagcgtcgccgcctgggttgtgtcgccgcggtaggcgctgcgctctgagcgcagcgcaggccccgtaccgaccgcccgcccgccctctgtccgcgatggaggtgccggccgcgggtcgcgttcctgccgagggcgccccgacggcggctgtggccgaggtgcgctgcccggggcccgcgccgctgcgcctgctggagtggagggtggcggcgggcgcggccgtgcgcatcggctcggtgctggccgtgttcgaggccgccgcctccgcgcagtcctccggggcctctcagtcccgtgtagcctccgggggctgcgtgcgccccgcgcggccggaacgcaggctgaggtcggagcgcgcgggcgtggtgcgggagctgtgcgcgcagccgggccaggtggtcgccccaggagcggttctggtgaggttggaaggatgcagccacccggttgtcatgaaaggcctgtgtgctgaatgtggccaagacctcacccagttgcagagtaagaacgggaagcagcaggtgccgctgtccacggcgaccgtgtccatggtgcacagcgtgccggagttgatggtgagctccgagcaagctgaacagctgggaagagaagaccagcagcgactgcaccgaaaccggaagctggtgctcatggtggacttggaccagacgttgattcacacaaccgagcagcactgtcagcagatgtcgaataaaggcatctttcacttccagctgggccggggtgagcccatgctgcacacgcgcctgcgtccacactgcaaggacttcctggagaagatcgccaagctgtacgagctgcacgtcttcaccttcggcagccggctgtacgcacacaccatcgcaggctttttagaccccgagaagaagcttttttctcaccgaatattatcaagggatgaatgtattgacccattttctaaaacgggaaaccttagaaatctctttccttgtggagactcaatggtttgcattattgatgatcgagaagatgtctggaagtttgcccccaatctgataactgtgaagaaatatgtatacttccagggcacgggtgatatgaatgcgccccctgggtcccgagaatctcagacgagaaagaaagtaaatcattctcgaggcactgaggtctcagagccatctccgcccgtgagagaccctgagggggtaacgcaggcccctggagtggagcccagcaatggcctggagaagcctgcacgggagctgaacggcagcgaggccgccaccccgcgggactcaccccgccccgggaagccagacgagagggacatctggccccctgcccaggcccccaccagcagccaagagctggcaggcgctcctgagccccagggatcctgtgcgcagggtggccgggtggcaccgggacagcggcctgcccagggtgccacgggcactgacctggactttgacttatccagcgacagcgagagcagcagtgagtccgagggcacgaagtcctcctcctccgcctctgatggcgaaagcgaggggaaaagaggccggcagaagccgaaggctgccccagagggagccggggcgctggcacagggcagttccctggagccggggcggcctgcagcaccgagtctccccggagaggccgagcctggcgcgcatgccccggacaaggagcctgagctgggtgggcaggaggagggcgagcgggatggcctctgcggcctgggcaacggctgtgccgacaggaaggaggcggagaccgagtcacagaacagcgagctgtcgggggtcactgcgggtgagtccctggaccagagcatggaggaggaggaggaggaggacacggatgaggatgaccacctcatctacctggaggagatcctggtccgtgtacacactgactactatgccaagtatgaccgctacctcaacaaggagatcgaggaggcgccggacatccgcaagatcgtgccggagctcaagagcaaggtgctggcagacgtggccataattttcagtgggctacacccgacaaacttcccgatagagaagacgcgggagcattaccacgccacggcgctgggagcgaagatcctcactcggctggtgctgagccccgacgcccctgacagggccacgcacctgatcgccgcgcgagctggcacagagaaggtgctgcaggcacaggagtgcggacacctgcacgtggtcaaccctgactggctgtggagctgcctggagcgctgggacaaggtggaggagcagctcttcccgctcagggacgatcacaccaaggcacagagggagaacagccctgcggcctttcccgaccgggagggtgtgccccccaccgccttgttccacccgatgccggttcttcccaaggcccagcctggccccgaggttcggatctacgactccaacacggggaagctcatcaggacgggcgcccgggggcccccagcaccctccagctccctacccatccgccaggagccctcttccttcagagcggttccgccaccccagccgcagatgtttggtgaagagctgcctgacgctcaggacggagagcagcctggcccttctagaagaaagcgacagcccagtatgtctgagacaatgccgctgtacactctttgtaaggaggatttagagagtatggacaaagaggtggacgacatccttggagaaggcagcgacgacagcgacagcgagaagaggaggcctgaggagcaggaggaggagccccagccccggaagccagggacccgcagggagcggacgctcggggcacctgcgtccagcgagaggagcgcggcagggggccgggggcccagaggccacaagaggaagctgaatgaagaggacgccgccagcgagtccagcagggagtccagcaacgaggatgagggcagcagctccgaggccgacgagatggccaaggcgctggaggcggagctcaacgacctcatgtgagcgcgggcagcgggcagggactgaagcctgaccgacctccagcagcactcggacgtccccggaccagccctcagtctcggtccacgctgctttcttcccaaaggacatgtatatttgcagagctccacatacagaaacacattattttgcagaaataggtgtttttaagaagttttactacaggaatgtctacttttgtaagtgacaggtgttaaaggcccaggtgtgctgtgccaaagagctcagcagaggctcacgtggcccaggctggtgcgcccgctgtctcggtaaggggcgggttggtgtgttttccccttgtgtaccagagcacattccttaggggacggctttgggggtcccacgagacatggactaggagtttaagcaggacagtgtgcgtgcacgagctccgagcccagcacagacatgcctggaacccccgccgcctgctgctccctcctagggaacccatttccggggaacgccgtgactgtcgggcagcctggagcttcctgcagcctcctacgcagggtccacgccacgtggcctgggctgccatcctgccgtcctcccactggcatcctggcaagggggcgttgcttttcctgggcggccttttatgtcttggagacacctgatgtaaagtttctgtaaatctatttcatatctgacccaccaaacagatttctctttaataaaaatcctttttgtaagttctct

SEQ ID NO: 6988 - DNA, 2638 bp, Homo sapiens
  source 1..2638: mol_type = unassigned DNA
cgcctagccgcgccggtcccagaagtggcgaaagccgcagccgagtccaggtcacgccgaagccgttgcccttttaagggggagccttgaaacggcgcctgggttccatgtttgcatccgcctcgcgggaaggaaactccatgttgtaacaaagtttcctccgcgccccctccctccccctcccccctagaacctggctcccctcccctccggagctcgcggggatccctccctcccacccctcccctcccccccgcgccccgattccggccccagccgggggggaggccgggcgcccgggccagagtccggccggagcggagcgcgcccggccccatggacagctcggccgtcattactcagatcagcaaggaggaggctcggggcccgctgcggggcaaaggtgaccagaagtcagcagcttcccagaagccccgaagccggggcatcctccactcactcttctgctgtgtctgccgggatgatggggaggccctgcctgctcacagcggggcgcccctgcttgtggaggagaatggcgccatccctaagcagaccccagtccaatacctgctccctgaggccaaggcccaggactcagacaagatctgcgtggtcatcgacctggacgagaccctggtgcacagctccttcaagccagtgaacaacgcggacttcatcatccctgtggagattgatggggtggtccaccaggtctacgtgttgaagcgtcctcacgtggatgagttcctgcagcgaatgggcgagctctttgaatgtgtgctgttcactgctagcctcgccaagtacgcagacccagtagctgacctgctggacaaatggggggccttccgggcccggctgtttcgagagtcctgcgtcttccaccgggggaactacgtgaaggacctgagccggttgggtcgagacctgcggcgggtgctcatcctggacaattcacctgcctcctatgtcttccatccagacaatgctgtaccggtggcctcgtggtttgacaacatgagtgacacagagctccacgacctcctccccttcttcgagcaactcagccgtgtggacgacgtgtactcagtgctcaggcagccacggccagggagctagtgagggtgatggggccaggacctgcccctgaccaatgatacccacacctcctcccaggaagactgcccaggcctttgttaggaaaacccatgggccgccgccacactcagtgccatggggaagcgggcgtctcccccaccagccccaccaggcggtgtaggggcagcaggctgcactgaggaccgtgagctccaggccccgtgtcagtgccttcaaacctcctcccctattctcaggggacctggggggccctgcctgctgctccctttttctgtctctgtccatgctgccatgtttctctgctgccaaattgggccccttggccccttccggttctgcttcctgggggcagggttcctgccttggacccccagtctgggaacggtggacatcaagtgccttgcatagagccccctcttccccgcccagctttcccaggggcacagctctaggctgggaggggagaaccagcccctccccctgccccacctcctcccttgggactgagagggcccctaccaacctttgcctctgccttggagggaggggaggtctgttaccactggggaaggcagcaggagtctgtccttcaggccccacagtgcagcttctccagggccgacagctgagggctgctccctgcatcatccaagcaatgacctcagacttctgccttaaccagccccggggcttggctcccccagctctgagcgtgggggcataggcaggaccccccttgtggtgccatataaatatgtacatgtgtatatagatttttaggggaaggagagagggaagggtcagggtagagacacccctcccttgcccctttcctgggcccagaagttggggggagggagggaaaggatttttacattttttaaactgctattttctgaatggaacaagctgggccaaggggcccaggccctgtcctctgtccctcacacccctttgctccgttcattcattcaaaaaaacatttcttgagcaccttctgtgcccagcatatgctaggcccaccagctaagtgtgtgtggggggtctctacgccagctcatcagtgcctccttgcccatccttcaccggtgcctttgggggatctgtaggaggtgggaccttctgtggggtttggggatctccaggaagcccgaccaagctgtccccttcccctgtgccaacccatctcctacagccccctgcctgatcccctgctggctgggggcagctcccaggatatcctgccttccaactgtttctgaagcccctcctcctaacatggcgattccggaggtcaaggccttgggctctccccagggtctaacggttaaggggacccacataccagtgccaagggggatgtcaagtggtgatgtcgttgtgctcccctcccccagagcgggtgggcggggggtgaatatggttggcctgcatcaggtggccttcccatttaagtgccttctctgtgactgagagccctagtgtgatgagaactaaagagaaagccagaccccta

SEQ ID NO: 6989 - DNA, 3065 bp, Homo sapiens
  source 1..3065: mol_type = unassigned DNA
cgggaggttcggagcgggagctcgggctcgcggacggtatggaggactacgagcaggagctgtgcggcgtcgaggatgatttccacaaccagttcgcggccgagctggaggtgctggcagagctggaaggggcgtcgactccgtcgccctccggggtccccctgttcaccgcgggccgacccccgcggacgttcgaggaggcccttgccagaggggacgcggcctccagtcccgccccagccgcatctgtgggcagcagccagggcggcgccaggaagaggcaggtggacgccgacctgcagccggccgggtccctgccccacgcccccaggatcaaacggcctaggctgcaggtggtcaagaggctgaacttcagatcggaggagatggaggagccgccccctcccgactcctcgccgacggacatcaccccgccgccgagccctgaggacctcgcagagctttggggccacggagtctcagaagctgctgccgacgtgggtctcacacgggcctcaccagctgcccgcaatcccgtcctgaggcggccccccatcttggaggactacgtccacgtgacatccacggagggcgtccgggcttatctggtgctgcgtgctgaccccatggccccgggggtgcagggctctctcctccacgtcccatggcgaggcggtggccagctggacctgctgggtgtgtccttagcctccctgaagaagcaggtcgacggcgagcggcgggagcggctgcttcaggaggcccagaagctttcagacaccctgcacagtctcaggtcgggggaggaggaggcagcccagcccttgggggcccctgaggaggagccgactgacggtcaagacgcctccagtcactgcctctgggtggatgagtttgcaccccgccactacacggagctgctcagtgatgacttcaccaaccgctgcctgctcaagtggctgaagttgtgggacctggtggtgtttggccacgagaggccttcccggaagcccaggcccagtgttgagccggcccgggtcagcaaggaggccacagccccaggcaagtggaagagccacgaacaggtgctggaggagatgctggaggctgggctggacccgagccagcgaccgaagcagaaggtggcactgctctgtgggcccccggggctggggaagaccaccctggcacacgtgattgcgcgtcacgcggggtactctgtggtggagatgaacgccagtgacgaccgtagcccggaggtcttccgcacacgcatcgaggcggccacccagatggagtcggtgctgggtgctggcgggaagcccaactgcctggtcatcgatgagatcgacggggcccccgtggccgccatcaacgtcctcctgagcatcctgaaccgcaaggggccacaggaggtggggccacagggcccggctgtgccttcgggaggcggccgacggcgccgggcagagggggggctcctcatgaggcccattatctgcatttgcaatgaccagttcgcaccgtccctgcggcagctgaagcagcaggccttcctgctccacttcccgccgactctgccctcgaggctggtgcagcggctccaggaggtctccctgcggcagggcatgagggccgacccaggggtgctggccgccctctgtgagaaaactgacaatgacatccgggcctgcatcaacaccctgcagttcctgtacagccggggccagcgggagctgagcgtgcgggacgtgcaggccacacgcgtgggcctcaaggaccagcgcagagggctcttctcggtgtggcaggaggtcttccagctgcctcgagcccagaggcgccgtgtgggccaggaccccgccctgcctgctgacacactcctgctgggtgacggggacgcgggctccctcacctccgcctcacagcgattctaccgtgtcctgcatgccgctgcctctgcgggcgagcacgagaaggtggtccagggcttgtttgacaacttcctgcgtctgcggctgcgagactccagcctgggtgctgtgtgtgtggccctcgactggctggccttcgatgacctgctggcgggggctgctcatcacagccagagcttccagctgctgcgctacccacccttcctgcccgtggccttccatgtgctgtttgcttccagccacacacccaggatcaccttccccagcagccagcaggaggcccagaaccggatgagccagatgaggaacctgatccagacgctggtgtccggcatcgcgccagccacgcgcagccgggccacgccccaggccctgctcctcgatgccctctgcctgctcctggacattcttgcacccaagctccgccccgtgagcacacagctgtacagcacccgtgaaaagcaacagctggccagcctggtgggcacgatgctcgcttacagcctgacctaccgccaggagcgcacgcccgatggccagtacatctacaggctggagccgaacgtggaggaactctgccgcttccctgagctgcctgcccgcaagcccctcacctaccagacgaagcagctcatcgcccgcgagatcgaggtggagaagatgcggcgggcggaggcttctgcccgggtagagaacagcccccaggtggatgggagccccccagggctcgagggtctgctggggggcattggggagaaaggggtgcaccgacctgccccacgcaaccatgagcagcggctggagcacatcatgaggcgagcggcccgggaggaacagcctgagaaggacttctttggacgtgtggtcgtcaggagcacagcagtcccgagtgcaggggacacggccccggagcaggactcagtggagcggcgcatgggcacagcggtgggcaggagcgaggtctggttccgcttcaacgagggtgtctccaacgccgtgcggcgcagcctgtacatcagggacttgctctagttctctgagccgcggacatgccctcgcattgcttcccgcagagtgcagagacaggaagctggagatgtctttataaagtcacacctttacagactgtaa

SEQ ID NO: 6990 - DNA, 3652 bp, Homo sapiens
  source 1..3652: mol_type = unassigned DNA
atgcacgtgaatgcctctgcccgacggtgggggcggggaggggctgcagcactaccaggcccggcagccagtccgcgcagacccgcgccccgcacaggcccggtgggcaggccgaccctggctccgagcccctcccgcgcccacgcccacgccaagaccaacctgctgccgggccgtgcagtccaggcccccgatgccgtgcccggcgccggctccagccgcgcgcccgcgcgctggcgacccagagaccctggaagctccgctccggacgcctggcagcgcttccgccctgcaccgctgcgcgcgcagccccgcccccccccccggcccgcccccggcccgcccccgccgcggaagggcggctgcggcggccaatggcgagctccccaggacaggacgcgggggctgcggagcaggaactcgccccgcccacccctcgcgcagccccgcctccgccacgccaaccaatggcgcgcgccgccgggcacgccggctgctgattggcggcgcccggcacgctcggggcgggcagtgcgcgacggcggcggcggcgcgggaggttcggagcgggagctcgggctcgcggacggtatggaggactacgagcaggagctgtgcggcgtcgaggatgatttccacaaccagttcgcggccgagctggaggtgctggcagagctggaaggggcgtcgactccgtcgccctccggggtccccctgttcaccgcgggccgacccccgcggacgttcgaggaggcccttgccagaggggacgcggcctccagtcccgccccagccgcatctgtgggcagcagccagggcggcgccaggaagaggcaggtggacgccgacctgcagccggccgggtccctgccccacgcccccaggatcaaacggcctaggctgcaggtggtcaagaggctgaacttcagatcggaggagatggaggagccgccccctcccgactcctcgccgacggacatcaccccgccgccgagccctgaggacctcgcagagctttggggccacgggttctcagaagctgctgccgacgtgggtctcacacgggcctcaccagctgcccgcaatcccgtcctgaggcggccccccatcttggaggactacgtccacgtgacatccacggagggcgtccgggcttatctggtgctgcgtgctgaccccatggccccgggggtgcagggctctctcctccacgtcccatggcgaggcggtggccagctggacctgctgggtgtgtccttagcctccctgaagaagcaggtcgacggcgagcggcgggagcggctgcttcaggaggcccagaagctttcagacaccctgcacaggtcgggggaggaggaggcagcccagcccttgggggcccctgaggaggagccgactgacggtcaagacgcctccagtcactgcctctgggtggatgagtttgcaccccgccactacacggagctgctcagtgatgacttcaccaaccgctgcctgctcaagtggctgaagttgtgggacctggtggtgtttggccacgagaggccttcccggaagcccaggcccagtgttgagccggcccgggtcagcaaggaggccacagccccaggcaagtggaagagccacgaacaggtgctggaggagatgctggaggctgggctggacccgagccagcgaccgaagcagaaggtggcactgctctgtgggcccccggggctggggaagaccaccctggcacacgtgattgcgcgtcacgcggggtactctgtggtggagatgaacgccagtgacgaccgtagcccggaggtcttccgcacacgcatcgaggcggccacccagatggagtcggtgctgggtgctggcgggaagcccaactgcctggtcatcgatgagatcgacggggcccccgtggccgccatcaacgtcctcctgagcatcctgaaccgcaaggggccacaggaggtggggccacagggcccggctgtgccttcgggaggcggccgacggcgccgggcagagggggggctcctcatgaggcccattatctgcatttgcaatgaccagttcgcaccgtccctgcggcagctgaagcagcaggccttcctgctccacttcccgccgactctgccctcgaggctggtgcagcggctccaggagggcatgagggccgacccaggggtgctggccgccctctgtgagaaaactgacaatgacatccgggcctgcatcaacaccctgcagttcctgtacagccggggccagcgggagctgagcgtgcgggacgtgcaggccacacgcgtgggcctcaaggaccagcgcagagggctcttctcggtgtggcaggaggtcttccagctgcctcgagcccagaggagcagccagcatgtctctgtcctgacgtgccatgggaccccaggggatgctggcctggtcgtgctgcaggatatgggagacgctggcctgggcctgtgggatgtgctgctcctggcctggacccggagggggactttccctgggcgattctaccgtgtcctgcatgccgctgcctctgcgggcgagcacgagaaggtggtccagggcttgtttgacaacttcctgcgtctgcggctgcgagactccagcctgggtgctgtgtgtgtggccctcgactggctggccttcgatgacctgctggcgggggctgctcatcacagccagagcttccagctgctgcgctacccacccttcctgcccgtggccttccatgtgctgtttgcttccagccacacacccaggatcaccttccccagcagccagcaggaggcccagaaccggatgagccagatgaggaacctgatccagacgctggtgtccggcatcgcgccagccacgcgcagccgggccacgccccaggccctgctcctcgatgccctctgcctgctcctggacattcttgcacccaagctccgccccgtgagcacacagctgtacagcacccgtgaaaagcaacagctggccagcctggtgggcacgatgctcgcttacagcctgacctaccgccaggagcgcacgcccgatggccagtacatctacaggctggagccgaacgtggaggaactctgccgcttccctgagctgcctgcccgcaagcccctcacctaccagacgaagcagctcatcgcccgcgagatcgaggtggagaagatgcggcgggcggaggcttctgcccgggtagagaacagcccccaggtggatgggagccccccagggctcgagggtctgctggggggcattggggagaaaggggtgcaccgacctgccccacgcaaccatgagcagcggctggagcacatcatgaggcgagcggcccgggaggaacagcctgagaaggacttctttggacgtgtggtcgtcaggagcacagcagtcccgagtgcaggggacacggccccggagcaggactcagtggagcggcgcatgggcacagcggtgggcaggagcgaggtctggttccgcttcaacgagggtgtctccaacgccgtgcggcgcagcctgtacatcagggacttgctctagttctctgagccgcggacatgccctcgcattgcttcccgcagagtgcagagacaggaagctggagatgtctttataaagtcacacctttacagactgt

SEQ ID NO: 6991 - DNA, 3150 bp, Homo sapiens
  source 1..3150: mol_type = unassigned DNA
gcgggaggttcggagcgggagctcgggctcgcggacggtatggaggactacgagcaggagctgtgcggcgtcgaggatgatttccacaaccagttcgcggccgagctggaggtgctggcagagctggaaggggcgtcgactccgtcgccctccggggtccccctgttcaccgcgggccgacccccgcggacgttcgaggaggcccttgccagaggggacgcggcctccagtcccgccccagccgcatctgtgggcagcagccagggcggcgccaggaagaggcaggtggacgccgacctgcagccggccgggtccctgccccacggtaggttggcggcattgccccagggcctccggagtgggcgcgaggctgaggaggcctctggttccctgcatgtgtctcccccagcccccaggatcaaacggcctaggctgcaggtggtcaagaggctgaacttcagatcggaggagatggaggagccgccccctcccgactcctcgccgacggacatcaccccgccgccgagccctgaggacctcgcagagctttggggccacggagtctcagaagctgctgccgacgtgggtctcacacgggcctcaccagctgcccgcaatcccgtcctgaggcggccccccatcttggaggactacgtccacgtgacatccacggagggcgtccgggcttatctggtgctgcgtgctgaccccatggccccgggggtgcagggctctctcctccacgtcccatggcgaggcggtggccagctggacctgctgggtgtgtccttagcctccctgaagaagcaggtcgacggcgagcggcgggagcggctgcttcaggaggcccagaagctttcagacaccctgcacagtctcaggtcgggggaggaggaggcagcccagcccttgggggcccctgaggaggagccgactgacggtcaagacgcctccagtcactgcctctgggtggatgagtttgcaccccgccactacacggagctgctcagtgatgacttcaccaaccgctgcctgctcaagtggctgaagttgtgggacctggtggtgtttggccacgagaggccttcccggaagcccaggcccagtgttgagccggcccgggtcagcaaggaggccacagccccaggcaagtggaagagccacgaacaggtgctggaggagatgctggaggctgggctggacccgagccagcgaccgaagcagaaggtggcactgctctgtgggcccccggggctggggaagaccaccctggcacacgtgattgcgcgtcacgcggggtactctgtggtggagatgaacgccagtgacgaccgtagcccggaggtcttccgcacacgcatcgaggcggccacccagatggagtcggtgctgggtgctggcgggaagcccaactgcctggtcatcgatgagatcgacggggcccccgtggccgccatcaacgtcctcctgagcatcctgaaccgcaaggggccacaggaggtggggccacagggcccggctgtgccttcgggaggcggccgacggcgccgggcagagggggggctcctcatgaggcccattatctgcatttgcaatgaccagttcgcaccgtccctgcggcagctgaagcagcaggccttcctgctccacttcccgccgactctgccctcgaggctggtgcagcggctccaggaggtctccctgcggcagggcatgagggccgacccaggggtgctggccgccctctgtgagaaaactgacaatgacatccgggcctgcatcaacaccctgcagttcctgtacagccggggccagcgggagctgagcgtgcgggacgtgcaggccacacgcgtgggcctcaaggaccagcgcagagggctcttctcggtgtggcaggaggtcttccagctgcctcgagcccagaggcgccgtgtgggccaggaccccgccctgcctgctgacacactcctgctgggtgacggggacgcgggctccctcacctccgcctcacagcgattctaccgtgtcctgcatgccgctgcctctgcgggcgagcacgagaaggtggtccagggcttgtttgacaacttcctgcgtctgcggctgcgagactccagcctgggtgctgtgtgtgtggccctcgactggctggccttcgatgacctgctggcgggggctgctcatcacagccagagcttccagctgctgcgctacccacccttcctgcccgtggccttccatgtgctgtttgcttccagccacacacccaggatcaccttccccagcagccagcaggaggcccagaaccggatgagccagatgaggaacctgatccagacgctggtgtccggcatcgcgccagccacgcgcagccgggccacgccccaggccctgctcctcgatgccctctgcctgctcctggacattcttgcacccaagctccgccccgtgagcacacagctgtacagcacccgtgaaaagcaacagctggccagcctggtgggcacgatgctcgcttacagcctgacctaccgccaggagcgcacgcccgatggccagtacatctacaggctggagccgaacgtggaggaactctgccgcttccctgagctgcctgcccgcaagcccctcacctaccagacgaagcagctcatcgcccgcgagatcgaggtggagaagatgcggcgggcggaggcttctgcccgggtagagaacagcccccaggtggatgggagccccccagggctcgagggtctgctggggggcattggggagaaaggggtgcaccgacctgccccacgcaaccatgagcagcggctggagcacatcatgaggcgagcggcccgggaggaacagcctgagaaggacttctttggacgtgtggtcgtcaggagcacagcagtcccgagtgcaggggacacggccccggagcaggactcagtggagcggcgcatgggcacagcggtgggcaggagcgaggtctggttccgcttcaacgagggtgtctccaacgccgtgcggcgcagcctgtacatcagggacttgctctagttctctgagccgcggacatgccctcgcattgcttcccgcagagtgcagagacaggaagctggagatgtctttataaagtcacacctttacagactgtaa

SEQ ID NO: 6992 - DNA, 2903 bp, Homo sapiens
  source 1..2903: mol_type = unassigned DNA
agtgctcgcggcggcggcgacggcggcgggaggttcggttgtcgcccgttggccgcgcggcgccgcgctcggcggccgccattgcagcttgttttcacttgctttttaaagacagaaagctcatggtgcaaattgttatttccagtgcgagggctggaggcctggcagaatgggtgctgatggagctacagggggagatcgaggctcgctacagcactggattagctggaaacctcctgggagacctacattacaccactgagggaatccctgtgctgatcgtggggcatcatatcctgtatgggaaaatcatccacctggagaaaccttttgcagtccttgtcaaacacactcctggggatcaggactgtgatgagcttggccgcgagactggcacccggtacctggtgacagcactcatcaaagacaagatccttttcaaaacccgccccaagcccattatcaccagcgtccccaagaaagtatgaaagaacctcggattttccctagagagcggccaactccttggactcgtgctccgctgccacctcgaggacggctcgacggttccctgggaccacaggggggtcctgttctgaacacaggccacccactgggtgtgaactcggatcccttccttatggcggccggttctcttggtggaaatctgaccccatttccaaggaacccatctccttttccagcttcatcaggctcattggcttcaaatccagcacctttcccggctggtgctcgtgacccaagtatggcttcttttccaagagggatgaatcccactggcacaggtgcagtttctttcccaaggcctggtggcctcttggggccaggcccaggcccaggccccaccctaaaccctaggacaggggctctgccaggcccagggcctctgtctaaccccaggttagggggtctcccaggaccaggtcctatgtccaacccaagggcaggtggtctcctgggagcaggtcctgaccccagaggtggtggtcccatgggccctggatctggacctaacctgagagccggtgttctgttaacctctgggaatggtcctcccaatcctaggccagttggcctgggcccaggaccaaaccccaatctgagatcaggctttttagggacaaaccctgcccccaggtcaggtgtgtttccaggcccaggccttgggcccaacccaagaccaagtggcctgggcccaggccctaatctagatgccagagcaggtggcctcttgggcacaggatctggtcttaacttaagaatggctggacctcaaggcctcgatcttgcccccattctaagagcagcaggtcttttaggagcaaattcagcttctttctcacaggcttctggaaacatgggcacaagcccatcctccatggcaagagtacctggccccatgggcccaaactcgggtcctagctctcggggaattggccttccagggccaaatccatctcccatgtcaagggctcctggccccataggccctaattcagctcatttctcaaggccagttggccccatgggggtaaatgccaatccctttcccaggggagcaggttcatctgccttttctcagtcttctggcacattggcatcaaacccagctaccttccaaaggtccgctggcctccagggctcaaatccaaccattttcccaagagcctctgggccacttggccccaacccagctaacttcccaagggccactggcctgcagggtccaagtccaactaccttcccaaggtctactggcccattaggccctggtcaagttactttccccaggccagctgccgggcatctgggcccttctccagctggccctgtgggtatcaacccagctcctttcacaaggccaactgggaccctgggtctcaacccagcttcctttccaaggatgaatggccctgcaggcaagagtttcgtcccatttcctagagtggggagcctccctggcacaaacccagctgctttccccagaccagggggtccaatggctgcaatgtacccaaatggaatgttgcccccttaaacaccattttccctccaggaccaccttggtttctaggcactgtggttcttggcaggggctgtcttaggtaaaagggtagttgtggagctacagtctgaagaacatagcttgggctcaagttcaaatgagccatctttttcctttgcgtttttcttgactgaaggtgagatgttatttgtggcatgtgaactgtggcaggtgggaataatcctgcccttgagagaaaggatctccagcctcccagaagcctgctgtgctttcgtcccacagctttctgcccattgtttcttactagtttcttgaattgttcttgtggacttttcctcagggatacattggcctgcaggtcccagttcacatgtagtcccctgctcaccattggagaatcagctcactgctctctagaaacgtggcgttggtgaacggaccatgcttccgtagctctgacctgggcagcttggacctggtcatcctctactgccatacctttccctgggggcttgaacacagaacagggagatggacaaccacttcaaagaaagacccaccgaatgcagtttctgcttgactgactgggcctgcagctcccttctcctgggacttagaggtggccagatttaaggcccctctactcatccaactccctcttcactggtactcccaatcaatcaaagaacctcaaaatttaaactgatgtggatgggaatatgggaattagggtgggggtgggggatgaagggaagaaatcactgtgctttgttcggcctggtgtgcaaggatggttggtggttttcctgcattgtatcttttcttactgtttctttaataaatgggatgagagggc

SEQ ID NO: 6993 - DNA, 1073 bp, Homo sapiens
  source 1..1073: mol_type = unassigned DNA
gggtggccgagcgcgggcggaggacggagaagggggcggcgagggccggaatctcgagcttgttttcacttgctttttaaagacagaaagctcatggtgcaaattgttatttccagtgcgagggctggaggcctggcagaatgggtgctgatggagctacagggggagatcgaggctcgctacagcactggattagctggaaacctcctgggagacctacattacaccactgagggaatccctgtgctgatcgtggggcatcatatcctgtatgggaaaatcatccacctggagaaaccttttgcagtccttgtcaaacacactcctggggatcaggactgtgatgagcttggccgcgagactggcacccggtacctggtgacagcactcatcaaagacaagatccttttcaaaacccgccccaagcccattatcaccagcgtccccaagaaagtatgaaagaacctcggattttccctagagagcggccaactccttggactcgtgctccgctgccacctcgaggacggctcgacggttccctgggaccacaggggggtcctgttctgaacacaggccacccactgggtgtgaactcggatcccttccttatggcggccggttctcttggtggaaatctgaccccatttccaaggaacccatctccttttccagcttcatcaggctcattggcttcaaatccagcacctttcccggctggtgctcgtgacccaagtatggcttcttttccaagagggatgaatcccactggcacaggtgcagtttctttcccaaggcctggtggcctcttggggccaggcccaggcccaggccccaccctaaaccctaggacaggggctctgccaggcccagggcctctgtctaaccccaggttagggggtctcccaggaccaggtcctatgtccaacccaagggcaggtggtctcctgggagcaggtcctgaccccagaggtggtggtcccatgggccctggatctggacctaacctgagagccggtgttctgttaacctctgggaatggtcctcccaatcctaggccagttggcctgggc

SEQ ID NO: 6994 - DNA, 2903 bp, Homo sapiens; identical to SEQ ID NO: 6992
  source 1..2903: mol_type = unassigned DNA

SEQ ID NO: 6995 - DNA, 2037 bp, Homo sapiens
  source 1..2037: mol_type = unassigned DNA
gaaactgaggcttcaagagggttcatagctaataattggcagagccagtgtttgaacccagatgagtttggtttgttgagatacatttatatcatctgtaatttttccttcttccaggtcaaagagtaaaatgaagtacattctggttactggtggtgttatatcaggaattggaaaaggaatcattgccagcagtgtgggcacaatactcaagtcatgtggtttacatgtaacttcaatcaaaattgacccctacattaacattgatgcaggaacattctctccttatgagcatggtgaggtttttgtgctggatgatggtggggaagtagaccttgacctgggtaactatgagcggttccttgacatccgcctcaccaaggacaataatctgaccactggaaagatataccagtatgtcattaacaaggaacggaaaggagattacttggggaaaactgtccaagttgtccctcatatcacagatgcaatccaggagtgggtgatgagacaggcgttaatacctgtagatgaagatggcctggaacctcaagtgtgtgttattgagcttggtggaaccgtgggggacatagaaagcatgccctttattgaggccttccgtcagttccaattcaaggtcaaaagagagaacttttgtaacatccacgtcagtctagttccccagccaagttcaacaggggaacagaagactaaacctacccagaatagtgttcgggaacttagaggacttgggctttccccagatctggttgtatgcaggtgctcaaatccacttgacacatcagtgaaggagaaaatatcaatgttctgccatgttgagcctgaacaagtgatctgtgtccacgatgtctcatccatctaccgagtccccttgttgttagaggagcaaggggttgtagattattttcttcgaagacttgaccttcctattgagaggcagccaagaaaaatgctgatgaaatggaaagagatggctgacagatatgatcgcttgctggagacctgctctattgcccttgtgggcaaatacacgaagttctcagactcctatgcctctgtcattaaggctctggagcattctgcactggccatcaaccacaaattggaaatcaagtacatagattctgcggacttggagcccatcacctcgcaagaagagcccgtgcgctaccacgaagcttggcagaagctctgtagtgctcatggagtgctggttccaggaggatttggtgttcgaggaacagaaggaaaaatccaagcaattgcctgggctcggaatcagaaaaagccttttttgggcgtgtgcttagggatgcagttggcagtggttgaattctcaagaaacgtgctgggatggcaagatgccaattctacagagtttgaccctacgaccagtcatcccgtggtcgtagacatgccagaacacaacccagggcagatgggcggaaccatgaggctgggcaagaggagaaccctgttccagaccaagaactcagtcatgaggaaactctatggagacgcagactacttggaagagaggcaccgccaccgatttgaggtgaatccagtctggaaaaagtgtttggaagaacaaggcttgaagtttgttggccaagatgttgaaggagagagaatggaaattgtggagttagaagatcatcccttttttgttggggttcagtaccaccctgagttcctgtccaggcctatcaagccctccccaccatactttggcctcctcctggcctctgtggggcggctctcacattacctccagaaaggctgcaggctctcacccagggacacctatagtgacaggagtggaagcagctcccctgactctgaaatcaccgaactgaagtttccatcaataaatcatgactgatcttgtagcggatgattcttcaagagacccttcaaacttgggtagagtttacagctctgactttacactcggctttggagactttctttaaattatgtttttattaagattattttattatgcggaaaggt

SEQ ID NO: 6996 - DNA, 3199 bp, Homo sapiens
  source 1..3199: mol_type = unassigned DNA
tccctcgcccggaggcagagatgcgctggcgcatcaccgccaggagcccacagtgaaagaccatcggatggaaggcgacgcccagaactccaggagaccgctgtgggaggacgcgaggccaggtgacgaataggccaggcgtgagttcccaaacagcctcctccccttcaagagagtaagcttgggccacaggctgggacggaagcagaggggcagacacgccaccacccgcccggcctcgaacctacggcggcacagttcagcggaggcggcccagcggtcctgtcccgcgcctgcgcactccaggccccgccccgccccgcgccctccaggcccggcccgccctccaacctctgcgtgcgcacagcctagagcccgcctccgtgaaagactgccgggcgcatgcggtcggggttgttcactggctgtccggggctccgcgcgcgtcgccggcccagctctgtcgctgacgggaggatctgaagccggccgcaggtcaaagagtaaaatgaagtacattctggttactggtggtgttatatcaggaattggaaaaggaatcattgccagcagtgtgggcacaatactcaagtcatgtggtttacatgtaacttcaatcaaaattgacccctacattaacattgatgcaggaacattctctccttatgagcatggtgaggtttttgtgctggatgatggtggggaagtagaccttgacctgggtaactatgagcggttccttgacatccgcctcaccaaggacaataatctgaccactggaaagatataccagtatgtcattaacaaggaacggaaaggagattacttggggaaaactgtccaagttgtccctcatatcacagatgcaatccaggagtgggtgatgagacaggcgttaatacctgtagatgaagatggcctggaacctcaagtgtgtgttattgagcttggtggaaccgtgggggacatagaaagcatgccctttattgaggccttccgtcagttccaattcaaggtcaaaagagagaacttttgtaacatccacgtcagtctagttccccagccaagttcaacaggggaacagaagactaaacctacccagaatagtgttcgggaacttagaggacttgggctttccccagatctggttgtatgcaggtgctcaaatccacttgacacatcagtgaaggagaaaatatcaatgttctgccatgttgagcctgaacaagtgatctgtgtccacgatgtctcatccatctaccgagtccccttgttgttagaggagcaaggggttgtagattattttcttcgaagacttgaccttcctattgagaggcagccaagaaaaatgctgatgaaatggaaagagatggctgacagatatgatcgcttgctggagacctgctctattgcccttgtgggcaaatacacgaagttctcagactcctatgcctctgtcattaaggctctggagcattctgcactggccatcaaccacaaattggaaatcaagtacatagattctgcggacttggagcccatcacctcgcaagaagagcccgtgcgctaccacgaagcttggcagaagctctgtagtgctcatggagtgctggttccaggaggatttggtgttcgaggaacagaaggaaaaatccaagcaattgcctgggctcggaatcagaaaaagccttttttgggcgtgtgcttagggatgcagttggcagtggttgaattctcaagaaacgtgctgggatggcaagatgccaattctacagagtttgaccctacgaccagtcatcccgtggtcgtagacatgccagaacacaacccagggcagatgggcggaaccatgaggctgggcaagaggagaaccctgttccagaccaagaactcagtcatgaggaaactctatggagacgcagactacttggaagagaggcaccgccaccgatttgaggtgaatccagtctggaaaaagtgtttggaagaacaaggcttgaagtttgttggccaagatgttgaaggagagagaatggaaattgtggagttagaagatcatcccttttttgttggggttcagtaccaccctgagttcctgtccaggcctatcaagccctccccaccatactttggcctcctcctggcctctgtggggcggctctcacattacctccagaaaggctgcaggctctcacccagggacacctatagtgacaggagtggaagcagctcccctgactctgaaatcaccgaactgaagtttccatcaataaatcatgactgatcttgtagcggatgattcttcaagagacccttcaaacttgggtagagtttacagctctgactttacactcggctttggagactttctttaaattatgtttttattaagattattttattatgcggaaaggtatttgggaaacttgtcacttgcatgtcccatcacgtgtactggctcctctgtggtgtctgcctgttgcgtgacactctccttgcagttcttgagttgcggcagaacatcgcgatgggaaccgatggtgggtggggctgcagagtgccccatcggtcaccttgtttctcaactacctcgcatcattgcagatgctagcgcgttgcctgtcgctttcccttggatacctagaccgttataaagtgtgccacatggacttaccgagcatggagagaggattttagctaggatttgaacacttggtgctgggaacctcagggtattgcttgccactaagccatgaaaccagagacaaaatctctatactgccctgagttggggggaattctcagtgccaactgtggctggtcctcattcaaagggacggtcagtttggtgtcaacatgaaacaccaagatgtctgtctctgaagcgtgattttaaaatccccatgcctgtggctgcgcttcctatttctagggctgggaaacactccttgcatcaaggggtcacttacagaacaaagaatcttttgggggaaacttcctctaaaaccctctcatatatagacagctttgactggagggtccatttttcttccaggatggtgttactgcagttgaaagggcaatatgaagttactttcttaatgtgacctagcaataggcatagctacgtggcactatattctggccagactcgatgtgtactctaacttaagaaataaatcagtaaggcagaacaaga

SEQ ID NO: 6997 - DNA, 1712 bp, Homo sapiens
  source 1..1712: mol_type = unassigned DNA
actggctgtccggggctccgcgcgcgtcgccggcccagctctgtcgctgacgggaggatctgaagccggccgcagccaagttcaacaggggaacagaagactaaacctacccagaatagtgttcgggaacttagaggacttgggctttccccagatctggttgtatgcaggtgctcaaatccacttgacacatcagtgaaggagaaaatatcaatgttctgccatgttgagcctgaacaagtgatctgtgtccacgatgtctcatccatctaccgagtccccttgttgttagaggagcaaggggttgtagattattttcttcgaagacttgaccttcctattgagaggcagccaagaaaaatgctgatgaaatggaaagagatggctgacagatatgatcgcttgctggagacctgctctattgcccttgtgggcaaatacacgaagttctcagactcctatgcctctgtcattaaggctctggagcattctgcactggccatcaaccacaaattggaaatcaagtacatagattctgcggacttggagcccatcacctcgcaagaagagcccgtgcgctaccacgaagcttggcagaagctctgtagtgctcatggagtgctggttccaggaggatttggtgttcgaggaacagaaggaaaaatccaagcaattgcctgggctcggaatcagaaaaagccttttttgggcgtgtgcttagggatgcagttggcagtggttgaattctcaagaaacgtgctgggatggcaagatgccaattctacagagtttgaccctacgaccagtcatcccgtggtcgtagacatgccagaacacaacccagggcagatgggcggaaccatgaggctgggcaagaggagaaccctgttccagaccaagaactcagtcatgaggaaactctatggagacgcagactacttggaagagaggcaccgccaccgatttgaggtgaatccagtctggaaaaagtgtttggaagaacaaggcttgaagtttgttggccaagatgttgaaggagagagaatggaaattgtggagttagaagatcatcccttttttgttggggttcagtaccaccctgagttcctgtccaggcctatcaagccctccccaccatactttggcctcctcctggcctctgtggggcggctctcacattacctccagaaaggctgcaggctctcacccagggacacctatagtgacaggagtggaagcagctcccctgactctgaaatcaccgaactgaagtttccatcaataaatcatgactgatcttgtagcggatgattcttcaagagacccttcaaacttgggtagagtttacagctctgactttacactcggctttggagactttctttaaattatgtttttattaagattattttattatgcggaaaggtatttgggaaacttgtcacttgcatgtcccatcacgtgtactggctcctctgtggtgtctgcctgttgcgtgacactctccttgcagttcttgagttgcggcagaacatcgcgatgggaaccgatggtgggtggggctgcagagtgccccatcggtcaccttgtttctcaactacctcgcatcattgcagatgctagcgcgttgcctgtcgctttcccttggatacctagaccgttataaagtgtgccacatggacttaccgagcatggagagaggattttagcta

SEQ ID NO: 6998 - DNA, 1232 bp, Homo sapiens
  source 1..1232: mol_type = unassigned DNA
cataatttggcttcacatggaacgttcctgaggaggaaaatgtcctgaccatgccaaagtcaaagagtaaaatgaagtacattctggttactggtggtgttatatcaggaattggaaaaggaatcattgccagcagtgtgggcacaatactcaagtcatgtggtttacatgtaacttcaatcaaaattgacccctacattaacattgatgcaggaacattctctccttatgagcatggtgaggtttttgtgctggatgatggtggggaagtagaccttgacctgggtaactatgagcggttccttgacatccgcctcaccaaggacaataatctgaccactggaaagatataccagtatgtcattaacaaggaacggaaaggagattacttggggaaaactgtccaagttgtccctcatatcacagatgcaatccaggagtgggtgatgagacaggcgttaatacctgtagatgaagatggcctggaacctcaagtgtgtgttattgagcttggtggaaccgtgggggacatagaaagcatgccctttattgaggccttccgtcagttccaattcaaggtcaaaagagagaacttttgtaacatccacgtcagtctagttccccagccaagttcaacaggggaacagaagactaaacctacccagaatagtgttcgggaacttagaggacttgggctttccccagatctggttgtatgcaggtgctcaaatccacttgacacatcagtgaaggagaaaatatcaatgttctgccatgttgagcctgaacaagtgatctgtgtccacgatgtctcatccatctaccgagtccccttgttgttagaggagcaaggggttgtagattattttcttcgaagacttgaccttcctattgagaggcagccaagaaaaatgctgatgaaatggaaagagatggctgacaggtttgcctgcaatgaggagctgggagtgctagcctcctttactcttttgtagggctggtgaagccgactctagccctagcacttttgtacttttgcacttctgccatccactcattagaagagcctttgtagtaagagatgttcagaaaggatcttagctgtcacgtagctgtggcacagatgaggagatcctgatagggccaggccaggtgccgggcctccagacaatgagttcgggttatgtcttaacacgcttgtctcttaccaactagatcagtgcagatgggcg

SEQ ID NO: 6999 - DNA, 3629 bp, Homo sapiens
  source 1..3629: mol_type = unassigned DNA
gggtgacgggagctgcctgtgctggaggaatcactttttaggcgcttgttttggaccattgcacaaacccgggtgcaaaccccaagctcaccagcgtgagtgagctgggccagcagcagggaggagaggggaaggtgggcgaggagggcgccgcgcaccccgaggcccgtgtgggcggtgggaagatcccgggggcggctttggacagccccggcagcgaccccttccccagcccgacaggtgagcgccaggccagccgcggggtggagcccgccgtgcccaccggccaccctccccggtgctaccaccaccgcgcagattatatctgggtgttggcacccagccactattctgccaatgaagtacatcctggtcacgggtggggtcatctcaggcattggtaaagggatcattgccagcagcattggaacgattctaaaatcatgtggactccgagttactgccataaaaatcgacccctatattaacatcgatgctggcactttttcaccttatgaacacggtgaagtcttcgtcttaaatgatggtggagaagttgatttagaccttggaaattatgaaagatttttggatattaatctttataaagacaacaatatcaccacggggaagatatatcagcatgtgatcaataaagagaggcgtggtgattacctggggaaaacagtgcaagttgtccctcacattactgatgctgtccaggagtgggttatgaatcaagccaaggtgccggtggatggtaataaggaagagccccaaatatgcgttattgagctgggaggcaccattggagacatcgaaggaatgccgtttgtggaggcgtttagacaattccagtttaaggcgaaaagagagaatttctgtaatatccacgttagccttgtcccacagctcagtgctaccggagaacaaaaaaccaaacccacccaaaacagcgtccgcgcactgaggggtttaggcctgtctccagatctgattgtctgccgaagttcaacgcccattgagatggccgtgaaggagaagatttctatgttttgtcacgtgaaccctgaacaggtcatatgtatccatgatgtttcttccacataccgagttcctgtgcttttagaggaacaaagcattgtgaaatattttaaggagagattgcacctgcccatcggtgattctgcaagtaatttgctttttaagtggagaaatatggctgacaggtatgaaaggttacagaaaatatgctccatagccctggttggcaaatacaccaagctcagagactgctacgcctctgtgttcaaagccctggaacactcagccctggccatcaaccacaagttgaatctgatgtacatagactccattgatctggagaagatcactgaaaccgaggaccctgtgaaatttcatgaagcttggcagaagctatgcaaagctgatggtattcttgtgcctggaggctttggaatcagaggaacattgggaaaactccaggcgatttcttgggcaaggacaaagaagattccttttctgggagtttgtcttgggatgcaactagcagtgatagagtttgcaagaaactgccttaacttgaaagatgctgattccacagagtttaggccaaatgccccagttcctctggtgattgatatgcccgagcacaaccctggcaatttgggaggaacaatgagactgggaataagaagaactgttttcaaaactgaaaattcaatattaaggaaactttatggtgatgttccttttatagaagaaagacacagacatcggttcgaggtaaaccctaacctgatcaaacaatttgagcagaatgacttaagttttgtaggtcaggatgttgatggagacaggatggaaatcattgaactggcaaatcatccttattttgttggtgtccagttccatcctgagttttcttctaggccgatgaagccttcccctccgtatctggggctgttacttgcagcaactgggaacctgaatgcctacttgcaacagggttgcaaactgtcttccagtgatagatacagtgatgccagtgatgacagcttttcagagccaaggatagctgagttggaaataagctgaaatgaatacatgactgggaataatggggactgcctgtgaggcctctgaaataattgaaggcaagatgaaggaactatctgaagaaatcactacactcttagagaatccctctgttctccagcaaacatgggatgtaaagcctcacagggaatctgataatacatacttctgtcaaccagaaccagaggggtagttttcttttccctccagaggcagcctttggtacttaaaatatctgtagctgattaaatttttcccaacaacctcactggggagaaagtgtgttcatgttttgtccagcggatcaggatgttaggatgacgagcaagagtccaggtcactgtgcctttgctgtgttgtatggaaaggatggcagggaacatgctgtaagtaattttgagtaagaaaatgagtcactgtgttacctggaactcagccacagatttgtgtgtggtccaagatcattgcagtttctcaccctgtttatttcctggtaaaagtaaaattgaataggtccaagacttgggggtggcaagtaaggctttgcctcaggcacaaaatttaagggggctccaaaaaactcaggaatcaagatcagcaatacagtctgagtatcccttatgtgaaatgcttggggctagaagtgttttgaatttcagattttggaatatttgcatatacatgcgatatcttggggatgagactcaagactaaacatgaaattcatttatgcttcatatacaccttatatacatagcctaaaggtaatttgatacaatattttaaataattttgtgcatgaaacaaagtttcgactgcattttgactgtgatttctggcatgagatcagttatggaattttccacttctagcgtcatgttggcattcagaaattttgaaattttggagcattttggattttcagattagggatgctcaacctgtatatatattttttaatcgacgtgaaattcacgtaacatagaattaaccattttgaagtgaacaatttggttgcattcactgatgttgagcaaccaccacctttaactatttccaaaacattttcatcactccaaaataaatgcctgtacacactagcagtcactccctatcttcccctccacctgtccgctggcaaccactgatctcctttttatttctgtggctttttctattctggatatttcatataagtggaattacacaatatatgtggtcttttgtgtctggcttcttctgagacagtaggaaggggggcttggctttggctcacccccactagagcattttttcatgcattcccactgatcacaaaacccatactactacctcattgacaccatacctgctaacctcgaggctttagtcatacaaagaaaatggcctttctgtattgttcttctgtgctctcataatgcttaaccatgtcttttacttaaacaattccaggaactggccttaggagatccaaatagggaaccaagattgcagagtgtcccatcttggga

SEQ ID NO: 7000 - DNA, 1787 bp, Homo sapiens
  source 1..1787: mol_type = unassigned DNA
aaaggcaggcattctctttccttttccttctctcctgagcgctcctgcagttcctggggcgtagtaggggatccacaagcgtttgtgaccagtgaagttctttacaagggtgagatctgcacgggaggacccgagcgagggtctcggcttgccaggaagccggggttccccgggaagcgtggagttcacccgcgcactcgaagtgcctttgcaaaattatatctgggtgttggcacccagccactattctgccaatgaagtacatcctggtcacgggtggggtcatctcaggcattggtaaagggatcattgccagcagcattggaacgattctaaaatcatgtggactccgagttactgccataaaaatcgacccctatattaacatcgatgctggcactttttcaccttatgaacacggtgaagtcttcgtcttaaatgatggtggagaagttgatttagaccttggaaattatgaaagatttttggatattaatctttataaagacaacaatatcaccacggggaagatatatcagcatgtgatcaataaagagaggcgtggtgattacctggggaaaacagtgcaagttgtccctcacattactgatgctgtccaggagtgggttatgaatcaagccaaggtgccggtggatggtaataaggaagagccccaaatatgcgttattgagctgggaggcaccattggagacatcgaaggaatgccgtttgtggaggcgtttagacaattccagtttaaggcgaaaagagagaatttctgtaatatccacgttagccttgtcccacagctcagtgctaccggagaacaaaaaaccaaacccacccaaaacagcgtccgcgcactgaggggtttaggcctgtctccagatctgattgtctgccgaagttcaacgcccattgagatggccgtgaaggagaagatttctatgttttgtcacgtgaaccctgaacaggtcatatgtatccatgatgtttcttccacataccgagttcctgtgcttttagaggaacaaagcattgtgaaatattttaaggagagattgcacctgcccatcggtgattctgcaagtaatttgctttttaagtggagaaatatggctgacaggtatgaaaggttacagaaaatatgctccatagccctggttggcaaatacaccaagctcagagactgctacgcctctgtgttcaaagccctggaacactcagccctggccatcaaccacaagttgaatctgatgtacatagactccattgatctggagaagatcactgaaaccgaggaccctgtgaaatttcatgaagcttggcagaagctatgcaaagctgatggtattcttgtgcctggaggctttggaatcagaggaacattgggaaaactccaggcgatttcttgggcaaggacaaagaagattccttttctgggagtttgtcttgggatgcaactagcagtgatagagtttgcaagaaactgccttaacttgaaagatgctgattccacagagtttaggccaaatgccccagttcctctggtgattgatatgcccgagcacaaccctggcaatttgggaggaacaatgagactgggaataagaagaactgttttcaaaactgaaaattcaatattaataagcttgtcccttgggctggcctcagtagaacacactgaatgcccctccgcatttgatctgcgtgactccctgttcattgggctgttttgtgagttaccgatgctcctggagatgaacttggactgggacttggactga

SEQ ID NO: 7001 - DNA, 3526 bp, Homo sapiens
  source 1..3526: mol_type = unassigned DNA
aaaggcaggcattctctttccttttccttctctcctgagcgctcctgcagttcctggggcgtagtaggggatccacaagcgtttgtgaccagtgaagttctttacaagggtgagatctgcacgggaggacccgagcgagggtctcggcttgccaggaagccggggttccccgggaagcgtggagttcacccgcgcactcgaagtgcctttgcaaaattatatctgggtgttggcacccagccactattctgccaatgaagtacatcctggtcacgggtggggtcatctcaggcattggtaaagggatcattgccagcagcattggaacgattctaaaatcatgtggactccgagttactgccataaaaatcgacccctatattaacatcgatgctggcactttttcaccttatgaacacggtgaagtcttcgtcttaaatgatggtggagaagttgatttagaccttggaaattatgaaagatttttggatattaatctttataaagacaacaatatcaccacggggaagatatatcagcatgtgatcaataaagagaggcgtggtgattacctggggaaaacagtgcaagttgtccctcacattactgatgctgtccaggagtgggttatgaatcaagccaaggtgccggtggatggtaataaggaagagccccaaatatgcgttattgagctgggaggcaccattggagacatcgaaggaatgccgtttgtggaggcgtttagacaattccagtttaaggcgaaaagagagaatttctgtaatatccacgttagccttgtcccacagctcagtgctaccggagaacaaaaaaccaaacccacccaaaacagcgtccgcgcactgaggggtttaggcctgtctccagatctgattgtctgccgaagttcaacgcccattgagatggccgtgaaggagaagatttctatgttttgtcacgtgaaccctgaacaggtcatatgtatccatgatgtttcttccacataccgagttcctgtgcttttagaggaacaaagcattgtgaaatattttaaggagagattgcacctgcccatcggtgattctgcaagtaatttgctttttaagtggagaaatatggctgacaggtatgaaaggttacagaaaatatgctccatagccctggttggcaaatacaccaagctcagagactgctacgcctctgtgttcaaagccctggaacactcagccctggccatcaaccacaagttgaatctgatgtacatagactccattgatctggagaagatcactgaaaccgaggaccctgtgaaatttcatgaagcttggcagaagctatgcaaagctgatggtattcttgtgcctggaggctttggaatcagaggaacattgggaaaactccaggcgatttcttgggcaaggacaaagaagattccttttctgggagtttgtcttgggatgcaactagcagtgatagagtttgcaagaaactgccttaacttgaaagatgctgattccacagagtttaggccaaatgccccagttcctctggtgattgatatgcccgagcacaaccctggcaatttgggaggaacaatgagactgggaataagaagaactgttttcaaaactgaaaattcaatattaaggaaactttatggtgatgttccttttatagaagaaagacacagacatcggttcgaggtaaaccctaacctgatcaaacaatttgagcagaatgacttaagttttgtaggtcaggatgttgatggagacaggatggaaatcattgaactggcaaatcatccttattttgttggtgtccagttccatcctgagttttcttctaggccgatgaagccttcccctccgtatctggggctgttacttgcagcaactgggaacctgaatgcctacttgcaacagggttgcaaactgtcttccagtgatagatacagtgatgccagtgatgacagcttttcagagccaaggatagctgagttggaaataagctgaaatgaatacatgactgggaataatggggactgcctgtgaggcctctgaaataattgaaggcaagatgaaggaactatctgaagaaatcactacactcttagagaatccctctgttctccagcaaacatgggatgtaaagcctcacagggaatctgataatacatacttctgtcaaccagaaccagaggggtagttttcttttccctccagaggcagcctttggtacttaaaatatctgtagctgattaaatttttcccaacaacctcactggggagaaagtgtgttcatgttttgtccagcggatcaggatgttaggatgacgagcaagagtccaggtcactgtgcctttgctgtgttgtatggaaaggatggcagggaacatgctgtaagtaattttgagtaagaaaatgagtcactgtgttacctggaactcagccacagatttgtgtgtggtccaagatcattgcagtttctcaccctgtttatttcctggtaaaagtaaaattgaataggtccaagacttgggggtggcaagtaaggctttgcctcaggcacaaaatttaagggggctccaaaaaactcaggaatcaagatcagcaatacagtctgagtatcccttatgtgaaatgcttggggctagaagtgttttgaatttcagattttggaatatttgcatatacatgcgatatcttggggatgagactcaagactaaacatgaaattcatttatgcttcatatacaccttatatacatagcctaaaggtaatttgatacaatattttaaataattttgtgcatgaaacaaagtttcgactgcattttgactgtgatttctggcatgagatcagttatggaattttccacttctagcgtcatgttggcattcagaaattttgaaattttggagcattttggattttcagattagggatgctcaacctgtatatatattttttaatcgacgtgaaattcacgtaacatagaattaaccattttgaagtgaacaatttggttgcattcactgatgttgagcaaccaccacctttaactatttccaaaacattttcatcactccaaaataaatgcctgtacacactagcagtcactccctatcttcccctccacctgtccgctggcaaccactgatctcctttttatttctgtggctttttctattctggatatttcatataagtggaattacacaatatatgtggtcttttgtgtctggcttcttctgagacagtaggaaggggggcttggctttggctcacccccactagagcattttttcatgcattcccactgatcacaaaacccatactactacctcattgacaccatacctgctaacctcgaggctttagtcatacaaagaaaatggcctttctgtattgttcttctgtgctctcataatgcttaaccatgtcttttacttaaacaattccaggaactggccttaggagatccaaatagggaaccaagattgcagagtgtcccatcttggga

SEQ ID NO: 7002 - DNA, 4319 bp, Homo sapiens
  source 1..4319: mol_type = unassigned DNA
tcctttgtccgctctctgatggcgccggctccctgcccagcgctgagtcgggtccggccgccagccccgcgctcgcagacctcggctgccgggtgtggcgcggggactggggaacgctggcccgtgcccagtgcggttggagcctgtcccgcgcgtccccgggacgcgcttcttcccgcctccgcccgcgccagcgcccgcacccggatccccacttctcccggccctcgggagccaggagagccctgagatggcgttggcggaagtgaagccccgagcgggggtctgcgaggctggtgatcagcgccggtaacatggcctttctgtcctctccccggtcccagtgcaccccttaaacaacgacccccgcgttttccccgtactagatggttagggcgcatagtgccgaactacgctgctgctacagaatagcttttttgggggcaacataaaaaagaattgtatgtatggtttatatacaacaaaatgtcccattttcagtgtgcaaatcgacgggatttgacaaattatacactcctgtaaccattatcccaaagtgaacattgaccatttccttcaccctgcaaagttccctggtacctcctttctgtcaatccaccccaggccccgcactcaaccccggttctgattgttatcatagcttagctttgactgttctagaacttcatagaacaagatcatcagattatatctgggtgttggcacccagccactattctgccaatgaagtacatcctggtcacgggtggggtcatctcaggcattggtaaagggatcattgccagcagcattggaacgattctaaaatcatgtggactccgagttactgccataaaaatcgacccctatattaacatcgatgctggcactttttcaccttatgaacacggtgaagtcttcgtcttaaatgatggtggagaagttgatttagaccttggaaattatgaaagatttttggatattaatctttataaagacaacaatatcaccacggggaagatatatcagcatgtgatcaataaagagaggcgtggtgattacctggggaaaacagtgcaagttgtccctcacattactgatgctgtccaggagtgggttatgaatcaagccaaggtgccggtggatggtaataaggaagagccccaaatatgcgttattgagctgggaggcaccattggagacatcgaaggaatgccgtttgtggaggcgtttagacaattccagtttaaggcgaaaagagagaatttctgtaatatccacgttagccttgtcccacagctcagtgctaccggagaacaaaaaaccaaacccacccaaaacagcgtccgcgcactgaggggtttaggcctgtctccagatctgattgtctgccgaagttcaacgcccattgagatggccgtgaaggagaagatttctatgttttgtcacgtgaaccctgaacaggtcatatgtatccatgatgtttcttccacataccgagttcctgtgcttttagaggaacaaagcattgtgaaatattttaaggagagattgcacctgcccatcggtgattctgcaagtaatttgctttttaagtggagaaatatggctgacaggtatgaaaggttacagaaaatatgctccatagccctggttggcaaatacaccaagctcagagactgctacgcctctgtgttcaaagccctggaacactcagccctggccatcaaccacaagttgaatctgatgtacatagactccattgatctggagaagatcactgaaaccgaggaccctgtgaaatttcatgaagcttggcagaagctatgcaaagctgatggtattcttgtgcctggaggctttggaatcagaggaacattgggaaaactccaggcgatttcttgggcaaggacaaagaagattccttttctgggagtttgtcttgggatgcaactagcagtgatagagtttgcaagaaactgccttaacttgaaagatgctgattccacagagtttaggccaaatgccccagttcctctggtgattgatatgcccgagcacaaccctggcaatttgggaggaacaatgagactgggaataagaagaactgttttcaaaactgaaaattcaatattaaggaaactttatggtgatgttccttttatagaagaaagacacagacatcggttcgaggtaaaccctaacctgatcaaacaatttgagcagaatgacttaagttttgtaggtcaggatgttgatggagacaggatggaaatcattgaactggcaaatcatccttattttgttggtgtccagttccatcctgagttttcttctaggccgatgaagccttcccctccgtatctggggctgttacttgcagcaactgggaacctgaatgcctacttgcaacagggttgcaaactgtcttccagtgatagatacagtgatgccagtgatgacagcttttcagagccaaggatagctgagttggaaataagctgaaatgaatacatgactgggaataatggggactgcctgtgaggcctctgaaataattgaaggcaagatgaaggaactatctgaagaaatcactacactcttagagaatccctctgttctccagcaaacatgggatgtaaagcctcacagggaatctgataatacatacttctgtcaaccagaaccagaggggtagttttcttttccctccagaggcagcctttggtacttaaaatatctgtagctgattaaatttttcccaacaacctcactggggagaaagtgtgttcatgttttgtccagcggatcaggatgttaggatgacgagcaagagtccaggtcactgtgcctttgctgtgttgtatggaaaggatggcagggaacatgctgtaagtaattttgagtaagaaaatgagtcactgtgttacctggaactcagccacagatttgtgtgtggtccaagatcattgcagtttctcaccctgtttatttcctggtaaaagtaaaattgaataggtccaagacttgggggtggcaagtaaggctttgcctcaggcacaaaatttaagggggctccaaaaaactcaggaatcaagatcagcaatacagtctgagtatcccttatgtgaaatgcttggggctagaagtgttttgaatttcagattttggaatatttgcatatacatgcgatatcttggggatgagactcaagactaaacatgaaattcatttatgcttcatatacaccttatatacatagcctaaaggtaatttgatacaatattttaaataattttgtgcatgaaacaaagtttcgactgcattttgactgtgatttctggcatgagatcagttatggaattttccacttctagcgtcatgttggcattcagaaattttgaaattttggagcattttggattttcagattagggatgctcaacctgtatatatattttttaatcgacgtgaaattcacgtaacatagaattaaccattttgaagtgaacaatttggttgcattcactgatgttgagcaaccaccacctttaactatttccaaaacattttcatcactccaaaataaatgcctgtacacactagcagtcactccctatcttcccctccacctgtccgctggcaaccactgatctcctttttatttctgtggctttttctattctggatatttcatataagtggaattacacaatatatgtggtcttttgtgtctggcttcttctgagacagtaggaaggggggcttggctttggctcacccccactagagcattttttcatgcattcccactgatcacaaaacccatactactacctcattgacaccatacctgctaacctcgaggctttagtcatacaaagaaaatggcctttctgtattgttcttctgtgctctcataatgcttaaccatgtcttttacttaaacaattccaggaactggccttaggagatccaaatagggaaccaagattgcagagtgtcccatcttgggagggaatgctgaataattaattgatttacagccttgttgccgctggccagaccaccaggtggcccattactcgagatgatcatcacaaccagatgatgctaacctatatcctctacccttcgcgtgctttgtctgggaagtcttttggccccatgtcagtttctattgcattgagagcccaagagcccctggtcagtcaggcttccatttagcatggcgtttgcaaggtttacccatgttgtagcatgtgtcagaatttcattcctttctatggctgaataaaattccattgtatgaatatacc

SEQ ID NO: 7003 - DNA, 733 bp, Homo sapiens
  source 1..733: mol_type = unassigned DNA
tgggaaaactccaggcgatttcttgggcaaggacaaagaagattccttttctgggagtttgtcttgggatgcaactagcagtgatagagtttgcaagaaactgccttaacttgaaagatgctgattccacagagtttaggccaaatgccccagttcctctggtgattgatatgcccgagcacaaccctggcaatttgggaggaacaatgagactgggaataagaagaactgttttcaaaactgaaaattcaatattaataagcttgtcccttgggctggcctcagtagaacacactgaatgcccctccgcatttgatctgcgtgactccctgttcattgggctgttttgtgagttaccgatgctcctggagatgaacttggactgggacttggactgattcacactcagttcttttgaatccacagttctctccattacatttgaaccggttccctgtttaatgtctgtttgcctggtcttagtgactcacaaatgaacttccgagtaggagggcagttatgcacctcagaagcgtatttctctgttccctggcagccccagtgtggggagatggctcgccatttgatatttgctgatctttccactccccataaggttaattctaatttctgtggaactttttcataaattagcatattatataagaataacttattgtttaaaacaaactaaagcctttaattcaatttaataaatgtatcttgagtgccc

SEQ ID NO: 7004 - DNA, 7071 bp, Homo sapiens
  source 1..7071: mol_type = unassigned DNA
ccccatccccacccccaagcgagcacctgcccctcccgggggcggagctccggcgcatcatggcggctggccgggcccaggtcccttcctccgaacaagcctggcttgaggatgctcaggtcttcatccaaaagaccctgtgtccagctgtcaaggagcctaatgtccagttgactccattggtaattgattgtgtgaagactgtctggttgtcccagggaaggaaccaaggttctacactgcccctcagctatagcttcgtctcagtacaggacctcaagactcaccagcgtctcccatgctgcagccacctgtcgtggagcagtagtgcataccaggcctgggcccaagaggctggaccaaatgggaaccccctgccccgagagcagctgttacttttagggacactaacagacctatcggcagacttggaacaagagtgcaggaacggaagcctctatgtgagagataacactggcgtcctgagctgtgagctcatagacctggacctttcttggttgggccatctttttctgttcccccgttggagttacctccctcctgccaggtggaattcctcaggggaagggcacttggagctgtgggatgcccctgtgccagtgtttcctttgaccatcagtcctggccccgtcacgcctatccctgtcctctacccagagagtgcttcctgcctgctcaggctcagaaacaagctcagaggtgtgcagcgaaacctggctgggagtctagttcgattgagtgctctggtgaaaagtaaacagaaagcttacttcatcctgtctcttggtagatcacacccagctgtcacccacgtgtccatcatcgtgcaggtccctgcccagctggtgtggcacagagcccttcggcctggtacagcctatgtgctgacagaactgcgagtgtccaagatccgtggtcagcgccagcatgtttggatgaccagtcagtcctcccgtctgttgctgctgaaaccagaatgtgtgcaggagctggaactggagctggaaggacccctcttagaggctgaccccaagccactccccatgcccagcaactcggaggacaagaaggatccagaaagtcttgtccggtattctagactcctatcctattcgggagcagtcactggcgtgttgaatgagcccgctggcctctatgagctggatgggcagctggggctctgccttgcctaccagcagttccgtggccttaggcgggtgatgcgacctggagtgtgtctgcagctccaggatgttcacctgctccagtcagtgggaggggggacaagaaggccagtgctcgccccctgcctccgtggcgccgttctgcttcaaagcttctctcgtcagaagcctggggctcactcatcccgtcaagcctacggggcctccctgtacgagcagctggtgtgggaacgtcagttaggacttcccctctacctgtgggctaccaaggccctggaggagctggcctgcaagctgtgtccccatgtgctgagacaccaccagttcctgcaacattcctctcctgggagccccagcctgggactgcaactcctggctcctaccctggatcttctagctccgccaggcagccctgttcggaatgcacacaatgagatccttgaagagccacatcactgtcccctccagaaatacactcggctgcagactccctcctccttccccactctggccaccctgaaagaagaaggacagcgtaaggcctgggcctcctttgaccctaaggcccttctgcccctcccggaggcctcctacctgcccagctgccaactcaatcgccgcctggcttggtcctggctctgtctgctgccctctgccttctgcccagcccaggttttacttggggttctggtggcttcatctcataaaggttgtctgcaacttcgggaccaaagtggttccctgccctgcctgctcctggccaagcactctcaacccctcagtgacccacggctgataggctgcctggtgcgggcagagaggtttcagttgatcgtagagagggacgtgagaagcagcttcccttcctggaaggagctgagcatgccaggcttcatccagaagcagcaggccagagtctatgtccagttctttctggctgatgccctgatcctgcctgtgcccagaccctgccttcattcagcaacaccctcaacacctcagacagatcccaccggcccagagggaccccacctaggacagagccggctcttcttgctctgccacaaggaggccctcatgaagcgtaatttttgtgtccccccaggagcaagtccagaggtgcccaagcccgccctcagtttctatgtgttggggagctggcttgggggcacccagaggaaggagggtactggatgggggctgcccgagccccagggaaatgacgacaatgatcagaaggttcacctcattttctttggctcttcagtccgctggtttgagttcttgcacccgggacaggtgtaccgactcatagctcctggccccgctacaccaatgttgtttgaaaaggatggttcatcctgcatatctcggcgtcctctggagttggctggctgtgcatcctgcctcactgtccaggacaactggactctggagcttgaaagctcccaggatatccaagatgtgctggatgcaaacaagtcattgcctgaatcctcactgaccgacctgctcagtgacaatttcacagattccttggtgtctttctccgctgagattttgtcacggacactatgtgaaccccttgtggcgtctctctggatgaaactggggaacacgggggccatgagaaggtgtgtgaagctaacagtcgctcttgagactgctgaatgtgaattcccccctcacctggatgtatatatagaagacccacacttgcctccctcactaggactacttccaggagcccgggtccacttcagccagttggagaaaagggtttccagatctcacaatgtttattgttgtttccggtcatccacttatgtgcaggtcctgagttttccccctgagaccaccatcagcattcccctgccccacatctacctggctgaacttctgcagggtggtcagtccccattccaggccactgcctcttgccatatcgtctctgtcttcagccttcagctcttctgggtgtgtgcttattgtaccagcatctgccggcagggaaagtgcactcgcctgggctccacttgccctacgcagacagctataagccaggccatcatcaggctcctggtggaggatgggactgccgaagccgtggtgacctgtaggaatcaccatgtggcagcagcactagggctgtgtcctagagagtgggcctccctcctagatttcgtccaagtgccaggcagagtggtcttgcagtttgcagggcctggagcccaacttgagtcttcagccagggttgacgagcccatgaccatgttcctctggacactttgtactagcccctctgtcctccgtcctattgtgctttcttttgagctggaaaggaaaccgtcgaagatcgtcccattagaacctcctcggctacagcgattccagtgtggagagctccctttcctgactcacgtgaaccccaggctccgattgtcctgcctttctatccgagagtcagagtactccagctctctggggatccttgcttcctcctgttaactgaactgcaaggatggcctgagagtccttccttgctgaaaacctgaaggcctaggtcctggctcctctccctacttgttctgtgattgaaccaaggactccagattcacaaactgctactccactataatttcccttctttggtgttctggtgccagcctgccttggcaaaattgtggcaacaggaaatcatggccctattaatatgtcctctgattgggacaaggcacctgcattcacaggcggccctgagcacctgggttctgactttgtcgcaggagctgagggaacaaaagacttgctcgctgtggggtgatggtgacaggcctattgacctgcaatgaagccctctggtgtcatttctcactggtactcatctctggggtcccaggcctcctgactcctagttgtccacctcctaggaactcctagtcgttcatcatcatttcagccctttgccgccagggccaaaggtggaaagtgatttggaagagaagagcttttcgtccagcagaagaaatggtaccaaaatcagtctgtaaaggaagtaaattggggagttggcggcaaggcagagagcatagctatgatggtctcagtcagtaaggctgggccctgcaggaagtcaaatatgaatgcctagaggtgttcacaagcacaaagaaggtgtagggggaggcaagtgccaggcacaagcaggggcaggtgaggactctgggtgactgtgctatagggccccaggctacggttagccctgtaggtttcccaagggcctggcctaaggcagatccttgatcgatataccttgagaccagaaggtgctccgaaatcacaaccgtacaattaggggatctaggaacaattctttggagataccaatgcctttggctggtgttgctgcatttctttactggggactgatagatggagaggtggaaagatgagctgaggcacatctttcagagctactgggaggccatttcttcctggctgttaggatttgttcgtgtttgggagacctttagagcgtggttaaacccatatgttgggatttatgctgcttttatggtagcaataccctatattaagatttgaagtagacccggaaagttagtggccggttagctcagttggttagagcgtggtgctaataacgccaaggtcgcgggttcgaaccccgtacgggccagtgggtggcttttttttgtgtgtgttttgttttctgaccctctgctgttatccggaagtttctacccggagccagttgccttctggtaacagaattatattgcacctactgcttcctattccctgaatcactagcgctcccgaaggcttggagggaggagtctctgggcacccgggtgaaaggaaggttcacgtgcaaccgccgcgtctttttttccctgaagcgctttcatggaggcagatgtttgtcagtcaagggaagtaagaaaggcattggatgaaaacgaagccctaagcctcgtagtcgtggccgagtggttaaggcgatggactagaaatccattggggtctccccgcgcaggttcgaatcctgccgactacgtcatatttttttcttcagcatactgaccatatttctctccaggatgggatgatccagtcggcaccctccaaacctctcatctaggaactctagaatcgagaatttgatttagagtctatgattttggtttgaaatctatgattaacgtctttggacattgaaggaaatccgaggaatggacaagtgatgcaagagccagttgagttaccaaattagttctagaaagatctgaaaaagctcggtccgggttcctagctctatattcttgtagatgaatttcaggaacctttatggcagcttcggcgccgtggcttagttggttaaagcgcctgtctagtaaacaggagatcctgggttcgaatcccagcggtgcctttattcaattgaaacagcgtgattttgcggctaaatccacatcctttcatgtattgtttttatatcagaacgcgtaagagtttctgttctgcactcatagcacccacatttcctgcagagtcaagctgccactcccatgagatcgccactctaaaaggtggttctctaacttaggggcagaaatgttgcataggcctaagggtcctttgcttaactgatgccacaccccactggtgcaggtggactgggtcaggcggccgccccaccctcgatggaaggggctgcccaccttccaggcctctttctccaccctaggacgtcccctagaacctgagccactttgttttgtttggctcttcattatagttctttgggtttggtggctcataatgttatatatatagtatataatataaaaatatatatttaaatatacagtatttaaaatttggcacagcttccagatgcggtcctctaactggtctttcacttgcagttacctccatccctctccaccagcgggatgtcagggtaaggagtaagcagggatccggctggcctggcctggcctggcaccaggtttcgtgcagcagggtgcagaagggctgaggccatgtgaacagagtccaagaaagcatcattcgggagtcgctagggatcctggtgtggaagggcagggcacttttctggagcactgaagctaggctggttaaggaagaaataaatgccagagataaggcaagaaataggatctgtgagctcttggcaggacctaaacctccttggaagataggcagaaagctctcgacaccattccatggcccacgaaccaatgtaagatgagcaaatggcttgaaggaattgctacctccaggtcaagccagggatgcagcactgccgagaccacgtttgtgccaagcactgggctggaccctgtgcagaaccaaatgaacaaggcacgttcccctttcagcactaacggcactgtaagaacagggagaagtggaatctaatctggcctgagggtagagggtgatcagctaagtctgaaacaccatgtagaaacttgccatgtatggccgggcgcggtggctcacgcctgtaatcccagcgctttgggaggccaaggtgggcggatcacgaggtcaggagttccagaccagcagcctggccaacatagtgaaacctggtaacatagtgaaacctcgtctctactaaaaatgcaaaaaattagccaggcgtggtggcaggcgcctgcagtcctagctacttgggaggctgaggcaagagaatcgcttcaaccttggaggggggaggaggtgttgtcagccgagatcgcgccactgcatcccagcctgggcaacaagagtgaaactccgtctcaaaaaaatgaaataaaataaacgaatgatc

SEQ ID NO: 7005 - DNA, 6901 bp, Homo sapiens
  source 1..6901: mol_type = unassigned DNA
ccccatccccacccccaagcgagcacctgcccctcccgggggcggagctccggcgcatcatggcggctggccgggcccaggtcccttcctccgaacaagcctggcttgaggatgctcaggtcttcatccaaaagaccctgtgtccagctgtcaaggagcctaatgtccagttgactccattggtaattgattgtgtgaagactgtctggttgtcccagggaaggaaccaaggttctacactgcccctcagctatagcttcgtctcagtacaggacctcaagactcaccagcgtctcccatgctgcagccacctgtcgtggagcagtagtgcataccaggcctgggcccaagaggctggaccaaatgggaaccccctgccccgagagcagctgttacttttagggacactaacagacctatcggcagacttggaacaagagtgcaggaacggaagcctctatgtgagagataacactggcgtcctgagctgtgagctcatagacctggacctttcttggttgggccatctttttctgttcccccgttggagttacctccctcctgccaggtggaattcctcaggggaagggcacttggagctgtgggatgcccctgtgccagtgtttcctttgaccatcagtcctggccccgtcacgcctatccctgtcctctacccagagagtgcttcctgcctgctcaggctcagatcacacccagctgtcacccacgtgtccatcatcgtgcaggtccctgcccagctggtgtggcacagagcccttcggcctggtacagcctatgtgctgacagaactgcgagtgtccaagatccgtggtcagcgccagcatgtttggatgaccagtcagtcctcccgtctgttgctgctgaaaccagaatgtgtgcaggagctggaactggagctggaaggacccctcttagaggctgaccccaagccactccccatgcccagcaactcggaggacaagaaggatccagaaagtcttgtccggtattctagactcctatcctattcgggagcagtcactggcgtgttgaatgagcccgctggcctctatgagctggatgggcagctggggctctgccttgcctaccagcagttccgtggccttaggcgggtgatgcgacctggagtgtgtctgcagctccaggatgttcacctgctccagtcagtgggaggggggacaagaaggccagtgctcgccccctgcctccgtggcgccgttctgcttcaaagcttctctcgtcagaagcctggggctcactcatcccgtcaagcctacggggcctccctgtacgagcagctggtgtgggaacgtcagttaggacttcccctctacctgtgggctaccaaggccctggaggagctggcctgcaagctgtgtccccatgtgctgagacaccaccagttcctgcaacattcctctcctgggagccccagcctgggactgcaactcctggctcctaccctggatcttctagctccgccaggcagccctgttcggaatgcacacaatgagatccttgaagagccacatcactgtcccctccagaaatacactcggctgcagactccctcctccttccccactctggccaccctgaaagaagaaggacagcgtaaggcctgggcctcctttgaccctaaggcccttctgcccctcccggaggcctcctacctgcccagctgccaactcaatcgccgcctggcttggtcctggctctgtctgctgccctctgccttctgcccagcccaggttttacttggggttctggtggcttcatctcataaaggttgtctgcaacttcgggaccaaagtggttccctgccctgcctgctcctggccaagcactctcaacccctcagtgacccacggctgataggctgcctggtgcgggcagagaggtttcagttgatcgtagagagggacgtgagaagcagcttcccttcctggaaggagctgagcatgccaggcttcatccagaagcagcaggccagagtctatgtccagttctttctggctgatgccctgatcctgcctgtgcccagaccctgccttcattcagcaacaccctcaacacctcagacagatcccaccggcccagagggaccccacctaggacagagccggctcttcttgctctgccacaaggaggccctcatgaagcgtaatttttgtgtccccccaggagcaagtccagaggtgcccaagcccgccctcagtttctatgtgttggggagctggcttgggggcacccagaggaaggagggtactggatgggggctgcccgagccccagggaaatgacgacaatgatcagaaggttcacctcattttctttggctcttcagtccgctggtttgagttcttgcacccgggacaggtgtaccgactcatagctcctggccccgctacaccaatgttgtttgaaaaggatggttcatcctgcatatctcggcgtcctctggagttggctggctgtgcatcctgcctcactgtccaggacaactggactctggagcttgaaagctcccaggatatccaagatgtgctggatgcaaacaagtcattgcctgaatcctcactgaccgacctgctcagtgacaatttcacagattccttggtgtctttctccgctgagattttgtcacggacactatgtgaaccccttgtggcgtctctctggatgaaactggggaacacgggggccatgagaaggtgtgtgaagctaacagtcgctcttgagactgctgaatgtgaattcccccctcacctggatgtatatatagaagacccacacttgcctccctcactaggactacttccaggagcccgggtccacttcagccagttggagaaaagggtttccagatctcacaatgtttattgttgtttccggtcatccacttatgtgcaggtcctgagttttccccctgagaccaccatcagcattcccctgccccacatctacctggctgaacttctgcagggtggtcagtccccattccaggccactgcctcttgccatatcgtctctgtcttcagccttcagctcttctgggtgtgtgcttattgtaccagcatctgccggcaggctcctggtggaggatgggactgccgaagccgtggtgacctgtaggaatcaccatgtggcagcagcactagggctgtgtcctagagagtgggcctccctcctagatttcgtccaagtgccaggcagagtggtcttgcagtttgcagggcctggagcccaacttgagtcttcagccagggttgacgagcccatgaccatgttcctctggacactttgtactagcccctctgtcctccgtcctattgtgctttcttttgagctggaaaggaaaccgtcgaagatcgtcccattagaacctcctcggctacagcgattccagtgtggagagctccctttcctgactcacgtgaaccccaggctccgattgtcctgcctttctatccgagagtcagagtactccagctctctggggatccttgcttcctcctgttaactgaactgcaaggatggcctgagagtccttccttgctgaaaacctgaaggcctaggtcctggctcctctccctacttgttctgtgattgaaccaaggactccagattcacaaactgctactccactataatttcccttctttggtgttctggtgccagcctgccttggcaaaattgtggcaacaggaaatcatggccctattaatatgtcctctgattgggacaaggcacctgcattcacaggcggccctgagcacctgggttctgactttgtcgcaggagctgagggaacaaaagacttgctcgctgtggggtgatggtgacaggcctattgacctgcaatgaagccctctggtgtcatttctcactggtactcatctctggggtcccaggcctcctgactcctagttgtccacctcctaggaactcctagtcgttcatcatcatttcagccctttgccgccagggccaaaggtggaaagtgatttggaagagaagagcttttcgtccagcagaagaaatggtaccaaaatcagtctgtaaaggaagtaaattggggagttggcggcaaggcagagagcatagctatgatggtctcagtcagtaaggctgggccctgcaggaagtcaaatatgaatgcctagaggtgttcacaagcacaaagaaggtgtagggggaggcaagtgccaggcacaagcaggggcaggtgaggactctgggtgactgtgctatagggccccaggctacggttagccctgtaggtttcccaagggcctggcctaaggcagatccttgatcgatataccttgagaccagaaggtgctccgaaatcacaaccgtacaattaggggatctaggaacaattctttggagataccaatgcctttggctggtgttgctgcatttctttactggggactgatagatggagaggtggaaagatgagctgaggcacatctttcagagctactgggaggccatttcttcctggctgttaggatttgttcgtgtttgggagacctttagagcgtggttaaacccatatgttgggatttatgctgcttttatggtagcaataccctatattaagatttgaagtagacccggaaagttagtggccggttagctcagttggttagagcgtggtgctaataacgccaaggtcgcgggttcgaaccccgtacgggccagtgggtggcttttttttgtgtgtgttttgttttctgaccctctgctgttatccggaagtttctacccggagccagttgccttctggtaacagaattatattgcacctactgcttcctattccctgaatcactagcgctcccgaaggcttggagggaggagtctctgggcacccgggtgaaaggaaggttcacgtgcaaccgccgcgtctttttttccctgaagcgctttcatggaggcagatgtttgtcagtcaagggaagtaagaaaggcattggatgaaaacgaagccctaagcctcgtagtcgtggccgagtggttaaggcgatggactagaaatccattggggtctccccgcgcaggttcgaatcctgccgactacgtcatatttttttcttcagcatactgaccatatttctctccaggatgggatgatccagtcggcaccctccaaacctctcatctaggaactctagaatcgagaatttgatttagagtctatgattttggtttgaaatctatgattaacgtctttggacattgaaggaaatccgaggaatggacaagtgatgcaagagccagttgagttaccaaattagttctagaaagatctgaaaaagctcggtccgggttcctagctctatattcttgtagatgaatttcaggaacctttatggcagcttcggcgccgtggcttagttggttaaagcgcctgtctagtaaacaggagatcctgggttcgaatcccagcggtgcctttattcaattgaaacagcgtgattttgcggctaaatccacatcctttcatgtattgtttttatatcagaacgcgtaagagtttctgttctgcactcatagcacccacatttcctgcagagtcaagctgccactcccatgagatcgccactctaaaaggtggttctctaacttaggggcagaaatgttgcataggcctaagggtcctttgcttaactgatgccacaccccactggtgcaggtggactgggtcaggcggccgccccaccctcgatggaaggggctgcccaccttccaggcctctttctccaccctaggacgtcccctagaacctgagccactttgttttgtttggctcttcattatagttctttgggtttggtggctcataatgttatatatatagtatataatataaaaatatatatttaaatatacagtatttaaaatttggcacagcttccagatgcggtcctctaactggtctttcacttgcagttacctccatccctctccaccagcgggatgtcagggtaaggagtaagcagggatccggctggcctggcctggcctggcaccaggtttcgtgcagcagggtgcagaagggctgaggccatgtgaacagagtccaagaaagcatcattcgggagtcgctagggatcctggtgtggaagggcagggcacttttctggagcactgaagctaggctggttaaggaagaaataaatgccagagataaggcaagaaataggatctgtgagctcttggcaggacctaaacctccttggaagataggcagaaagctctcgacaccattccatggcccacgaaccaatgtaagatgagcaaatggcttgaaggaattgctacctccaggtcaagccagggatgcagcactgccgagaccacgtttgtgccaagcactgggctggaccctgtgcagaaccaaatgaacaaggcacgttcccctttcagcactaacggcactgtaagaacagggagaagtggaatctaatctggcctgagggtagagggtgatcagctaagtctgaaacaccatgtagaaacttgccatgtatggccgggcgcggtggctcacgcctgtaatcccagcgctttgggaggccaaggtgggcggatcacgaggtcaggagttccagaccagcagcctggccaacatagtgaaacctggtaacatagtgaaacctcgtctctactaaaaatgcaaaaaattagccaggcgtggtggcaggcgcctgcagtcctagctacttgggaggctgaggcaagagaatcgcttcaaccttggaggggggaggaggtgttgtcagccgagatcgcgccactgcatcccagcctgggcaacaagagtgaaactccgtctcaaaaaaatgaaataaaataaacgaatgatc

SEQ ID NO: 7006 - DNA, 2685 bp, Homo sapiens
  source 1..2685: mol_type = unassigned DNA
acagtagcccggcggcccagggcaatccgaccacatttcactctcaccgctgtaggaatccagatgcaggccaagtacagcagcacgagggacatgctggatgatgatggggacaccaccatgagcctgcattctcaaggctctgccacaactcggcatccagagccccggcgcacagagcacagggctccctcttcaacgtggcgaccagtggccctgaccctgctgactttgtgcttggtgctgctgatagggctggcagccctggggcttttgttttttcagtactaccagctctccaatactggtcaagacaccatttctcaaatggaagaaagattaggaaatacgtcccaagagttgcaatctcttcaagtccagaatataaagcttgcaggaagtctgcagcatgtggctgaaaaactctgtcgtgagctgtataacaaagctggagcacacaggtgcagcccttgtacagaacaatggaaatggcatggagacaattgctaccagttctataaagacagcaaaagttgggaggactgtaaatatttctgccttagtgaaaactctaccatgctgaagataaacaaacaagaagacctggaatttgccgcgtctcagagctactctgagtttttctactcttattggacagggcttttgcgccctgacagtggcaaggcctggctgtggatggatggaacccctttcacttctgaactgttccatattataatagatgtcaccagcccaagaagcagagactgtgtggccatccttaatgggatgatcttctcaaaggactgcaaagaattgaagcgttgtgtctgtgagagaagggcaggaatggtgaagccagagagcctccatgtcccccctgaaacattaggcgaaggtgactgattcgccctctgcaactacaaatagcagagtgagccaggcggtgccaaagcaagggctagttgagacattgggaaatggaacataatcaggaaagactatctctctgactagtacaaaatgggttctcgtgtttcctgttcaggatcaccagcatttctgagcttgggtttatgcacgtatttaacagtcacaagaagtcttatttacatgccaccaaccaacctcagaaacccataatgtcatctgccttcttggcttagagataacttttagctctctttcttctcaatgtctaatatcacctccctgttttcatgtcttccttacacttggtggaataagaaactttttgaagtagaggaaatacattgaggtaacatccttttctctgacagtcaagtagtccatcagaaattggcagtcacttcccagattgtaccagcaaatacacaaggaattctttttgtttgtttcagttcatactagtcccttcccaatccatcagtaaagaccccatctgccttgtccatgccgtttcccaacagggatgtcacttgatatgagaatctcaaatctcaatgccttataagcattccttcctgtgtccattaagactctgataattgtctcccctccataggaatttctcccaggaaagaaatatatccccatctccgtttcatatcagaactaccgtccccgatattcccttcagagagattaaagaccagaaaaaagtgagcctcttcatctgcacctgtaatagtttcagttcctattttcttccattgacccatatttatacctttcaggtactgaagatttaataataataaatgtaaatactgtgaagtgtgtgtgattttacaatggacttatggttggtgggaaaattcagcatggaaatgcttttcaaaatatgatagcggtcattattttgattgtgccttactgaaagtttttggggaatttacaagagtactgattacatgattatctggagaaaataagatgtctttgaaatacgtgttggcttcaagaaaacagttttaacgttttcctaaaatgaaatcttttgaggtgagcttatggcatcaacacatggttgatgaggaagctgagttgcattagtgcacatgatttccagtcaggtcatgggaaatgaacagagacagtgacatctttgtagctgctcctttgtgaggcacttctttcttgagacgactccatgcacaaatataacagggatcattgggaatgacaccatcacagccaccaagtttattggtttactgataaatcaattttgagggttttatgctagaaaagataacattataaatctttgtttttcaacagtggaaactgaggtgcttcagttttgtttttcataaacatctatctcatggtaaaatgacgtatagtagcaatcatatgatagaaagaacacattggtgctcattttcataaacttcattttgttagattgtcacttagcaaagactattgcggattcttccttgagaactttcctttcaattttctgttgatttccttaaaattttcttcagggtcgagcaagttctgttgatatattgtgtcatgcaaagaaaactgtatttgtggttagaaaatgaagattttagacctcttattctgatttacttattaggcaagtcactttacttcatgaaacctatttcactgcatatgaagtagaaataattataatttcctcataatgttactgttagctgaaataaagtaaatgtgaaatca

SEQ ID NO: 7007 - DNA, 562 bp, Homo sapiens
  source 1..562: mol_type = unassigned DNA
aaagcgccttgggctcggctgtgctccagctcgcgctgctgaggtctggcctccgccagctgacttcaactgcaactgcaactcctcctcctcagccgccgcctcagggaacccaccgacccacaaaccagctcccgcaggggcggtgccgctgcctccttttcgttttctgtttttgtttttgttgtgttttttgtttttgttttgttttgtttttggagatgggatctcgctctgttgtccaggctggagtgcagtgacacaatctcagctcactgctgcctccgcctcccaggttcaagcgattctcctgcctcagcctcctgagtagctgggattacaggaatccagatgcaggccaagtacagcagcacgagggacatgctggatgatgatggggacaccaccatgagcctgcattctcaaggctctgccacaactcggcatccagagccccggcgcacagagcacagggctccctcttcaacgtggcgaccagtggccctgaccctgctgactttgtgcttggtgctgctgatagggctggcagccctggggcttt

SEQ ID NO: 7008 - DNA, 1442 bp, Homo sapiens
  source 1..1442: mol_type = unassigned DNA
atggtctctgtgtgttctaatccctgttcattctcatttactgtctaaagttgaggagatgggatgtcccagatgatagggctcctgggatttcagacccaagaccagcaggactccagtcacctctaccccagctctccaggacacagcgctcccaactctgagtgacgtcccacctctggtccttgcagcacaaccaacgtgggaatcacaccctccagacctcccacagctccaccccagactgggcgccggccctgcctccatttcagctgtgacaacctcagagccgtgttggcccaagcatgacaaggacgtatgaaaacttccagtacttggagaataaggtgaaagtccaggggtttaaaaatgggccacttcctctccagtccctcctgcagcgtctctgctctgggccctgccatctcctgctgtccctgggcctcggcctcctgctgctggtcatcatctgtgtggttggattccaaaattccaaatttcagagggacctggtgaccctgagaacagattttagcaacttcacctcaaacactgtggcggagatccaggcactgacttcccagggcagcagcttggaagaaacgatagcatctctgaaagctgaggtggagggtttcaagcaggaacggcaggcagttcattctgaaatgctcctgcgagtccagcagctggtgcaagacctgaagaaactgacctgccaggtggctactctcaacaacaatggtgaggaagcctccactgaagggacctgctgccctgtcaactgggtggagcaccaagacagctgctactggttctctcactctgggatgtcctgggccgaggctgagaagtactgccagctgaagaacgcccacctggtggtcatcaactccagggaggagcagaattttgtccagaaatatctaggctccgcatacacctggatgggcctcagtgaccctgaaggagcctggaagtgggtggatggaacagactatgcgaccggcttccagaactggaagccaggccagccagacgactggcaggggcacgggctgggtggaggcgaggactgtgctcacttccatccagacggcaggtggaatgacgacgtctgccagaggccctaccactgggtctgcgaggctggcctgggtcagaccagccaggagagtcactgagctgcctttggtgggaccacccggccacagaaatggcggtgggaggaggactcttctcacgacctcctcgcaagaccgctctgggagagaaataagcactgggagattggaagcactgctaacattttgaatttttttctctttaattttaaaaagatggtatagtgttcttaagcttttattttttttccaacttttgaaagtcaacttcatgaaggtataatttttacataataaaaatgcactcatttaaagagt

SEQ ID NO: 7009 - DNA, 1770 bp, Homo sapiens
  source 1..1770: mol_type = unassigned DNA
ggtctctgtgtgttctaatccctgttcattctcatttactgtctaaagttgaggagatgggatgtcccagatgatagggctcctgggatttcagacccaagaccagcaggactccagtcacctctaccccagctctccaggacacagcgctcccaactctgagtgacgtcccacctctggtccttgcagcacaaccaacgtgggaatcacaccctccagacctcccacagctccaccccagactgggcgccggccctgcctccatttcagctgtgacaacctcagagccgtgttggcccaagcatgacaaggacgtatgaaaacttccagtacttggagaataaggtgaaagtccaggggtttaaaaatgggccacttcctctccagtccctcctgcagcgtctctgctctgggccctgccatctcctgctgtccctgggcctcggcctcctgctgctggtcatcatctgtgtggttggattccaaaattccaaatttcagagggacctggtgaccctgagaacagattttagcaacttcacctcaaacactgtggcggagatccaggcactgacttcccagggcagcagcttggaagaaacgatagcatctctgaaagctgaggtggagggtttcaagcaggaacggcaggcaggggtatctgagctccaggaacacactacgcagaaggcacacctaggccactgtccccactgcccatctgtgtgtgtcccagttcattctgaaatgctcctgcgagtccagcagctggtgcaagacctgaagaaactgacctgccaggtggctactctcaacaacaatgcctccactgaagggacctgctgccctgtcaactgggtggagcaccaagacagctgctactggttctctcactctgggatgtcctgggccgaggctgagaagtactgccagctgaagaacgcccacctggtggtcatcaactccagggaggagcagaattttgtccagaaatatctaggctccgcatacacctggatgggcctcagtgaccctgaaggagcctggaagtgggtggatggaacagactatgcgaccggcttccagaactggaagccaggccagccagacgactggcaggggcacgggctgggtggaggcgaggactgtgctcacttccatccagacggcaggtggaatgacgacgtctgccagaggccctaccactgggtctgcgaggctggcctgggtcagaccagccaggagagtcactgagctgcctttggtgggaccacccggccacagaaatggcggtgggaggaggactcttctcacgacctcctcgcaagaccgctctgggagagaaataagcactgggagattggaagcactgctaacattttgaatttttttctctttaattttaaaaagatggtatagtgttcttaagcttttattttttttccaacttttgaaagtcaacttcatgaaggtataatttttacataataaaaatgcactcatttaaagagtagagatgactttgacaaatatgcatgcctaggtgactaccactccgatcgcaatagataacattgccatcgcccccaccagtcccctcatgcctctgggcagtccaaccacttccctgtttccaggccagtgatctacttctttttcactatttattggccttgcctcttctagagcttctagaacttcatataagtgaaatcatacactctcgtgtatatacttcatataagtgaatatatactctcgtgagaactt

SEQ ID NO: 7010 - DNA, 1698 bp, Homo sapiens
  source 1..1698: mol_type = unassigned DNA
ggtctctgtgtgttctaatccctgttcattctcatttactgtctaaagttgaggagatgggatgtcccagatgatagggctcctgggatttcagacccaagaccagcaggactccagtcacctctaccccagctctccaggacacagcgctcccaactctgagtgacgtcccacctctggtccttgcagcacaaccaacgtgggaatcacaccctccagacctcccacagctccaccccagactgggcgccggccctgcctccatttcagctgtgacaacctcagagccgtgttggcccaagcatgacaaggacgtatgaaaacttccagtacttggagaataaggtgaaagtccaggggtttaaaaatgggccacttcctctccagtccctcctgcagcgtctctgctctgggccctgccatctcctgctgtccctgggcctcggcctcctgctgctggtcatcatctgtgtggttggattccaaaattccaaatttcagagggacctggtgaccctgagaacagattttagcaacttcacctcaaacactgtggcggagatccaggcactgacttcccagggcagcagcttggaagaaacgatagcatctctgaaagctgaggtggagggtttcaagcaggaacggcaggcagttcattctgaaatgctcctgcgagtccagcagctggtgcaagacctgaagaaactgacctgccaggtggctactctcaacaacaatggtgaggaagcctccactgaagggacctgctgccctgtcaactgggtggagcaccaagacagctgctactggttctctcactctgggatgtcctgggccgaggctgagaagtactgccagctgaagaacgcccacctggtggtcatcaactccagggaggagcagaattttgtccagaaatatctaggctccgcatacacctggatgggcctcagtgaccctgaaggagcctggaagtgggtggatggaacagactatgcgaccggcttccagaactggaagccaggccagccagacgactggcaggggcacgggctgggtggaggcgaggactgtgctcacttccatccagacggcaggtggaatgacgacgtctgccagaggccctaccactgggtctgcgaggctggcctgggtcagaccagccaggagagtcactgagctgcctttggtgggaccacccggccacagaaatggcggtgggaggaggactcttctcacgacctcctcgcaagaccgctctgggagagaaataagcactgggagattggaagcactgctaacattttgaatttttttctctttaattttaaaaagatggtatagtgttcttaagcttttattttttttccaacttttgaaagtcaacttcatgaaggtataatttttacataataaaaatgcactcatttaaagagtagagatgactttgacaaatatgcatgcctaggtgactaccactccgatcgcaatagataacattgccatcgcccccaccagtcccctcatgcctctgggcagtccaaccacttccctgtttccaggccagtgatctacttctttttcactatttattggccttgcctcttctagagcttctagaacttcatataagtgaaatcatacactctcgtgtatatacttcatataagtgaatatatactctcgtgagaactt

SEQ ID NO: 7011 - DNA, 1549 bp, Homo sapiens
  source 1..1549: mol_type = unassigned DNA
tttgcagacatatgggtgattggtacagtaggtttataaacagaagtttaaacttgtaagcttaagcttccgtttataaacagaagtttaaaattataggtcctgtttaacattcagctctgttaactcactcatctttttgtgtttttacactttgtcaagatttctttacatattcatcaatgtctgaagaagttacttatgcagatcttcaattccagaactccagtgagatggaaaaaatcccagaaattggcaaatttggggaaaaagcacctccagctccctctcatgtatggcgtccagcagccttgtttctgactcttctgtgccttctgttgctcattggattgggagtcttggcaagcatgtttcacgtaactttgaagatagaaatgaaaaaaatgaacaaactacaaaacatcagtgaagagctccagagaaatatttctctacaactgatgagtaacatgaatatctccaacaagatcaggaacctctccaccacactgcaaacaatagccaccaaattatgtcgtgagctatatagcaaagaacaagagcacaaatgtaagccttgtccaaggagatggatttggcataaggacagctgttatttcctaagtgatgatgtccaaacatggcaggagagtaaaatggcctgtgctgctcagaatgccagcctgttgaagataaacaacaaaaatgcattggaatttataaaatcccagagtagatcatatgactattggctgggattatctcctgaagaagattccactcgtggtatgagagtggataatataatcaactcctctgcctgggttataagaaacgcacctgacttaaataacatgtattgtggatatataaatagactatatgttcaatattatcactgcacttataaaaaaagaatgatatgtgagaagatggccaatccagtgcagcttggttctacatattttagggaggcatgaggcatcaatcaaatacatttaaggagtgtagggggtgggggttctaggctataggtaaatttaaatattttctggttgacaattagttgagtttgtctgaagacctgggattttatcatgcagatgaaacatccaggtagcaagcttcagagagaatagactgtgaatgttaatgccagagaggtataatgaagcatgtcccacctcccactttccatcatggcctgaaccctggaggaagaggaagtccattcagatagttgtggggggccttcgaattttcattttcatttacgttcttccccttctggccaagatttgccagaggcaacatcaaaaaccagcaaattttaattttgtcccacagcgttgctagggtggcatggctccccatctcgggtccatcctatacttccatgggactccctatggctgaaggccttatgagtcaaaggacttatagccaattgattgttctaggccaggtaagaatggatatggacatgcatttattacctcttaaaattattattttaagtaaaagccaataaacaaaaacgaaaaggcaa

SEQ ID NO: 7012 - DNA, 699 bp, Homo sapiens
  source 1..699: mol_type = unassigned DNA
atgtctgaagaagttacttatgcagatcttcaattccagaactccagtgagatggaaaaaatcccagaaattggcaaatttggggaaaaagttcacgtaactttgaagatagaaatgaaaaaaatgaacaaactacaaaacatcagtgaagagctccagagaaatatttctctacaactgatgagtaacatgaatatctccaacaagatcaggaacctctccaccacactgcaaacaatagccaccaaattatgtcgtgagctatatagcaaagaacaagagcacaaatgtaagccttgtccaaggagatggatttggcataaggacagctgttatttcctaagtgatgatgtccaaacatggcaggagagtaaaatggcctgtgctgctcagaatgccagcctgttgaagataaacaacaaaaatgcattggaatttataaaatcccagagtagatcatatgactattggctgggattatctcctgaagaagattccactcgtggtatgagagtggataatataatcaactcctctgcctgggttataagaaacgcacctgacttaaataacatgtattgtggatatataaatagactatatgttcaatattatcactgcacttataaaaaaagaatgatatgtgagaagatggccaatccagtgcagcttggttctacatattttagggaggcatga

SEQ ID NO: 7013 - DNA, 1428 bp, Homo sapiens
  source 1..1428: mol_type = unassigned DNA
ggaagaacagcctttcaaatttgacttctgcatgtggatagatttctttacatattcatcaatgtctgaagaagttacttatgcagatcttcaattccagaactccagtgagatggaaaaaatcccagaaattggcaaatttggggaaaaagcacctccagctccctctcatgtatggcgtccagcagccttgtttctgactcttctgtgccttctgttgctcattggattgggagtcttggcaagcatgtttcacgtaactttgaagatagaaatgaaaaaaatgaacaaactacaaaacatcagtgaagagctccagagaaatatttctctacaactgatgagtaacatgaatatctccaacaagatcaggaacctctccaccacactgcaaacaatagccaccaaattatgtcgtgagctatatagcaaagaacaagagcacaaatgtaagccttgtccaaggagatggatttggcataaggacagctgttatttcctaagtgatgatgtccaaacatggcaggagagtaaaatggcctgtgctgctcagaatgccagcctgttgaagataaacaacaaaaatgcattggaatttataaaatcccagagtagatcatatgactattggctgggattatctcctgaagaagattccactcgtggtatgagagtggataatataatcaactcctctgcctgggttataagaaacgcacctgacttaaataacatgtattgtggatatataaatagactatatgttcaatattatcactgcacttataaaaaaagaatgatatgtgagaagatggccaatccagtgcagcttggttctacatattttagggaggcatgaggcatcaatcaaatacatttaaggagtgtagggggtgggggttctaggctataggtaaatttaaatattttctggttgacaattagttgagtttgtctgaagacctgggattttatcatgcagatgaaacatccaggtagcaagcttcagagagaatagactgtgaatgttaatgccagagaggtataatgaagcatgtcccacctcccactttccatcatggcctgaaccctggaggaagaggaagtccattcagatagttgtggggggccttcgaattttcattttcatttacgttcttccccttctggccaagatttgccagaggcaacatcaaaaaccagcaaattttaattttgtcccacagcgttgctagggtggcatggctccccatctcgggtccatcctatacttccatgggactccctatggctgaaggccttatgagtcaaaggacttatagccaattgattgttctaggccaggtaagaatggatatggacatgcatttattacctcttaaaattattattttaagtaaaagccaataaacaaaaacgaaaaggcaa

SEQ ID NO: 7014 - DNA, 261 bp, Homo sapiens
  source 1..261: mol_type = unassigned DNA
cacaaatgtaagccttgtccaaggagatggatttggcataaggacagctgttatttcctaagtgatgatgtccaaacatggcaggagagtaaaatggcctgtgctgctcagaatgccagcctgttgaagataaacaacaaaaatatattttcagttatcaaaaagaaaactgaaaaattcttttggctgggattatcatgggactcctctggcagaagttggttctgggaagatggctctgttccctctccatccttgtac

SEQ ID NO: 7015 - DNA, 570 bp, Homo sapiens
  source 1..570: mol_type = unassigned DNA
tttgcagacatatgggtgattggtacagtaggtttataaacagaagtttaaacttatttctttacatattcatcaatgtctgaagaagttacttatgcagatcttcaattccagaactccagtgagatggaaaaaatcccagaaattggcaaatttggggaaaaagcacctccagctccctctcatgtatggcgtccagcagccttgtttctgactcttctgtgccttctgttgctcattggattgggagtcttggcaagcatgtttcacgtaactttgaagatagaaatgaaaaaaatgaacaaactacaaaacatcagtgaagagctccagagaaatatttctctacaactgatgagtaacatgaatatctccaacaagatcaggaacctctccaccacactgcaaacaatagccaccaaattatgtcgtgagctatatagcaaagaacaagagcacaaatgtaagccttgtccaaggagatggatttggcataaggacagctgttatttcctaagtgatgatgtccaaacatggcaggagagtaaaatggcctgtgctgctcagaat

SEQ ID NO: 7016 - DNA, 1515 bp, Homo sapiens
  source 1..1515: mol_type = unassigned DNA
tggtacagtaggtttataaacagaagtttaaacttgtaagcttaagcttccgtttataaacagaagtttaaaattataggtcctgtttaacattcagctctgttaactcactcatctttttgtgtttttacactttgtcaagatttctttacatattcatcaatgtctgaagaagttacttatgcagatcttcaattccagaactccagtgagatggaaaaaatcccagaaattggcaaatttggggaaaaagcacctccagctccctctcatgtatggcgtccagcagccttgtttctgactcttctgtgccttctgttgctcattggattgggagtcttggcaagcatgtttcacgtaactttgaagatagaaatgaaaaaaatgaacaaactacaaaacatcagtgaagagctccagagaaatatttctctacaactgatgagtaacatgaatatctccaacaagatcaggaacctctccaccacactgcaaacaatagccaccaaattatgtcgtgagctatatagcaaagaacaagagcacaaatgtaagccttgtccaaggagatggatttggcataaggacagctgttatttcctaagtgatgatgtccaaacatggcaggagagtaaaatggcctgtgctgctcagaatgccagcctgttgaagataaacaacaaaaatgcattggaatttataaaatcccagagtagatcatatgactattggctgggattatctcctgaagaagattccactcgtggtatgagagtggataatataatcaactcctctgcctgaaaatatcaaacgaagaaagaaaccagagtctcaacctgctggacactattggaagtccatcatttaacacgtttttagtatatacttttagcaggagacagctctgagtcaactgtgttgaggtgccaccacagcgagtttaggcactcagatccctgcatactcatcacattgggccataatggcaaatagaattttttgttttgttttgtttgtttgctttttctttcacatagaaatagtaagtgtaggagtgtgggtcagaaagaaaaggtggccctacctctgatggttggcaatgataggatacaatgggagataagctatctacaaatggagtggagaaggatatatatttcaaaggcctaatttgtagtgaaagactagagacaaaggtaatgtgtgtgtcaggagagagtacagatggaatcttgttttgcaaacgtagaatatgtatgtgtttgtaattattgcaaatggaatggtaatctataatggaatggaaaacattgtagatattttcagttatcaaaaagaaaactgaaaaagtatataataattgtatgtatgatatatatatgtgtgtgtgtgtgtatatatatcttcactttataactctgtgttgttttggggtttgtttctgaaagggggttgtaataaatgacatctgtactatgtcaccacaaataaatctcattcttaaacatttaa

SEQ ID NO: 7017 - DNA, 4203 bp, Homo sapiens
  source 1..4203: mol_type = unassigned DNA
ttctacgaccaggggcgccggggcagcagcgaccccacagtgcagcgctccgtgtttgcatcggtggacaaggtgccaggcttcgccgtggcccagtgcataaaccagcacagctccccgtccctgtcctcacagtcgccaccctccgccagcgggagccccagcggcagcgggagcaccagccactgcgactctggaggcaccagctcgtcctccaccccctccacagcccagagtccagcagtcaggagtggcaggaaaggacgccgacgagtgttcagcctgtcggaggccgacagtcatggcggccactgggtttagtgctccgaacggcagctgccacggcacctcacgcacagtcaattcagatgcccccatgagtccagaactgcctaagcctcaccttcctgaccagttggtaatcgtcaacgaaacggaagcagactctaagcccagcaagaacgtggccaggagcgcagccgtggagacagccagcctgtcccccagcctcgtccctgcccggcagcccaccatttccctgctctgcgaggacacggctgacacgctgagcgtcgaatcgctgacccttgtccccccagttgacccccacagcctccgcagcctcaccggcatgcccccgctgtccacgccggctgccgcctgcacagagcccgtgggcgaagaggctgcatgtgctgagcctgtgggcaccgctgaggactgagtcagtgccggggcctccctttgtgtgtgtggccccgctggtagggaccccagtgccgctgactggcaagacacactgggagcacccaccattctgtgcggcccccagcagccatctcaaccacctatccctgcgctcccttgaatgggaagaagccccacgttgtccttgaattcctttttcactttgcatctcttcacgtgcaggctgggaccagcggagacaccgcggcgaatgcagatgactgcaccggccactcagggagctgcctgggctccgtgtctctgagccccgggtggcaggacccaccggcacctctttcttcctctgtcatatggctcctctgtcaccagccccagtgtgcacagaagaattggaccaggtcactgtacgtagaaatttgtagaaaagcagacttagataaacatctcctttggatatttatttccgcttttggcagcaggtgaacatttatttttaaaacttctatttaaaagaagtccaaaaacatcaacactaaggtttgatgtcatgtgaaaagtgtaataataacagttaagatttcatgatcattttcactggacctttcctgatattttgtttcagagttcttagtgtggctttttccatttatttaagtgattctttgttactcactaactctgcaagcctgtggaataatgaagtaccttcctggaaagtttggattattttttaaacaaaaacaagggagatacatgtattctcaggtacacacagagctgagagggctgaatggttttctgctatagcagccgagaggcctcccatcatggaaagatttctccaggaaaaggaggaatgtagccagctccccactcaggacgcttcctcatttctcttcaccaaaaccaaacagagacagcttccagcaccttcttcagtgttaccatctctaagaaggaaccagttgggaccgtgaagactcccgaccctgtggccatgatggaaatcaaaggaagacaccctctacgtcacctgccctcgactgtgtgtgcccacatgtgccgagagatggcccagagccagttcccctccagctgcaagggcatggtgtccccagagctctgagtctgtcactctccctctgctactgctgctgatctgaatatggaaaccccatggttcccttccccattcggactgggtgtgtacaagcaaggacccagatgcatcagacacagcccccaagatgttcctttctactcggccagctcgggagccagacacagcactcacagcccaggccgtgatccaccctccccaagtccaccagggccagcggcccctcacctctctggtcactggtgagaccttccacaactttcctccagacctgccagcagatgtgcccaccaggggcattaggtatccgccggagcctggccatagggtagtctcgggagccgcgctgagatcttttgccacctgcattttagaagaacatggtctctgtctcctcggcccagccagctgtcccggcaaggcctgccgagggcagttttcaacctcatgaaggaaacacagtcctgccaaggagggggagtggcgcccatggggacaggcctcagtccttagaagccctctgggtagctgtgcccacccagccttcatggctgcaggtacaaggacctttgcttccatagagaaaacgcacagctcagaaagggggccacatgggcagaaacccaaaggaaggacaaaccacgaccaccgtggccatctgcagaatccctggaagagaaggaaggcagggtggagcggggggaagaccatcatggagagaaggaccacagcatcaggagacgggacacgccacacccagcaggcagcctgtgtgttgcttaattttttaagagcaagaggggtagagaggatcaagctggccctggctggagatggctagcccctgagacatgcacttctggttttgaaatgactctgtctgtggggcagcagaaactagagaaggcaagtggctgccccaccccaaggcgtgaccaggaggaacagcctgcagctcactccatgccacacgggtgggccaccagcctgctgtcagaagtctctgggctccaactggtcttgtaaccactgagcactgaaggagagaggtcttggtcagggctggacagcatgcccgggaggaccagcagaggattaaaggtgactgggaggaccagcggaggataaaagacactgctcagggcagggcttctaccctgcatccctggccaagaaaagggcagtccccatgtgggcttgcagggtcactctcaggggcctctttcagctggggctggcaacttgcgtctgggggacacctccaggtgtgtggggtgaggatttcctataaccagggctcccagaagctttgcttatgtaaggaggtctgggagccagcccattggaggccaccagccattttggcttcaaaggaccccacctcacccaggtctcagcggcagtgggcacagctatgtcttcaggagctcccgtcaaacctcatagctggggcgctcccagacaggccagtccagacaggacacgctgggcccctggcatccagaggaagagccaggagtgtgggaaggcccacagtgggggctgtggcttctgacactcaggtcatagcctcagaggtctgaggtcagcccccacagacccatccggcccgccccccaagtccctgcagagagcacttagagttatggcccaggccctggtccacccttcccctgtgcacctccggctgggtttgccaagtcagggagcagggctggccgcaggaactcccaaaccttggctttgaatattgttgtggaggtgtgctcgtccctttctggacgtgcaaggtacctgtcccagcaggtcagatggggccagctgaggcgctcccccaggcaggaagggccagccttcaccatcgcgtgggattgggaggaggggcctccgtgagcagcccctcctctgccgctgtcccagcccagtccctctcccggagccttggcagcctcccacaacccagacacttgcgttcacaagcaacctaaggggcaggtgaagaagcgcagccctgccagacgcgctagattcctctaaggtctctgagatgcaccgttttttaaaaaggcgtggggtgaactgattttgatcttcttgtctagatgcaataaataaatctgaagcatttaatgtagtcatcttgacattgggcctacactgtacgagttccttatgtttccttgagctaaaaatatgtaaataatttttgtcccagtgagaaccgagggttagaaaacctcgatgcctctgagcctcgggaccgctctagggaagtacctgctttcgccagcatgactcatgcttcgtgggtactgaacacgagggtggaaatgaaaactggaacttccttgtaaatttaaacttggcaataaaag

SEQ ID NO: 7018 - DNA, 2922 bp, Homo sapiens
  source 1..2922: mol_type = unassigned DNA
cggggaggaaggcggctcgcggttcctccaccgcctccgccgccgcatcctccgcttgtgctaccgccgcgggcgctgggccgctctgctggtccggcatgagaccgtgagacgagagacgggtcggggccgccgacatgtttggccgctcgcggagctgggtgggcgggggccatggcaagacttcccgcaacatccactccttggaccacctcaagtatctgtaccacgttttgaccaaaaacaccacagtcacagaacagaaccggaacctgctagtggagaccatccgttccatcactgagatcctgatctggggagatcaaaatgacagctctgtatttgacttcttcctggagaagaatatgtttgttttcttcttgaacatcttgcggcaaaagtcgggccgttacgtgtgcgttcagctgctgcagaccttgaacatcctctttgagaacatcagtcacgagacctcactttattatttgctctcaaataactacgtaaattctatcatcgttcataaatttgacttttctgatgaggagattatggcctattatatatcgttcctgaaaacactttcgttaaaactcaacaaccacactgtccatttcttttataatgagcacaccaatgactttgccctgtacacagaagccatcaagtttttcaaccaccctgaaagcatggttagaattgctgtaagaaccataactttgaatgtctataaagtggataaccaggccatgctgcactacatccgagataaaactgctgttccttacttctccaatttggtctggttcattgggagccatgtgatcgaactcgatgactgcgtgcagactgatgaggagcatcggaatcggggtaaactgagtgatctggtggcagagcacctagaccacctgcactatctcaatgacatcctgatcatcaactgtgagttcctcaacgatgtgctcactgaccacctgctcaacaggctcttcctgcccctctacgtgtactcactggagaaccaggacaagggaggagaacggccgaaaattagcctgccggtgtctctttatcttctgtcacaggtcttcttaattatacatcatgcaccgctggtgaactcgttagctgaagtcattctgaatggtgatctgtctgagatgtacgctaagactgaacaggatattcagagaagttctgccaagcccagcattcggtgcttcattaaacccaccgagacactcgagcggtcccttgagatgaacaagcacaagggcaagaggcgggtgcaaaagagacccaactacaaaaacgttggggaagaagaagatgaggagaaagggcccaccgaggatgcccaagaagacgccgagaaggctaaagagatcgagatggtgatcatggagcgtagcaagctctcagagctggccgccagcacctccgtgcaggagcagaacaccacggacgaggagaaaagcgccgccgccacctgctctgagagcacgcaatggagcagacccttcctggatatggtgtaccacgcgctggacagcccggatgatgattaccatgccctgttcgtgctctgcctcctctatgccatgtctcataataaaggcatggatcctgaaaaattagagcgaatccagctccccgtgccaaatgcggccgagaagaccacctacaaccacccgctagctgaaagactcatcaggatcatgaacaacgctgcccagccagatgggaagatccggctggcgacgctggagctgagctgcctgcttctgaagcagcaagtcctgatgagtgctggctgcatcatgaaggacgtgcacctggcctgcctggagggtgcgagagaagaaagtgttcaccttgtacgacatttttataagggagaagacatttttttggacatgtttgaagatgagtataggagcatgacaatgaagcccatgaacgtggaatatctcatgatggacgcctccatcctgctgcccccaacaggcacgccactgacgggcattgacttcgtgaagcggctgccgtgtggcgatgtggagaagacccggcgggccatccgggtgttcttcatgctgcgttccctgtcactgcaattgcgaggggagcctgagacacagttgccgctgactcgggaggaggacctgatcaagactgatgatgtcctggatctgaataacagcgacttgattgcatgtacagtgatcaccaaggatggcggcatggtccagcgattcctggctgtggatatttaccagatgagtttggtggagcctgatgtgtccaggcttggctggggagtggtcaagtttgcaggcctattgcaggacatgcaggtgactggcgtggaggacgacagccgtgccctgaacatcaccatccacaagcctgcgtccagcccccattccaagcccttccccatcctccaggccaccttcatcttctcagaccacatccgctgcatcatcgccaagcagcgcctggccaaaggccgcatccaggcaaggcgcatgaagatgcagagaatagctgccctcctggacctcccaatccagcccaccactgaagtcctggggtttggactcggctcctccacctccactcagcacctgcctttccgcttctacgaccaggggcgccggggcagcagcgaccccacagtgcagcgctccgtgtttgcatcggtggacaaggtgccaggtgagccagccccccgccctgcgccacagctcgttcatcatggtgggcgttcaaggtctttctctctgtggagcctgtgtgagctgcccttcctctctcagaagccccgtcggctggcagcaccagcttcttagaatttgtcaaagcacagcgcaagattaaacacagcccccaaaataaattttggctttcccttta

SEQ ID NO: 7019 - DNA, 6891 bp, Homo sapiens
  source 1..6891: mol_type = unassigned DNA
aactgcatttcccagcgccccacgcggcggcggccgtaaagcgcggcggtcgaacggccggttccggctgaatgtcagtgctgggctgtgggccggggaggaaggcggctcgcggttcctccaccgcctccgccgccgcatcctccgcttgtgctaccgccgcgggcgctgggccgctctgctggtccggcatgagaccgtgagacgagagacgggtcggggccgccgacatgtttggccgctcgcggagctgggtgggcgggggccatggcaagacttcccgcaacatccactccttggaccacctcaagtatctgtaccacgttttgaccaaaaacaccacagtcacagaacagaaccggaacctgctagtggagaccatccgttccatcactgagatcctgatctggggagatcaaaatgacagctctgtatttgacttcttcctggagaagaatatgtttgttttcttcttgaacatcttgcggcaaaagtcgggccgttacgtgtgcgttcagctgctgcagaccttgaacatcctctttgagaacatcagtcacgagacctcactttattatttgctctcaaataactacgtaaattctatcatcgttcataaatttgacttttctgatgaggagattatggcctattatatatcgttcctgaaaacactttcgttaaaactcaacaaccacactgtccatttcttttataatgagcacaccaatgactttgccctgtacacagaagccatcaagtttttcaaccaccctgaaagcatggttagaattgctgtaagaaccataactttgaatgtctataaagtgtcattggataaccaggccatgctgcactacatccgagataaaactgctgttccttacttctccaatttggtctggttcattgggagccatgtgatcgaactcgatgactgcgtgcagactgatgaggagcatcggaatcggggtaaactgagtgatctggtggcagagcacctagaccacctgcactatctcaatgacatcctgatcatcaactgtgagttcctcaacgatgtgctcactgaccacctgctcaacaggctcttcctgcccctctacgtgtactcactggagaaccaggacaagggaggagaacggccgaaaattagcctgccggtgtctctttatcttctgtcacaggtcttcttaattatacatcatgcaccgctggtgaactcgttagctgaagtcattctgaatggtgatctgtctgagatgtacgctaagactgaacaggatattcagagaagttctgccaagcccagcattcggtgcttcattaaacccaccgagacactcgagcggtcccttgagatgaacaagcacaagggcaagaggcgggtgcaaaagagacccaactacaaaaacgttggggaagaagaagatgaggagaaagggcccaccgaggatgcccaagaagacgccgagaaggctaaaggtacagagggtggttcaaaaggcatcaagacgagtggggagagtgaagagatcgagatggtgatcatggagcgtagcaagctctcagagctggccgccagcacctccgtgcaggagcagaacaccacggacgaggagaaaagcgccgccgccacctgctctgagagcacgcaatggagcagacccttcctggatatggtgtaccacgcgctggacagcccggatgatgattaccatgccctgttcgtgctctgcctcctctatgccatgtctcataataaaggcatggatcctgaaaaattagagcgaatccagctccccgtgccaaatgcggccgagaagaccacctacaaccacccgctagctgaaagactcatcaggatcatgaacaacgctgcccagccagatgggaagatccggctggcgacgctggagctgagctgcctgcttctgaagcagcaagtcctgatgagtgctggctgcatcatgaaggacgtgcacctggcctgcctggagggtgcgagagaagaaagtgttcaccttgtacgacatttttataagggagaagacatttttttggacatgtttgaagatgagtataggagcatgacaatgaagcccatgaacgtggaatatctcatgatggacgcctccatcctgctgcccccaacaggcacgccactgacgggcattgacttcgtgaagcggctgccgtgtggcgatgtggagaagacccggcgggccatccgggtgttcttcatgctgcgttccctgtcactgcaattgcgaggggagcctgagacacagttgccgctgactcgggaggaggacctgatcaagactgatgatgtcctggatctgaataacagcgacttgattgcatgtacagtgatcaccaaggatggcggcatggtccagcgattcctggctgtggatatttaccagatgagtttggtggagcctgatgtgtccaggcttggctggggagtggtcaagtttgcaggcctattgcaggacatgcaggtgactggcgtggaggacgacagccgtgccctgaacatcaccatccacaagcctgcgtccagcccccattccaagcccttccccatcctccaggccaccttcatcttctcagaccacatccgctgcatcatcgccaagcagcgcctggccaaaggccgcatccaggcaaggcgcatgaagatgcagagaatagctgccctcctggacctcccaatccagcccaccactgaagtcctggggtttggactcggctcctccacctccactcagcacctgcctttccgcttctacgaccaggggcgccggggcagcagcgaccccacagtgcagcgctccgtgtttgcatcggtggacaaggtgccaggcttcgccgtggcccagtgcataaaccagcacagctccccgtccctgtcctcacagtcgccaccctccgccagcgggagccccagcggcagcgggagcaccagccactgcgactctggaggcaccagctcgtcctccaccccctccacagcccagagtccagcagatgcccccatgagtccagaactgcctaagcctcaccttcctgaccagttggtaatcgtcaacgaaacggaagcagactctaagcccagcaagaacgtggccaggagcgcagccgtggagacagccagcctgtcccccagcctcgtccctgcccggcagcccaccatttccctgctctgcgaggacacggctgacacgctgagcgtcgaatcgctgacccttgtccccccagttgacccccacagcctccgcagcctcaccggcatgcccccgctgtccacgccggctgccgcctgcacagagcccgtgggcgaagaggctgcatgtgctgagcctgtgggcaccgctgaggactgagtcagtgccggggcctccctttgtgtgtgtggccccgctggtagggaccccagtgccgctgactggcaagacacactgggagcacccaccattctgtgcggcccccagcagccatctcaaccacctatccctgcgctcccttgaatgggaagaagccccacgttgtccttgaattcctttttcactttgcatctcttcacgtgcaggctgggaccagcggagacaccgcggcgaatgcagatgactgcaccggccactcagggagctgcctgggctccgtgtctctgagccccgggtggcaggacccaccggcacctctttcttcctctgtcatatggctcctctgtcaccagccccagtgtgcacagaagaattggaccaggtcactgtacgtagaaatttgtagaaaagcagacttagataaacatctcctttggatatttatttccgcttttggcagcaggtgaacatttatttttaaaacttctatttaaaagaagtccaaaaacatcaacactaaggtttgatgtcatgtgaaaagtgtaataataacagttaagatttcatgatcattttcactggacctttcctgatattttgtttcagagttcttagtgtggctttttccatttatttaagtgattctttgttactcactaactctgcaagcctgtggaataatgaagtaccttcctggaaagtttggattattttttaaacaaaaacaagggagatacatgtattctcaggtacacacagagctgagagggctgaatggttttctgctatagcagccgagaggcctcccatcatggaaagatttctccaggaaaaggaggaatgtagccagctccccactcaggacgcttcctcatttctcttcaccaaaaccaaacagagacagcttccagcaccttcttcagtgttaccatctctaagaaggaaccagttgggaccgtgaagactcccgaccctgtggccatgatggaaatcaaaggaagacaccctctacgtcacctgccctcgactgtgtgtgcccacatgtgccgagagatggcccagagccagttcccctccagctgcaagggcatggtgtccccagagctctgagtctgtcactctccctctgctactgctgctgatctgaatatggaaaccccatggttcccttccccattcggactgggtgtgtacaagcaaggacccagatgcatcagacacagcccccaagatgttcctttctactcggccagctcgggagccagacacagcactcacagcccaggccgtgatccaccctccccaagtccaccagggccagcggcccctcacctctctggtcactggtgagaccttccacaactttcctccagacctgccagcagatgtgcccaccaggggcattaggtatccgccggagcctggccatagggtagtctcgggagccgcgctgagatcttttgccacctgcattttagaagaacatggtctctgtctcctcggcccagccagctgtcccggcaaggcctgccgagggcagttttcaacctcatgaaggaaacacagtcctgccaaggagggggagtggcgcccatggggacaggcctcagtccttagaagccctctgggtagctgtgcccacccagccttcatggctgcaggtacaaggacctttgcttccatagagaaaacgcacagctcagaaagggggccacatgggcagaaacccaaaggaaggacaaaccacgaccaccgtggccatctgcagaatccctggaagagaaggaaggcagggtggagcggggggaagaccatcatggagagaaggaccacagcatcaggagacgggacacgccacacccagcaggcagcctgtgtgttgcttaattttttaagagcaagaggggtagagaggatcaagctggccctggctggagatggctagcccctgagacatgcacttctggttttgaaatgactctgtctgtggggcagcagaaactagagaaggcaagtggctgccccaccccaaggcgtgaccaggaggaacagcctgcagctcactccatgccacacgggtgggccaccagcctgctgtcagaagtctctgggctccaactggtcttgtaaccactgagcactgaaggagagaggtcttggtcagggctggacagcatgcccgggaggaccagcagaggattaaaggtgactgggaggaccagcggaggataaaagacactgctcagggcagggcttctaccctgcatccctggccaagaaaagggcagtccccatgtgggcttgcagggtcactctcaggggcctctttcagctggggctggcaacttgcgtctgggggacacctccaggtgtgtggggtgaggatttcctataaccagggctcccagaagctttgcttatgtaaggaggtctgggagccagcccattggaggccaccagccattttggcttcaaaggaccccacctcacccaggtctcagcggcagtgggcacagctatgtcttcaggagctcccgtcaaacctcatagctggggcgctcccagacaggccagtccagacaggacacgctgggcccctggcatccagaggaagagccaggagtgtgggaaggcccacagtgggggctgtggcttctgacactcaggtcatagcctcagaggtctgaggtcagcccccacagacccatccggcccgccccccaagtccctgcagagagcacttagagttatggcccaggccctggtccacccttcccctgtgcacctccggctgggtttgccaagtcagggagcagggctggccgcaggaactcccaaaccttggctttgaatattgttgtggaggtgtgctcgtccctttctggacgtgcaaggtacctgtcccagcaggtcagatggggccagctgaggcgctcccccaggcaggaagggccagccttcaccatcgcgtgggattgggaggaggggcctccgtgagcagcccctcctctgccgctgtcccagcccagtccctctcccggagccttggcagcctcccacaacccagacacttgcgttcacaagcaacctaaggggcaggtgaagaagcgcagccctgccagacgcgctagattcctctaaggtctctgagatgcaccgttttttaaaaaggcgtggggtgaactgattttgatcttcttgtctagatgcaataaataaatctgaagcatttaatgtagtcatcttgacattgggcctacactgtacgagttccttatgtttccttgagctaaaaatatgtaaataatttttgtcccagtgagaaccgagggttagaaaacctcgatgcctctgagcctcgggaccgctctagggaagtacctgctttcgccagcatgactcatgcttcgtgggtactgaacacgagggtggaaatgaaaactggaacttccttgtaaatttaaacttggcaataaaagagaaaaaaagttaccaagaa

SEQ ID NO: 7020 - DNA, 6891 bp, Homo sapiens
  source 1..6891: mol_type = unassigned DNA
aactgcatttcccagcgccccacgcggcggcggccgtaaagcgcggcggtcgaacggccggttccggctgaatgtcagtgctgggctgtgggccggggaggaaggcggctcgcggttcctccaccgcctccgccgccgcatcctccgcttgtgctaccgccgcgggcgctgggccgctctgctggtccggcatgagaccgtgagacgagagacgggtcggggccgccgacatgtttggccgctcgcggagctgggtgggcgggggccatggcaagacttcccgcaacatccactccttggaccacctcaagtatctgtaccacgttttgaccaaaaacaccacagtcacagaacagaaccggaacctgctagtggagaccatccgttccatcactgagatcctgatctggggagatcaaaatgacagctctgtatttgacttcttcctggagaagaatatgtttgttttcttcttgaacatcttgcggcaaaagtcgggccgttacgtgtgcgttcagctgctgcagaccttgaacatcctctttgagaacatcagtcacgagacctcactttattatttgctctcaaataactacgtaaattctatcatcgttcataaatttgacttttctgatgaggagattatggcctattatatatcgttcctgaaaacactttcgttaaaactcaacaaccacactgtccatttcttttataatgagcacaccaatgactttgccctgtacacagaagccatcaagtttttcaaccaccctgaaagcatggttagaattgctgtaagaaccataactttgaatgtctataaagtctcagtggataaccaggccatgctgcactacatccgagataaaactgctgttccttacttctccaatttggtctggttcattgggagccatgtgatcgaactcgatgactgcgtgcagactgatgaggagcatcggaatcggggtaaactgagtgatctggtggcagagcacctagaccacctgcactatctcaatgacatcctgatcatcaactgtgagttcctcaacgatgtgctcactgaccacctgctcaacaggctcttcctgcccctctacgtgtactcactggagaaccaggacaagggaggagaacggccgaaaattagcctgccggtgtctctttatcttctgtcacaggtcttcttaattatacatcatgcaccgctggtgaactcgttagctgaagtcattctgaatggtgatctgtctgagatgtacgctaagactgaacaggatattcagagaagttctgccaagcccagcattcggtgcttcattaaacccaccgagacactcgagcggtcccttgagatgaacaagcacaagggcaagaggcgggtgcaaaagagacccaactacaaaaacgttggggaagaagaagatgaggagaaagggcccaccgaggatgcccaagaagacgccgagaaggctaaaggtacagagggtggttcaaaaggcatcaagacgagtggggagagtgaagagatcgagatggtgatcatggagcgtagcaagctctcagagctggccgccagcacctccgtgcaggagcagaacaccacggacgaggagaaaagcgccgccgccacctgctctgagagcacgcaatggagcagacccttcctggatatggtgtaccacgcgctggacagcccggatgatgattaccatgccctgttcgtgctctgcctcctctatgccatgtctcataataaaggcatggatcctgaaaaattagagcgaatccagctccccgtgccaaatgcggccgagaagaccacctacaaccacccgctagctgaaagactcatcaggatcatgaacaacgctgcccagccagatgggaagatccggctggcgacgctggagctgagctgcctgcttctgaagcagcaagtcctgatgagtgctggctgcatcatgaaggacgtgcacctggcctgcctggagggtgcgagagaagaaagtgttcaccttgtacgacatttttataagggagaagacatttttttggacatgtttgaagatgagtataggagcatgacaatgaagcccatgaacgtggaatatctcatgatggacgcctccatcctgctgcccccaacaggcacgccactgacgggcattgacttcgtgaagcggctgccgtgtggcgatgtggagaagacccggcgggccatccgggtgttcttcatgctgcgttccctgtcactgcaattgcgaggggagcctgagacacagttgccgctgactcgggaggaggacctgatcaagactgatgatgtcctggatctgaataacagcgacttgattgcatgtacagtgatcaccaaggatggcggcatggtccagcgattcctggctgtggatatttaccagatgagtttggtggagcctgatgtgtccaggcttggctggggagtggtcaagtttgcaggcctattgcaggacatgcaggtgactggcgtggaggacgacagccgtgccctgaacatcaccatccacaagcctgcgtccagcccccattccaagcccttccccatcctccaggccaccttcatcttctcagaccacatccgctgcatcatcgccaagcagcgcctggccaaaggccgcatccaggcaaggcgcatgaagatgcagagaatagctgccctcctggacctcccaatccagcccaccactgaagtcctggggtttggactcggctcctccacctccactcagcacctgcctttccgcttctacgaccaggggcgccggggcagcagcgaccccacagtgcagcgctccgtgtttgcatcggtggacaaggtgccaggcttcgccgtggcccagtgcataaaccagcacagctccccgtccctgtcctcacagtcgccaccctccgccagcgggagccccagcggcagcgggagcaccagccactgcgactctggaggcaccagctcgtcctccaccccctccacagcccagagtccagcagatgcccccatgagtccagaactgcctaagcctcaccttcctgaccagttggtaatcgtcaacgaaacggaagcagactctaagcccagcaagaacgtggccaggagcgcagccgtggagacagccagcctgtcccccagcctcgtccctgcccggcagcccaccatttccctgctctgcgaggacacggctgacacgctgagcgtcgaatcgctgacccttgtccccccagttgacccccacagcctccgcagcctcaccggcatgcccccgctgtccacgccggctgccgcctgcacagagcccgtgggcgaagaggctgcatgtgctgagcctgtgggcaccgctgaggactgagtcagtgccggggcctccctttgtgtgtgtggccccgctggtagggaccccagtgccgctgactggcaagacacactgggagcacccaccattctgtgcggcccccagcagccatctcaaccacctatccctgcgctcccttgaatgggaagaagccccacgttgtccttgaattcctttttcactttgcatctcttcacgtgcaggctgggaccagcggagacaccgcggcgaatgcagatgactgcaccggccactcagggagctgcctgggctccgtgtctctgagccccgggtggcaggacccaccggcacctctttcttcctctgtcatatggctcctctgtcaccagccccagtgtgcacagaagaattggaccaggtcactgtacgtagaaatttgtagaaaagcagacttagataaacatctcctttggatatttatttccgcttttggcagcaggtgaacatttatttttaaaacttctatttaaaagaagtccaaaaacatcaacactaaggtttgatgtcatgtgaaaagtgtaataataacagttaagatttcatgatcattttcactggacctttcctgatattttgtttcagagttcttagtgtggctttttccatttatttaagtgattctttgttactcactaactctgcaagcctgtggaataatgaagtaccttcctggaaagtttggattattttttaaacaaaaacaagggagatacatgtattctcaggtacacacagagctgagagggctgaatggttttctgctatagcagccgagaggcctcccatcatggaaagatttctccaggaaaaggaggaatgtagccagctccccactcaggacgcttcctcatttctcttcaccaaaaccaaacagagacagcttccagcaccttcttcagtgttaccatctctaagaaggaaccagttgggaccgtgaagactcccgaccctgtggccatgatggaaatcaaaggaagacaccctctacgtcacctgccctcgactgtgtgtgcccacatgtgccgagagatggcccagagccagttcccctccagctgcaagggcatggtgtccccagagctctgagtctgtcactctccctctgctactgctgctgatctgaatatggaaaccccatggttcccttccccattcggactgggtgtgtacaagcaaggacccagatgcatcagacacagcccccaagatgttcctttctactcggccagctcgggagccagacacagcactcacagcccaggccgtgatccaccctccccaagtccaccagggccagcggcccctcacctctctggtcactggtgagaccttccacaactttcctccagacctgccagcagatgtgcccaccaggggcattaggtatccgccggagcctggccatagggtagtctcgggagccgcgctgagatcttttgccacctgcattttagaagaacatggtctctgtctcctcggcccagccagctgtcccggcaaggcctgccgagggcagttttcaacctcatgaaggaaacacagtcctgccaaggagggggagtggcgcccatggggacaggcctcagtccttagaagccctctgggtagctgtgcccacccagccttcatggctgcaggtacaaggacctttgcttccatagagaaaacgcacagctcagaaagggggccacatgggcagaaacccaaaggaaggacaaaccacgaccaccgtggccatctgcagaatccctggaagagaaggaaggcagggtggagcggggggaagaccatcatggagagaaggaccacagcatcaggagacgggacacgccacacccagcaggcagcctgtgtgttgcttaattttttaagagcaagaggggtagagaggatcaagctggccctggctggagatggctagcccctgagacatgcacttctggttttgaaatgactctgtctgtggggcagcagaaactagagaaggcaagtggctgccccaccccaaggcgtgaccaggaggaacagcctgcagctcactccatgccacacgggtgggccaccagcctgctgtcagaagtctctgggctccaactggtcttgtaaccactgagcactgaaggagagaggtcttggtcagggctggacagcatgcccgggaggaccagcagaggattaaaggtgactgggaggaccagcggaggataaaagacactgctcagggcagggcttctaccctgcatccctggccaagaaaagggcagtccccatgtgggcttgcagggtcactctcaggggcctctttcagctggggctggcaacttgcgtctgggggacacctccaggtgtgtggggtgaggatttcctataaccagggctcccagaagctttgcttatgtaaggaggtctgggagccagcccattggaggccaccagccattttggcttcaaaggaccccacctcacccaggtctcagcggcagtgggcacagctatgtcttcaggagctcccgtcaaacctcatagctggggcgctcccagacaggccagtccagacaggacacgctgggcccctggcatccagaggaagagccaggagtgtgggaaggcccacagtgggggctgtggcttctgacactcaggtcatagcctcagaggtctgaggtcagcccccacagacccatccggcccgccccccaagtccctgcagagagcacttagagttatggcccaggccctggtccacccttcccctgtgcacctccggctgggtttgccaagtcagggagcagggctggccgcaggaactcccaaaccttggctttgaatattgttgtggaggtgtgctcgtccctttctggacgtgcaaggtacctgtcccagcaggtcagatggggccagctgaggcgctcccccaggcaggaagggccagccttcaccatcgcgtgggattgggaggaggggcctccgtgagcagcccctcctctgccgctgtcccagcccagtccctctcccggagccttggcagcctcccacaacccagacacttgcgttcacaagcaacctaaggggcaggtgaagaagcgcagccctgccagacgcgctagattcctctaaggtctctgagatgcaccgttttttaaaaaggcgtggggtgaactgattttgatcttcttgtctagatgcaataaataaatctgaagcatttaatgtagtcatcttgacattgggcctacactgtacgagttccttatgtttccttgagctaaaaatatgtaaataatttttgtcccagtgagaaccgagggttagaaaacctcgatgcctctgagcctcgggaccgctctagggaagtacctgctttcgccagcatgactcatgcttcgtgggtactgaacacgagggtggaaatgaaaactggaacttccttgtaaatttaaacttggcaataaaagagaaaaaaagttaccaagaa

SEQ ID NO: 7021 - DNA, 288 bp, Homo sapiens
  source 1..288: mol_type = unassigned DNA
atgcatgacagtaacaatgtggagaaagacattacaccatctgaattgcctgcaaacccagcaataagagctaactgccatcaagagccatcagtatgtcttcaagctgcatgcccagaaagctggattggttttcaaagaaagtgtttctatttttctgatgacaccaagaactggacatcaagtcagaggttttgtgactcacaagatgctgatcttgctcaggttgaaagcttccaggaactggtttcctatcctgggagcaggagagtgtgcctatttgaatga

SEQ ID NO: 7022 - DNA, 916 bp, Homo sapiens
  source 1..916: mol_type = unassigned DNA
tgaaaagctttctagtcctctcctactgatctccatcggttagcgccttgccatgattaatccagagctgcgggatggcagagctgatggcttcatacatcggatagttcccaagttgatacaaaactggaagattggccttatgtgcttcctgagtattattattactacagtttgcattattatgatagccacatggtccaagcatgctaaacctgtggcatgttcaggggactggcttggagtgagagataagtgtttctatttttctgatgataccagaaattggacagccagtaaaatattttgtagtttgcagaaagcagaacttgctcagattgatacacaagaagacatggaatttttgaagaggtacgcaggaactgatatgcactggattggactaagcaggaaacaaggagattcttggaaatggacaaatggcaccacattcaatggttggtttgaaattatagggaacggatcctttgctttcttgagtgctgatggagtccatagttccagaggatttattgatatcaagtggatttgcagcaaacctaaatattttttatagagcagaaaaaacttgaaaatgattatcacacttcaagattgaaagaagagctaattatgcaaaagtggctttctcacttattctgttacagaatacggaacctctggtgagggcccattttctagtttatagatggaaacttcttgctgtgccctgccatggttaaagagacaaggccgttctctggagccttttataagggcacaatcacatttactatggctccatcctcatgaactaatcacctcctgatggatggctccatcccctaataccatcacactggtgattagctttcaatttatgagttttgggaggacccaaatactcagaacatag

SEQ ID NO: 7023 - DNA, 1700 bp, Homo sapiens
  source 1..1700: mol_type = unassigned DNA
ttttcctcttcaagtttctctctcagaacaaatgcagtgttaatcccgaagccgcttgcgggacactggcttcttctcctcagtttcctccctaatatatttgttgaggggtaatacaaaatcactgggaaactgattagagcagatttgaagacaaaattgtggcctggtaacttagcaaaagcataatggtgtcatcttgtatgctgatgataacgttctgggcactttgttactttcgttttcttttttccctctgtgtgtctttgtgtgtgtttgtgtgtgtgctcacacccacacgtgtgactttgcacgcatttgtctttgagagagagataatagtttttgtttttctttcagtagccaaagtttaaaccattgctttttctttgattctatcgcttttaaggtgatctttcttaacacaggataagaaagcagtaatgtcctaaagaatgctgttgaattaattagtatcagcctctcctacagttctggaaggatacgtggttaagtaccactcctggatgaatcagaaaaacagccacttgagcaatttcgtgttctgtggttcagatgagaatcccagttgagaaagtaagaaaatatgtgtttattcttcagctttaaattgttatatcacaaacttccttcctccttggcaagctttcttttttgacgagaagaaaattgtaataaacaacagtatgactaatagatagtcacatggttacttccagtttgcaaaatgctatttatactttgagttactcttcaaaagtggtatacctctagtttggagctgtgctgtaaaaacaagagtaacatttttatattaaagttaaataaagttacaactttgaagagagtttctgcaagacatgacacaaagctgctagcagaaaatcaaaacgctgattaaaagaagcacggtatgatgaccaaacataaaaagtgttttataattgttggtgttttaataacaactaatattattactctgatagttaaactaactcgagattctcagagtttatgcccctatgattggattggtttccaaaacaaatgctattatttctctaaagaagaaggagattggaattcaagtaaatacaactgttccactcaacatgccgacctaactataattgacaacatagaagaaatgaattttcttaggcggtataaatgcagttctgatcactggattggactgaagatggcaaaaaatcgaacaggacaatgggtagatggagctacatttaccaaatcgtttggcatgagagggagtgaaggatgtgcctacctcagcgatgatggtgcagcaacagctagatgttacaccgaaagaaaatggatttgcaggaaaagaatacactaagttaatgtctaagataatggggaaaatagaaaataacattattaagtgtaaaaccagcaaagtacttttttaattaaacaaagttcgagttttgtacctgtctggttaattctgcttacgtgtcaggctacacataaaagccacttcaaagattggcaaaaaatggttacaggtattctgctgagtttttttctttctttctttctctctctctctttctttctttctttctttctttctttttttaactgtaaaccagaaaacaattgtggggatcaaggacagacatagcacttagacaggactttcatgaccc

SEQ ID NO: 7024 - DNA, 465 bp, Homo sapiens
  source 1..465: mol_type = unassigned DNA
atgcatgacagtaacaatgtggagaaagacattacaccatctgaattgcctgcaaacccagcaataagagctaactgccatcaagagccatcagtatgtcttcaagctgcatgcccagaaagctggattggttttcaaagaaagtgtttctatttttctgatgacaccaagaactggacatcaagtcagaggttttgtgactcacaagatgctgatcttgctcaggttgaaagcttccaggaactgaatttcctgttgagatataaaggcccatctgatcactggattgggctgagcagagaacaaggccaaccatggaaatggataaatggtactgaatggacaagacagtttcctatcctgggagcaggagagtgtgcctatttgaatgacaaaggtgccagtagtgccaggcactacacagagaggaagtggatttgttccaaatcagatatacatgtctag

SEQ ID NO: 7025 - DNA, 935 bp, Homo sapiens
  source 1..935: mol_type = unassigned DNA
actcatagaaactggaggcaaaatgcatgacagtaacaatgtggagaaagacattacaccatctgaattgcctgcaaacccaggttgtctgcattcaaaagagcattctattaaagctaccttaatttggcgcttatttttcttaatcatgtttctgacaatcatagtgtgtggaatggttgctgctttaagcgcaataagagctaactgccatcaagagccatcagtatgtcttcaagctgcatgcccagaaagctggattggttttcaaagaaagtgtttctatttttctgatgacaccaagaactggacatcaagtcagaggttttgtgactcacaagatgctgatcttgctcaggttgaaagcttccaggaactgaatttcctgttgagatataaaggcccatctgatcactggattgggctgagcagagaacaaggccaaccatggaaatggataaatggtactgaatggacaagacagttagtcatgaaagaagatggtgccaacttgtatgttgcaaaggtttcacaagttcctcgaatgaatccaagacctgtcatggtttcctatcctgggagcaggagagtgtgcctatttgaatgacaaaggtgccagtagtgccaggcactacacagagaggaagtggatttgttccaaatcagatatacatgtctagatgttacagcaaagccccaactaatctttagaagcatattggaactgataactccattttaaaatgagcaaagaatttatttcttataccaacaggtatatgaaaatatgctcaatatcactaataactgggaaaatacaaatcaaaatcatagtaaaatattacctgttttcatggtgctaatattacctgttctcccactgctaatgacatacccgagactgagtaatttataaataaaagagatttaattga

SEQ ID NO: 7026 - DNA, 859 bp, Homo sapiens
  source 1..859: mol_type = unassigned DNA
actcatagaaactggaggcaaaatgcatgacagtaacaatgtggagaaagacattacaccatctgaattgcctgcaaacccaggttgtctgcattcaaaagagcattctattaaagctaccttaatttggcgcttatttttcttaatcatgtttctgacaatcatagtgtgtggaatggttgctgctttaagcgcaataagagctaactgccatcaagagccatcagtatgtcttcaagctgcatgcccagaaagctggattggttttcaaagaaagtgtttctatttttctgatgacaccaagaactggacatcaagtcagaggttttgtgactcacaagatgctgatcttgctcaggttgaaagcttccaggaactgaatttcctgttgagatataaaggcccatctgatcactggattgggctgagcagagaacaaggccaaccatggaaatggataaatggtactgaatggacaagacagtttcctatcctgggagcaggagagtgtgcctatttgaatgacaaaggtgccagtagtgccaggcactacacagagaggaagtggatttgttccaaatcagatatacatgtctagatgttacagcaaagccccaactaatctttagaagcatattggaactgataactccattttaaaatgagcaaagaatttatttcttataccaacaggtatatgaaaatatgctcaatatcactaataactgggaaaatacaaatcaaaatcatagtaaaatattacctgttttcatggtgctaatattacctgttctcccactgctaatgacatacccgagactgagtaatttataaataaaagagatttaattgactcata

SEQ ID NO: 7027 - DNA, 399 bp, Homo sapiens
  source 1..399: mol_type = unassigned DNA
atgcatgacagtaacaatgtggagaaagacattacaccatctgaattgcctgcaaacccaggttgtctgcattcaaaagagcattctattaaagctaccttaatttggcgcttatttttcttaatcatgtttctgacaatcatagtgtgtggaatggttgctgctttaagcgcaataagagctaactgccatcaagagccatcagtatgtcttcaagctgcatgcccagaaagctggattggttttcaaagaaagtgtttctatttttctgatgacaccaagaactggacatcaagtcagaggttttgtgactcacaagatgctgatcttgctcaggttgaaagcttccaggaactggtttcctatcctgggagcaggagagtgtgcctatttgaatga

SEQ ID NO: 7028 - DNA, 1669 bp, Homo sapiens
  source 1..1669: mol_type = unassigned DNA
aaaagctgtggtccccaggagtcctgaacatctggggacagcgggaaaacatgagtgactccaaggaaccaagggtgcagcagctgggcctcctggggtgtcttggccatggcgccctggtgctgcaactcctctccttcatgctcttggctggggtcctggtggccatccttgtccaagtgtccaaggtccccagctccctaagtcaggaacaatccgagcaagacgcaatctaccagaacctgacccagcttaaagctgcagtgggtgagctctcagagaaatccaagctgcaggagatctaccaggagctgacccagctgaaggctgcagtgggtgagttgccagagaaatccaagctgcaggagatctaccaggagctgacccggctgaaggctgcagtgggtgagttgccagagaaatccaagctgcaggagatctaccaggagctgacccggctgaaggctgcagtgggtgagttgccagagaaatccaagctgcaggagatctaccaggagctgacccggctgaaggctgcagtgggtgagttgccagagaaatccaagctgcaggagatctaccaggagctgacggagctgaaggctgcagtgggtgagttgccagagaaatccaagctgcaggagatctaccaggagctgacccagctgaaggctgcagtgggtgagttgccagaccagtccaagcagcagcaaatctatcaagaactgaccgatttgaagactgcatttgaacgcctgtgccgccactgtcccaaggactggacattcttccaaggaaactgttacttcatgtctaactcccagcggaactggcacgactccgtcaccgcctgccaggaagtgagggcccagctcgtcgtaatcaaaactgctgaggagcagcttccagcggtactggaacagtggagaacccaacaatagcgggaatgaagactgtgcggaatttagtggcagtggctggaacgacaatcgatgtgacgttgacaattactggatctgcaaaaagcccgcagcctgcttcagagacgaatagttgtttccctgctagcctcagcctccattgtggtatagcagaacttcacccacttgtaagccagcgcttcttctctccatccttggaccttcacaaatgccctgagacggttctctgttcgatttttcatcccctatgaacctgggtcttattctgtccttctgatgcctccaagtttccctggtgtagagcttgtgttcttggcccatccttggagctttataagtgacctgagtgggatgcatttagggggcgggcttggtatgttgtatgaatccactctctgttccttttggagattagactatttggattcatgtgtagctgccctgtcccctggggctttatctcatccatgcaaactaccatctgctcaacttccagctacaccccgtgcacccttttgactggggacttgctggttgaaggagctcatcttgcaggctggaagcaccagggaattaattcccccagtcaaccaatggcatccagagagggcatggaggctccatacaacctcttccacccccacatctttctttgtcctatacatgtcttccatttggctgtttctgagttgtagcctttataataaagtggtaaatgttgtaactgc

SEQ ID NO: 7029 - DNA, 1281 bp, Homo sapiens
  source 1..1281: mol_type = unassigned DNA
ctgtgattctcactatactggtcctgaggaaagggcttctgtgaactgcggtttttagtttttattgtggttcttagttctcatgagacccctcttgaggatatgtgcctatctggtgcctctgctctccactagttgagtgaaaggaaggaggtaatttaccaccatgtttggttcctgtttataagatgttttaagaaagatctgaaacagattttctgaagaaagcagaagctctcttcccattatgacttcggaaatcacttatgctgaagtgaggttcaaaaatgaattcaagtcctcaggcatcaacacagcctcttctgcagcttccaaggagaggactgcccctcacaaaagtaataccggattccccaagctgctttgtgcctcactgttgatatttttcctgctattggcaatctcattctttattgcttttgtcattttctttcaaaaatattctcagcttcttgaaaaaaagactacaaaagagctggttcatacaacattggagtgtgtgaaaaaaaatatgcccgtggaagagacagcctggagctgttgcccaaagaattggaagtcatttagttccaactgctactttatttctactgaatcagcatcttggcaagacagtgagaaggactgtgctagaatggaggctcacctgctggtgataaacactcaagaagagcaggatttcatcttccagaatctgcaagaagaatctgcttattttgtggggctctcagatccagaaggtcagcgacattggcaatgggttgatcagacaccatacaatgaaagttccacattctggcatccacgtgagcccagtgatcccaatgagcgctgcgttgtgctaaattttcgtaaatcacccaaaagatggggctggaatgatgttaattgtcttggtcctcaaaggtcagtttgtgagatgatgaagatccacttatgaactgaacattctccatgaacaggtggttggattggtatctgtcattgtagggatagataataagctcttcttattcatgtgtaagggaggtccatagaatttaggtggtctgtcaactattctacttatgagagaattggtctgtacattgactgattcactttttcataaagtgagcatttattgagcattttttcatgtgccagagcctgtactggaggcccccattgtgcacacatggagagaacatgagtctctcttaatttttatctggttgctaaagaattatttaccaataaaattatatgatgtggtgtctc

SEQ ID NO: 7030 - DNA, 841 bp, Homo sapiens
  source 1..841: mol_type = unassigned DNA
aagaaagcagaagctctcttcccattatgacttcggaaatcacttatgctgaagtgaggttcaaaaatgaattcaagtcctcaggcatcaacacagcctcttctgcagagacagcctggagctgttgcccaaagaattggaagtcatttagttccaactgctactttatttctactgaatcagcatcttggcaagacagtgagaaggactgtgctagaatggaggctcacctgctggtgataaacactcaagaagagcaggatttcatcttccagaatctgcaagaagaatctgcttattttgtggggctctcagatccagaaggtcagcgacattggcaatgggttgatcagacaccatacaatgaaagttccacattctggcatccacgtgagcccagtgatcccaatgagcgctgcgttgtgctaaattttcgtaaatcacccaaaagatggggctggaatgatgttaattgtcttggtcctcaaaggtcagtttgtgagatgatgaagatccacttatgaactgaacattctccatgaacaggtggttggattggtatctgtcattgtagggatagataataagctcttcttattcatgtgtaagggaggtccatagaatttaggtggtctgtcaactattctacttatgagagaattggtctgtacattgactgattcactttttcataaagtgagcatttattgagcattttttcatgtgccagagcctgtactggaggcccccattgtgcacacatggagagaacatgagtctctcttaatttttatctggttgctaaagaattatttaccaataaaattatatgatgtggtgt

SEQ ID NO: 7031 - DNA, 615 bp, Homo sapiens
  source 1..615: mol_type = unassigned DNA
atgacttcggaaatcacttatgctgaagtgaggttcaaaaatgaattcaagtcctcaggcatcaacacagcctcttctgcagcttccaaggagaggactgcccctcacaaaagtaataccggattccccaagctgctttgtgcctcactgttgatatttttcctgctattggcaatctcattctttattgcttttgtcaagacagcctggagctgttgcccaaagaattggaagtcatttagttccaactgctactttatttctactgaatcagcatcttggcaagacagtgagaaggactgtgctagaatggaggctcacctgctggtgataaacactcaagaagagcaggatttcatcttccagaatctgcaagaagaatctgcttattttgtggggctctcagatccagaaggtcagcgacattggcaatgggttgatcagacaccatacaatgaaagttccacattctggcatccacgtgagcccagtgatcccaatgagcgctgcgttgtgctaaattttcgtaaatcacccaaaagatggggctggaatgatgttaattgtcttggtcctcaaaggtcagtttgtgagatgatgaagatccacttatga

SEQ ID NO: 7032 - DNA, 597 bp, Homo sapiens
  source 1..597: mol_type = unassigned DNA
atgacttcggaaatcacttatgctgaagtgaggttcaaaaatgaattcaagtcctcaggcatcaacacagcctcttctgcagttttctttcaaaaatattctcagcttcttgaaaaaaagactacaaaagagctggttcatacaacattggagtgtgtgaaaaaaaatatgcccgtggaagagacagcctggagctgttgcccaaagaattggaagtcatttagttccaactgctactttatttctactgaatcagcatcttggcaagacagtgagaaggactgtgctagaatggaggctcacctgctggtgataaacactcaagaagagcaggatttcatcttccagaatctgcaagaagaatctgcttattttgtggggctctcagatccagaaggtcagcgacattggcaatgggttgatcagacaccatacaatgaaagttccacattctggcatccacgtgagcccagtgatcccaatgagcgctgcgttgtgctaaattttcgtaaatcacccaaaagatggggctggaatgatgttaattgtcttggtcctcaaaggtcagtttgtgagatgatgaagatccacttatga

SEQ ID NO: 7033 - DNA, 1126 bp, Homo sapiens
  source 1..1126: mol_type = unassigned DNA
ttgctttctgtgctgtgcaagctttgttctttcgctgtttgggtccacggttcttttatgagctgtgataccgcggaagtctgtagcttcactcctgaagctagcaagaccacaagctcgccgagagaaacgagtaactctagacgtgccatcttaaaagctgtaacaccgcgaggcagatcctgcctcccacagtcaccctgctcccaagtgcaacctctgtctgaccctgcatggtgtgcggtgccctcctgcctcaggcctaggcgaagaaggatctaagggcttggcttgtttgaaagaaccacaccccgaaagtaacatctttggagaaagtgatacaagagcttctgcacccacctgatagaggaagtccaaagggtgtgcgcacacacaatggtgcctgaagaagagcctcaagaccgagtgcctcacaattttatgtatagcaaaactgtcaagaggctgtccaagttacgagagtatcaacagtatcatccaagcctgacctgcgtcatggaaggaaaggacatagaagattggagctgctgcccaaccccttggacttcatttcagtctagttgctactttatttctactgggatgcaatcttggactaagagtcaaaagaactgttctgtgatgggggctgatctggtggtgatcaacaccagggaagaacaggatttcatcattcagaatctgaaaagaaattcttcttattttctggggctgtcagatccagggggtcggcgacattggcaatgggttgaccagacaccatacaatgaaaatgtcacattctggcactcaggtgaacccaataaccttgatgagcgttgtgcgataataaatttccgttcttcagaagaatggggctggaatgacattcactgtcatgtacctcagaagtcaatttgcaagatgaagaagatctacatataaatgaaatattctccctggaaatgtgtttgggttggcatccaccgttgtagaaagctaaattgattttttaatttatgtgtaagttttgtacaaggaatgcccctaaaatgtttcagcaggctgtcacctattacacttatgatataatccattcacacattcatttattcatttattcatt

SEQ ID NO: 7034 - DNA, 970 bp, Homo sapiens
  source 1..970: mol_type = unassigned DNA
actgcagagtctcctaagtcacatctcttcctttgcaagagtaggcgaagaaggatctaagggcttggcttgtttgaaagaaccacaccccgaaagtaacatctttggagaaagtgatacaagagcttctgcacccacctgatagaggaagtccaaagggtgtgcgcacacacaatggtgcctgaagaagagcctcaagaccgagagaaaggactctggtggttccagttgaaggtctggtccatggcagtcgtatccatcttgctcctcagtgtctgtttcactgtgagttctgtggtgcctcacaattttatgtatagcaaaactgtcaagaggctgtccaagttacgagagtatcaacagtatcatccaagcctgacctgcgtcatggaaggaaaggacatagaagattggagctgctgcccaaccccttggacttcatttcagtctagttgctactttatttctactgggatgcaatcttggactaagagtcaaaagaactgttctgtgatgggggctgatctggtggtgatcaacaccagggaagaacaggatttcatcattcagaatctgaaaagaaattcttcttattttctggggctgtcagatccagggggtcggcgacattggcaatgggttgaccagacaccatacaatgaaaatgtcacattctggcactcaggtgaacccaataaccttgatgagcgttgtgcgataataaatttccgttcttcagaagaatggggctggaatgacattcactgtcatgtacctcagaagtcaatttgcaagatgaagaagatctacatataaatgaaatattctccctggaaatgtgtttgggttggcatccaccgttgtagaaagctaaattgattttttaatttatgtgtaagttttgtacaaggaatgcccctaaaatgtttcagcaggctgtcacctattacacttatgatataatccattc

SEQ ID NO: 7035 - DNA, 1221 bp, Homo sapiens
  source 1..1221: mol_type = unassigned DNA
cagtgattctcgtgcctcagcctcctgagtagccgaaattacagacgtgtgccaccatgcttggctaattttttggatttttagtagagatggggtttcactatgttggccaggctagtcttgaactcctggcctgaagcaatccgcccacctcagcctcccaaagtgctgagattataggcacgagccactacacctggccacaaaattctttaaagaagccaatcccatcctccctcaagagccaaggggccacctcaccctcttgttacagcagatcctgcctcccacagtcaccctgctcccaagtgcaacctctgtctgaccctgcatggtgtgcggtgccctcctgcctcaggccgcgaagaaggatctaagggcttggcttgtttgaaagaaccacaccccgaaagtaacatctttggagaaagtgatacaagagcttctgcacccacctgatagaggaagtccaaagggtgtgcgcacacacaatggtgcctgaagaagagcctcaagaccgagtgcctcacaattttatgtatagcaaaactgtcaagaggctgtccaagttacgagagtatcaacagtatcatccaagcctgacctgcgtcatggaaggaaaggacatagaagattggagctgctgcccaaccccttggacttcatttcagtctagttgctactttatttctactgggatgcaatcttggactaagagtcaaaagaactgttctgtgatgggggctgatctggtggtgatcaacaccagggaagaacaggatttcatcattcagaatctgaaaagaaattcttcttattttctggggctgtcagatccagggggtcggcgacattggcaatgggttgaccagacaccatacaatgaaaatgtcacattctggcactcaggtgaacccaataaccttgatgagcgttgtgcgataataaatttccgttcttcagaagaatggggctggaatgacattcactgtcatgtacctcagaagtcaatttgcaagatgaagaagatctacatataaatgaaatattctccctggaaatgtgtttgggttggcatccaccgttgtagaaagctaaattgattttttaatttatgtgtaagttttgtacaaggaatgcccctaaaatgtttcagcaggctgtcacctattacacttatgatataatccattcacacattcatttattcatttattcatt

SEQ ID NO: 7036 - DNA, 1314 bp, Homo sapiens
  source 1..1314: mol_type = unassigned DNA
cagtgattctcgtgcctcagcctcctgagtagccgaaattacagacgtgtgccaccatgcttggctaattttttggatttttagtagagatggggtttcactatgttggccaggctagtcttgaactcctggcctgaagcaatccgcccacctcagcctcccaaagtgctgagattataggcacgagccactacacctggccacaaaattctttaaagaagccaatcccatcctccctcaagagccaaggggccacctcaccctcttgttacagcagatcctgcctcccacagtcaccctgctcccaagtgcaacctctgtctgaccctgcatggtgtgcggtgccctcctgcctcaggccgcgaagaaggatctaagggcttggcttgtttgaaagaaccacaccccgaaagtaacatctttggagaaagtgatacaagagcttctgcacccacctgatagaggaagtccaaagggtgtgcgcacacacaatggtgcctgaagaagagcctcaagaccgagagaaaggactctggtggttccagttgaaggtctggtccatggcagtcgtatccatcttgctcctcagtgtctgtttcactgtgagttctgtggtgcctcacaattttatgtatagcaaaactgtcaagaggctgtccaagttacgagagtatcaacagtatcatccaagcctgacctgcgtcatggaaggaaaggacatagaagattggagctgctgcccaaccccttggacttcatttcagtctagttgctactttatttctactgggatgcaatcttggactaagagtcaaaagaactgttctgtgatgggggctgatctggtggtgatcaacaccagggaagaacaggatttcatcattcagaatctgaaaagaaattcttcttattttctggggctgtcagatccagggggtcggcgacattggcaatgggttgaccagacaccatacaatgaaaatgtcacattctggcactcaggtgaacccaataaccttgatgagcgttgtgcgataataaatttccgttcttcagaagaatggggctggaatgacattcactgtcatgtacctcagaagtcaatttgcaagatgaagaagatctacatataaatgaaatattctccctggaaatgtgtttgggttggcatccaccgttgtagaaagctaaattgattttttaatttatgtgtaagttttgtacaaggaatgcccctaaaatgtttcagcaggctgtcacctattacacttatgatataatccattcacacattcatttattcatttattcatt

SEQ ID NO: 7037 - DNA, 1936 bp, Homo sapiens
  source 1..1936: mol_type = unassigned DNA
ctttgaaaaagacttcttttgagctaactttcttatactggtacctttctaatctcactacaatatgtaacattggtgttcgatctcaagtatttctgaatatattcccctatccacagaaatatactctgggggaaaaaaaatagaacaaattcttgccgtcctgaccattgaacaagagactaattagacaatggggctagaaaaacctcaaagtaaactggaaggaggcatgcatccccagctgataccttcggttattgctgtagttttcatcttacttctcagtgtctgttttattgcaagttgtttggtgactcatcacaacttttcacgctgtaagagaggcacaggagtgcacaagttagagcaccatgcaaagctcaaatgcatcaaagagaaatcagaactgaaaagtgctgaagggagcacctggaactgttgtcctattgactggagagccttccagtccaactgctattttcctcttactgacaacaagacgtgggctgagagtgaaaggaactgttcagggatgggggcccatctgatgaccatcagcacggaagctgagcagaactttattattcagtttctggatagacggctttcctatttccttggacttagagatgagaatgccaaaggtcagtggcgttgggtggaccagacgccatttaacccacgcagagtattctggcataagaatgaacccgacaactctcagggagaaaactgtgttgttcttgtttataaccaagataaatgggcctggaatgatgttccttgtaactttgaagcaagtaggatttgtaaaatacctggaacaacattgaactagaaactcagaaagtggtccttgtgatggaaagagaaaagaaaaaccaattagaataaggcagaatgtacgtgcgtcattggaacacagaaaacatgctggttcatacagcgtttttagtcataatggtcttttttattttgtttgattcattcgagacaacatgtgtgtatgtgtgtgtgtgtgtgtgtagataatgtggtttttgtatggtgtttgatggaaggaataatctttctttgctttcttagtagtatttcaaggtgtttacttttcaattggtgtgcactgaatgcatgtatggaagaatagcgtgaataatgcaatctctttgtcatttttccccttctcagactcttagctcttaaaattcaaagatgggatattctaactggtagtggtgcatcatttttaacccaaatattgcaagcactttaaagatttgaaaccacatttttattgtttgatgtttcattttcagactttttaatgtcagtcattacaattacattgcatgaggaaaatttttccagaacaacagtgtggaatagttctgaattatgctgttctacagatagaaaaaaagtccaaatgcctttaaaaatttacttcttactccacccaacacgtttttgcaaagcaagaagtctttgtaagacaccttaaacaaagtccttcaattctacagcagaggaaataaaatcccccagaagccaaagggctcaccttcacattgttagttcatgacagacccaggtgtgcttcattagagataacatacattccctttggtatcacaggaagttactggggattactcgacctcattacttagctaacgactggataaaatttcttaattgtttgaagtaacattgtattcgtgtttgcattattaatttgaatagaaaataatcacattttcaacccatttatacaaattgttaatgtttctttagagctgtataactatagtttgaactagcaaggaagttattgttttgacaaccagaaattatgcttttctggtgcatgaaacattaattgcaaagggcagtcacatccaactttaataaaatatggtggtctttcttaaaa

SEQ ID NO: 7038 - DNA, 583 bp, Homo sapiens
  source 1..583: mol_type = unassigned DNA
gcctggcaaggtttagcggaggcctgcagtctgtctgctcctcagcaccatgaattcgactccatgcagctctccataaatatactctgggggaaaaaaaatagaacaaattcttgccgtcctgaccattgaacaagagactaattagacaatggggctagaaaaacctcaaagtaaactggaaggaggcatgcatccccagctgataccttcggttattgctgtagttttcatcttacttctcagtgtctgttttattgcaagttgtttggtgactcatcacaacttttcacgctgtaagagaggcacaggagtgcacaagttagagcaccatgcaaagctcaaatgcatcaaagagaaatcagaactgaaaagtgctgaagggagcacctggaactgttgtcctattgactggagagccttccagtccaactgctattttcctcttactgacaacaagacgtgggctgagagtgaaaggaactgttcagggatgggggcccatctgatgaccatcagcacggaagctgagcagaactttattattcagtttctggatagacggctttcctatttccttgga

SEQ ID NO: 7039 - DNA, 2159 bp, Homo sapiens
  source 1..2159: mol_type = unassigned DNA
aatattctacatctatcggagctgaacttcctaaaagacaaagtgtttatctttcaagattcattctccctgaatcttaccaacaaaacactcctgaggagaaagaaagagagggagggagagaaaaagagagagagagaaacaaaaaaccaaagagagagaaaaaatgaattcatctaaatcatctgaaacacaatgcacagagagaggatgcttctcttcccaaatgttcttatggactgttgctgggatccccatcctatttctcagtgcctgtttcatcaccagatgtgttgtgacatttcgcatctttcaaacctgtgatgagaaaaagtttcagctacctgagaatttcacagagctctcctgctacaattatggatcaggttcagtcaagaattgttgtccattgaactgggaatattttcaatccagctgctacttcttttctactgacaccatttcctgggcgttaagtttaaagaactgctcagccatgggggctcacctggtggttatcaactcacaggaggagcaggaattcctttcctacaagaaacctaaaatgagagagttttttattggactgtcagaccaggttgtcgagggtcagtggcaatgggtggacggcacacctttgacaaagtctctgagcttctgggatgtaggggagcccaacaacatagctaccctggaggactgtgccaccatgagagactcttcaaacccaaggcaaaattggaatgatgtaacctgtttcctcaattattttcggatttgtgaaatggtaggaataaatcctttgaacaaaggaaaatctctttaagaacagaaggcacaactcaaatgtgtaaagaaggaagagcaagaacatggccacacccaccgccccacacgagaaatttgtgcgctgaacttcaaaggacttcataagtatttgttactctgatataaataaaaataagtagttttaaatgttataattcatgttactggctgaagtgcattttctctctacgttagtctcaggtcctcttcccagaatttacaaagcaattcactaccttttgctacatttgcctcattttttagtgttcgtatgaaagtacagggacacggagccaagacagagtctagcaaagaaggggattttggaaggtgccttccaaaaatctcctgaatccgggctctgtagcaggtcctcttctttctagcttctgacaagtctgtcttctcttcttggtttcataccgttcttatctcctgcccaagcatatatcgtctctttactcccctgtataatgagtaagaagcttcttcaagtcatgaaacttattcctgctcagaataccggtgtggcctttctggctacaggcctccactgcaccttcttagggaagggcatgccagccatcagctccaaacaggctgtaaccaagtccacccatccctggggcttcctttgctctgccttattttcaattgactgaatggatctcaccagattttgtatctattgctcagctaggacccgagtccaatagtcaatttattctaagcgaacattcatctccacactttcctgtctcaagcccatccattatttcttaacttttattttagctttcgggggtacatgttaaaggctttttatataggtaaactcatgtcgtggaggtttgttgtacagattatttcatcacccaggtattaagcccagtgcctaatattgtttttttcggctcctctccctcctcctaccttccgccctcaagtagactccagtgtctgttattcccttctttgtgtttatgaattctcatcatttagctcccacttataagtgaggacatgcagtatttggttttctgttcccatgtttgctaaggataatggtctccagttctaccgatgttcccacaaaagacataatcttcttttttaaggctgcttagtattccatggtatctatgtatcacattttctctatccaatctattgttgactcacatttagattgattccatgtttttgctattgtgaatagtgctgcaatgaacattcgtgtgcatgtgtctttatggtagaaagatttatatttctctgagtatgtatccagtaatagcccattcatttattgcataaaattctaccaatac

SEQ ID NO: 7040 - DNA, 1868 bp, Homo sapiens
  source 1..1868: mol_type = unassigned DNA
acccagcttcctgtttgtcttcctgagagacagtagatttagaaagtgaggatcagagggtggaaaataaaagctgtggtccccaggagtcctgaacatctggggacagcgggaaaacatgagtgactccaaggaaccaagggtgcagcagctgggcctcctggaagaagatccaacaaccagtggcatcagactttttccaagagactttcaattccagcagatacatggccacaagagctctacagggtgtcttggccatggcgccctggtgctgcaactcctctccttcatgctcttggctggggtcctggtggccatccttgtccaagtgtccaaggtccccagctccctaagtcaggaacaatccgagcaagacgcaatctaccagaacctgacccagcttaaagctgcagtgggtgagctctcagagaaatccaagctgcaggagatctaccaggagctgacccagctgaaggctgcagtggtgggtgagttgccagagaaatccaagctgcaggagatctaccaggagctgacccggctgaaggctgcagtgggtgagttgccagagaaatccaagctgcaggagatctaccaggagctgacccggctgaaggctgcagtgggtgagttgccagagaaatccaagctgcaggagatctaccaggagctgacggagctgaaggctgcagtgggtgagttgccagagaaatccaagctgcaggagatctaccaggagctgacccagctgaaggctgcagtgggtgagttgccagaccagtccaagcagcagcaaatctatcaagaactgaccgatttgaagactgcatttgaacgcctgtgccgccactgtcccaaggactggacattcttccaaggaaactgttacttcatgtctaactcccagcggaactggcacgactccgtcaccgcctgccaggaagtgagggcccagctcgtcgtaatcaaaactgctgaggagcagaacttcctacagctgcagacttccaggagtaaccgcttctcctggatgggactttcagacctaaatcaggaaggcacgtggcaatgggtggacggctcacctctgtcacccagcttccagcggtactggaacagtggagaacccaacaatagcgggaatgaagactgtgcggaatttagtggcagtggctggaacgacaatcgatgtgacgttgacaattactggatctgcaaaaagcccgcagcctgcttcagagacgaatagttgtttccctgctagcctcagcctccattgtggtatagcagaacttcacccacttgtaagccagcgcttcttctctccatccttggaccttcacaaatgccctgagacggttctctgttcgatttttcatcccctatgaacctgggtcttattctgtccttctgatgcctccaagtttccctggtgtagagcttgtgttcttggcccatccttggagctttataagtgacctgagtgggatgcatttagggggcgggcttggtatgttgtatgaatccactctctgttccttttggagattagactatttggattcatgtgtagctgccctgtcccctggggctttatctcatccatgcaaactaccatctgctcaacttccagctacaccccgtgcacccttttgactggggacttgctggttgaaggagctcatcttgcaggctggaagcaccagggaattaattcccccagtcaaccaatggcatccagagagggcatggaggctccatacaacctcttccacccccacatctttctttgtcctatacatgtcttccatttggctgtttctgagttgtagcctttataataaagtggtaaatgttgtaactgc

SEQ ID NO: 7041 - DNA, 1934 bp, Homo sapiens
  source 1..1934: mol_type = unassigned DNA
acccagcttcctgtttgtcttcctgagagacagtagatttagaaagtgaggatcagagggtggaaaataaaagctgtggtccccaggagtcctgaacatctggggacagcgggaaaacatgagtgactccaaggaaccaagggtgcagcagctgggcctcctggaagaagatccaacaaccagtggcatcagactttttccaagagactttcaattccagcagatacatggccacaagagctctacagggtgtcttggccatggcgccctggtgctgcaactcctctccttcatgctcttggctggggtcctggtggccatccttgtccaagtgtccaaggtccccagctccctaagtcaggaacaatccgagcaagacgcaatctaccagaacctgacccagcttaaagctgcagtgggtgagctctcagagaaatccaagctgcaggagatctaccaggagctgacccagctgaaggctgcagtgggtgagttgccagagaaatccaagctgcaggagatctaccaggagctgacccggctgaaggctgcagtgggtgagttgccagagaaatccaagctgcaggagatctaccaggagctgacccggctgaaggctgcagtgggtgagttgccagagaaatccaagctgcaggagatctaccaggagctgacccggctgaaggctgcagtgggtgagttgccagagaaatccaagctgcaggagatctaccaggagctgacggagctgaaggctgcagtgggtgagttgccagagaaatccaagctgcaggagatctaccaggagctgacccagctgaaggctgcagtgggtgagttgccagaccagtccaagcagcagcaaatctatcaagaactgaccgatttgaagactgcatttgaacgcctgtgccgccactgtcccaaggactggacattcttccaaggaaactgttacttcatgtctaactcccagcggaactggcacgactccgtcaccgcctgccaggaagtgagggcccagctcgtcgtaatcaaaactgctgaggagcagaacttcctacagctgcagacttccaggagtaaccgcttctcctggatgggactttcagacctaaatcaggaaggcacgtggcaatgggtggacggctcacctctgtcacccagcttccagcggtactggaacagtggagaacccaacaatagcgggaatgaagactgtgcggaatttagtggcagtggctggaacgacaatcgatgtgacgttgacaattactggatctgcaaaaagcccgcagcctgcttcagagacgaatagttgtttccctgctagcctcagcctccattgtggtatagcagaacttcacccacttgtaagccagcgcttcttctctccatccttggaccttcacaaatgccctgagacggttctctgttcgatttttcatcccctatgaacctgggtcttattctgtccttctgatgcctccaagtttccctggtgtagagcttgtgttcttggcccatccttggagctttataagtgacctgagtgggatgcatttagggggcgggcttggtatgttgtatgaatccactctctgttccttttggagattagactatttggattcatgtgtagctgccctgtcccctggggctttatctcatccatgcaaactaccatctgctcaacttccagctacaccccgtgcacccttttgactggggacttgctggttgaaggagctcatcttgcaggctggaagcaccagggaattaattcccccagtcaaccaatggcatccagagagggcatggaggctccatacaacctcttccacccccacatctttctttgtcctatacatgtcttccatttggctgtttctgagttgtagcctttataataaagtggtaaatgttgtaactgc

SEQ ID NO: 7042 - DNA, 1781 bp, Homo sapiens
  source 1..1781: mol_type = unassigned DNA
acccagcttcctgtttgtcttcctgagagacagtagatttagaaagtgaggatcagagggtggaaaataaaagctgtggtccccaggagtcctgaacatctggggacagcgggaaaacatgagtgactccaaggaaccaagggtgcagcagctgggcctcctggggtgtcttggccatggcgccctggtgctgcaactcctctccttcatgctcttggctggggtcctggtggccatccttgtccaagtgtccaaggtccccagctccctaagtcaggaacaatccgagcaagacgcaatctaccagaacctgacccagcttaaagctgcagtgggtgagctctcagagaaatccaagctgcaggagatctaccaggagctgacccagctgaaggctgcagtgggtgagttgccagagaaatccaagctgcaggagatctaccaggagctgacccggctgaaggctgcagtgggtgagttgccagagaaatccaagctgcaggagatctaccaggagctgacccggctgaaggctgcagtgggtgagttgccagagaaatccaagctgcaggagatctaccaggagctgacggagctgaaggctgcagtgggtgagttgccagagaaatccaagctgcaggagatctaccaggagctgacccagctgaaggctgcagtgggtgagttgccagaccagtccaagcagcagcaaatctatcaagaactgaccgatttgaagactgcatttgaacgcctgtgccgccactgtcccaaggactggacattcttccaaggaaactgttacttcatgtctaactcccagcggaactggcacgactccgtcaccgcctgccaggaagtgagggcccagctcgtcgtaatcaaaactgctgaggagcagaacttcctacagctgcagacttccaggagtaaccgcttctcctggatgggactttcagacctaaatcaggaaggcacgtggcaatgggtggacggctcacctctgtcacccagcttccagcggtactggaacagtggagaacccaacaatagcgggaatgaagactgtgcggaatttagtggcagtggctggaacgacaatcgatgtgacgttgacaattactggatctgcaaaaagcccgcagcctgcttcagagacgaatagttgtttccctgctagcctcagcctccattgtggtatagcagaacttcacccacttgtaagccagcgcttcttctctccatccttggaccttcacaaatgccctgagacggttctctgttcgatttttcatcccctatgaacctgggtcttattctgtccttctgatgcctccaagtttccctggtgtagagcttgtgttcttggcccatccttggagctttataagtgacctgagtgggatgcatttagggggcgggcttggtatgttgtatgaatccactctctgttccttttggagattagactatttggattcatgtgtagctgccctgtcccctggggctttatctcatccatgcaaactaccatctgctcaacttccagctacaccccgtgcacccttttgactggggacttgctggttgaaggagctcatcttgcaggctggaagcaccagggaattaattcccccagtcaaccaatggcatccagagagggcatggaggctccatacaacctcttccacccccacatctttctttgtcctatacatgtcttccatttggctgtttctgagttgtagcctttataataaagtggtaaatgttgtaactgc

SEQ ID NO: 7043 - DNA, 1821 bp, Homo sapiens
  source 1..1821: mol_type = unassigned DNA
acccagcttcctgtttgtcttcctgagagacagtagatttagaaagtgaggatcagagggtggaaaataaaagctgtggtccccaggagtcctgaacatctggggacagcgggaaaacatgagtgactccaaggaaccaagggtgcagcagctgggcctcctggaagaagatccaacaaccagtggcatcagactttttccaagagactttcaattccagcagatacatggccacaagagctctacagggtgtcttggccatggcgccctggtgctgcaactcctctccttcatgctcttggctggggtcctggtggccatccttgtccaagtgtccaaggtccccagctccctaagtcaggaacaatccgagcaagacgcaatctaccagaacctgacccagcttaaagctgcagtgggtgagctctcagagaaatccaagctgcaggagatctaccaggagctgacccagctgaaggctgcagtgggtgagttgccagagaaatccaagctgcaggagatctaccaggagctgacccggctgaaggctgcagtgggtgagttgccagagaaatccaagctgcaggagatctaccaggagctgacccggctgaaggctgcagtgggtgagttgccagagaaatccaagctgcaggagatctaccaggagctgacccggctgaaggctgcagtgggtgagttgccagagaaatccaagctgcaggagatctaccaggagctgacggagctgaaggctgcagtgggtgagttgccagagaaatccaagctgcaggagatctaccaggagctgacccagctgaaggctgcagtgggtgagttgccagaccagtccaagcagcagcaaatctatcaagaactgaccgatttgaagactgcatttgaacgcctgtgccgccactgtcccaaggactggacattcttccaaggaaactgttacttcatgtctaactcccagcggaactggcacgactccgtcaccgcctgccaggaagtgagggcccagctcgtcgtaatcaaaactgctgaggagcagcttccagcggtactggaacagtggagaacccaacaatagcgggaatgaagactgtgcggaatttagtggcagtggctggaacgacaatcgatgtgacgttgacaattactggatctgcaaaaagcccgcagcctgcttcagagacgaatagttgtttccctgctagcctcagcctccattgtggtatagcagaacttcacccacttgtaagccagcgcttcttctctccatccttggaccttcacaaatgccctgagacggttctctgttcgatttttcatcccctatgaacctgggtcttattctgtccttctgatgcctccaagtttccctggtgtagagcttgtgttcttggcccatccttggagctttataagtgacctgagtgggatgcatttagggggcgggcttggtatgttgtatgaatccactctctgttccttttggagattagactatttggattcatgtgtagctgccctgtcccctggggctttatctcatccatgcaaactaccatctgctcaacttccagctacaccccgtgcacccttttgactggggacttgctggttgaaggagctcatcttgcaggctggaagcaccagggaattaattcccccagtcaaccaatggcatccagagagggcatggaggctccatacaacctcttccacccccacatctttctttgtcctatacatgtcttccatttggctgtttctgagttgtagcctttataataaagtggtaaatgttgtaactgc

SEQ ID NO: 7044 - DNA, 1766 bp, Homo sapiens
  source 1..1766: mol_type = unassigned DNA
acccagcttcctgtttgtcttcctgagagacagtagatttagaaagtgaggatcagagggtggaaaataaaagctgtggtccccaggagtcctgaacatctggggacagcgggaaaacatgagtgactccaaggaaccaagggtgcagcagctgggcctcctggtgtccaaggtccccagctccctaagtcaggaacaatccgagcaagacgcaatctaccagaacctgacccagcttaaagctgcagtgggtgagctctcagagaaatccaagctgcaggagatctaccaggagctgacccagctgaaggctgcagtgggtgagttgccagagaaatccaagctgcaggagatctaccaggagctgacccggctgaaggctgcagtgggtgagttgccagagaaatccaagctgcaggagatctaccaggagctgacccggctgaaggctgcagtgggtgagttgccagagaaatccaagctgcaggagatctaccaggagctgacccggctgaaggctgcagtgggtgagttgccagagaaatccaagctgcaggagatctaccaggagctgacggagctgaaggctgcagtgggtgagttgccagagaaatccaagctgcaggagatctaccaggagctgacccagctgaaggctgcagtgggtgagttgccagaccagtccaagcagcagcaaatctatcaagaactgaccgatttgaagactgcatttgaacgcctgtgccgccactgtcccaaggactggacattcttccaaggaaactgttacttcatgtctaactcccagcggaactggcacgactccgtcaccgcctgccaggaagtgagggcccagctcgtcgtaatcaaaactgctgaggagcagaacttcctacagctgcagacttccaggagtaaccgcttctcctggatgggactttcagacctaaatcaggaaggcacgtggcaatgggtggacggctcacctctgtcacccagcttccagcggtactggaacagtggagaacccaacaatagcgggaatgaagactgtgcggaatttagtggcagtggctggaacgacaatcgatgtgacgttgacaattactggatctgcaaaaagcccgcagcctgcttcagagacgaatagttgtttccctgctagcctcagcctccattgtggtatagcagaacttcacccacttgtaagccagcgcttcttctctccatccttggaccttcacaaatgccctgagacggttctctgttcgatttttcatcccctatgaacctgggtcttattctgtccttctgatgcctccaagtttccctggtgtagagcttgtgttcttggcccatccttggagctttataagtgacctgagtgggatgcatttagggggcgggcttggtatgttgtatgaatccactctctgttccttttggagattagactatttggattcatgtgtagctgccctgtcccctggggctttatctcatccatgcaaactaccatctgctcaacttccagctacaccccgtgcacccttttgactggggacttgctggttgaaggagctcatcttgcaggctggaagcaccagggaattaattcccccagtcaaccaatggcatccagagagggcatggaggctccatacaacctcttccacccccacatctttctttgtcctatacatgtcttccatttggctgtttctgagttgtagcctttataataaagtggtaaatgttgtaactgc

SEQ ID NO: 7045 - DNA, 1733 bp, Homo sapiens
  source 1..1733: mol_type = unassigned DNA
acccagcttcctgtttgtcttcctgagagacagtagatttagaaagtgaggatcagagggtggaaaataaaagctgtggtccccaggagtcctgaacatctggggacagcgggaaaacatgagtgactccaaggaaccaagggtgcagcagctgggcctcctggaagaagatccaacaaccagtggcatcagactttttccaagagactttcaattccagcagatacatggccacaagagctctacagttccttttcttcttggcccagtgtccaaggtccccagctccctaagtcaggaacaatccgagcaagacgcaatctaccagaacctgacccagcttaaagctgcagtgggtgagctctcagagaaatccaagctgcaggagatctaccaggagctgacccagctgaaggctgcagtgggtgagttgccagagaaatccaagctgcaggagatctaccaggagctgacccggctgaaggctgcagtgggtgagttgccagagaaatccaagctgcaggagatctaccaggagctgacccggctgaaggctgcagtgggtgagttgccagagaaatccaagctgcaggagatctaccaggagctgacggagctgaaggctgcagtgggtgagttgccagagaaatccaagctgcaggagatctaccaggagctgacccagctgaaggctgcagtggaacgcctgtgccgccactgtcccaaggactggacattcttccaaggaaactgttacttcatgtctaactcccagcggaactggcacgactccgtcaccgcctgccaggaagtgagggcccagctcgtcgtaatcaaaactgctgaggagcagaacttcctacagctgcagacttccaggagtaaccgcttctcctggatgggactttcagacctaaatcaggaaggcacgtggcaatgggtggacggctcacctctgtcacccagcttccagcggtactggaacagtggagaacccaacaatagcgggaatgaagactgtgcggaatttagtggcagtggctggaacgacaatcgatgtgacgttgacaattactggatctgcaaaaagcccgcagcctgcttcagagacgaatagttgtttccctgctagcctcagcctccattgtggtatagcagaacttcacccacttgtaagccagcgcttcttctctccatccttggaccttcacaaatgccctgagacggttctctgttcgatttttcatcccctatgaacctgggtcttattctgtccttctgatgcctccaagtttccctggtgtagagcttgtgttcttggcccatccttggagctttataagtgacctgagtgggatgcatttagggggcgggcttggtatgttgtatgaatccactctctgttccttttggagattagactatttggattcatgtgtagctgccctgtcccctggggctttatctcatccatgcaaactaccatctgctcaacttccagctacaccccgtgcacccttttgactggggacttgctggttgaaggagctcatcttgcaggctggaagcaccagggaattaattcccccagtcaaccaatggcatccagagagggcatggaggctccatacaacctcttccacccccacatctttctttgtcctatacatgtcttccatttggctgtttctgagttgtagcctttataataaagtggtaaatgttgtaactgc

SEQ ID NO: 7046 - DNA, 1898 bp, Homo sapiens
  source 1..1898: mol_type = unassigned DNA
acccagcttcctgtttgtcttcctgagagacagtagatttagaaagtgaggatcagagggtggaaaataaaagctgtggtccccaggagtcctgaacatctggggacagcgggaaaacatgagtgactccaaggaaccaagggtgcagcagctgggcctcctggaagaagatccaacaaccaactttcaattccagcagatacatggccacaagagctctacagggtgtcttggccatggcgccctggtgctgcaactcctctccttcatgctcttggctggggtcctgccaagattgtccaaggtccccagctccctaagtcaggaacaatccgagcaagacgcaatctaccagaacctgacccagcttaaagctgcagtgggtgagctctcagagaaatccaagctgcaggagatctaccaggagctgacccagctgaaggctgcagtgggtgagttgccagagaaatccaagctgcaggagatctaccaggagctgacccggctgaaggctgcagtgggtgagttgccagagaaatccaagctgcaggagatctaccaggagctgacccggctgaaggctgcagtgggtgagttgccagagaaatccaagctgcaggagatctaccaggagctgacccggctgaaggctgcagtgggtgagttgccagagaaatccaagctgcaggagatctaccaggagctgacggagctgaaggctgcagtgggtgagttgccagagaaatccaagctgcaggagatctaccaggagctgacccagctgaaggctgcagtgggtgagttgccagaccagtccaagcagcagcaaatctatcaagaactgaccgatttgaagactgcatttgaacgcctgtgccgccactgtcccaaggactggacattcttccaaggaaactgttacttcatgtctaactcccagcggaactggcacgactccgtcaccgcctgccaggaagtgagggcccagctcgtcgtaatcaaaactgctgaggagcagaacttcctacagctgcagacttccaggagtaaccgcttctcctggatgggactttcagacctaaatcaggaaggcacgtggcaatgggtggacggctcacctctgtcacccagcttccagcggtactggaacagtggagaacccaacaatagcgggaatgaagactgtgcggaatttagtggcagtggctggaacgacaatcgatgtgacgttgacaattactggatctgcaaaaagcccgcagcctgcttcagagacgaatagttgtttccctgctagcctcagcctccattgtggtatagcagaacttcacccacttgtaagccagcgcttcttctctccatccttggaccttcacaaatgccctgagacggttctctgttcgatttttcatcccctatgaacctgggtcttattctgtccttctgatgcctccaagtttccctggtgtagagcttgtgttcttggcccatccttggagctttataagtgacctgagtgggatgcatttagggggcgggcttggtatgttgtatgaatccactctctgttccttttggagattagactatttggattcatgtgtagctgccctgtcccctggggctttatctcatccatgcaaactaccatctgctcaacttccagctacaccccgtgcacccttttgactggggacttgctggttgaaggagctcatcttgcaggctggaagcaccagggaattaattcccccagtcaaccaatggcatccagagagggcatggaggctccatacaacctcttccacccccacatctttctttgtcctatacatgtcttccatttggctgtttctgagttgtagcctttataataaagtggtaaatgttgtaactgc

SEQ ID NO: 7047 - DNA, 3511 bp, Homo sapiens
  source 1..3511: mol_type = unassigned DNA
caggaagaggtatttcttggggatgctaccaaggcagagactgtgaagaaggaagaacgttgcttgggcaaaaggagcatattctcaggagacggggcccctgcctgccacaccaagcattaggccaccaggaagacccccatctgcaagcaagcctagccttccagggagaaagaggcccctgcagctccttcatcatgaactggcacatgatcatctctgggcttattgtggtagtgcttaaagttgttggaatgaccttatttctactttatttcccacagatttttaacaaaagtaacgatggtttcaccaccaccaggagctatggaacagtctcacagatttttgggagcagttccccaagtcccaacggcttcattaccacaaggagctatggaacagtctgccccaaagactgggaattttatcaagcaagatgttttttcttatccacttctgaatcatcttggaatgaaagcagggacttttgcaaaggaaaaggatccacattggcaattgtcaacacgccagagaaactgaagtttcttcaggacataactgatgctgagaagtattttattggcttaatttaccatcgtgaagagaaaaggtggcgttggatcaacaactctgtgttcaatggcaatgttaccaatcagaatcagaatttcaactgtgcgaccattggcctaacaaagacatttgatgctgcatcatgtgacatcagctaccgcaggatctgtgagaagaatgccaaatgatcacagttccctgtgacaagaactatacttgcaactctttttgaatccatacaggtcgtctggccaatgattcttttacttacctatctgtctaccagtagcggtccttgcccatttgggaaactgagcttctttcttctgcactgggggactggatgctagccatctccaggagacaggatcagttttacggaaacaactcagttagtatagagatgaggtccgcttctgtagtactgagcatttctgactgatcaaaaaggcctagtctgttgacagggtttgttttattttagcctcagagtataccatactactagggagtaactgtagagtgagaaattataaacattatttagggattaccatggtggaagagggataaacataggtcctgtgacttcgtctctgttctcaagggaaccccattcacatgcccctcctaactccacaagcgagggtagcagaggctctcctcagtctgaactaaggcttggccttggggagggctcctagtgctgagcttggagcagcacggacagcagcattgtttatgggaatggagagaggtctgggcaggataggaaccttcttggagacccctttgaagaaaaccaggcagccaagggagccaaacacactagatttctgttcttcagcaaagccctgaagagacacttaagctaaaaattcccttgtcatatttctgaaactccattataacatatgtaactcctttgtaaccaaaatttaggtaagcaggcttcctttgctctgaaggttttgagtacctggctgtatttgttgagtatttttaaaattttggatagtctcttaggcaacaataatcacaatatattcatcccttcagttctggagaaagcctgataccaggcacagcctactgaccccaaggagcctggcactgattggcatcacattgatctagaactggtccagccgacgaagagtaggaaaagagaagggctgctcagggaaacattggctgggggcacggaataagcacatagtaaaaagggaacatcagggtcaaatggaaatcacctgagacaggaaacagggagttcatttggccacactggaagaaaggcaagaaagaggaagacaagtcttggagtaccctggctgttctccacactcacaagacatcagctatatactctgcttggtgcataagaaagagaaaagagatgccttttgtgttttgagtaagaataattaaaccataaggaagaccatgtataaaactgatggaaataatagtcaccaaagtacagcacataccattttgtgtctaataacaatgtagcacagtaatgactgtacatgtcattgtatgtataccaaacaagattgttgtaaatcatattttttattacaacactaagttctgcttctgcattcctaggtttcatcatttttggctccttagcatggccacttacaattttttaacatgagataacacatcaggtgtcagaacttgcttgaagggaattaccagaagtaatttgtgtttgagatggggtggaaattggaattatattagtagccggtggagatacaagttctctgactgtgttgggaaaggataagtgctaccgttgagaagggaagaaaggctgagtctaggtggagaaaaatatcaacagaactctagccaaaggcaagccccagaactcagacaacagaaaggaaatcctaatccttctgttttgagaagagagaactgtagttgcttcacttcctatttcatgacagaataactgcaaacttttaagatcaggaaatgtagacatctagtgatttctttagtagacagtttaatttcccccaagattaggagacacttctgtgcaggttctaaaaggagcccaatggcctggggtgggagtggggagtagatagggaatatgtgggatttggtttaagttcatcattggaagagttcctggatccttgcaagcttagataaatgtgatctttattagatagcagtggcatgctttaaaaaaaaaaaaggcaatgaaaatttagcaagccactgaatttgagttttcactttgtttctaatatgctgtgtgaatcagtacagttttcttaccctttcttggtcttaatttccttactgataaaatggggtagtaatacctatctcaaaaaattattgcacatattaaataacattcctctatgtatctcaatggcattagacattaggagaagcattttgtggaggatttgaagttgagatcttcatccaagaagtagcttttcaatttgctagaagcttaatgtaggcaagccacttcatttttcagaacttgtttactcatttataatatgggaataaaaatttgtgcaagtcagagaagggtgccttaaaaatgttgtggccaagccacatgagatcaaagacacacttttcatgacctcaaatgtgggcccagcctaggtcagccaacccccatccaacccttagactcacgaacaaatccacctgagatcagcagagccaccctagatcagctgaaactctaagcacaaaaataaaaacttatcactgtataccactggagttttctggttatctctcgtatagcaaaatctaactgatgcaatctccatctggccttcatccttctccctttattgtcctttcgtgtattgttcatccagcaaccaggatgatcttgttaaaacattaaacagattctgtcactctt

SEQ ID NO: 7048 - DNA, 1682 bp, Homo sapiens
  source 1..1682: mol_type = unassigned DNA
agttgtaattgtgacttcttcttttgaggtacacttaatgttggaagtctcttagtcctataagagtgtgtagcagtttgtccctgagctctagcttctttaaatgaagctgagtctctgggcaacatctttagggagagaggtacaaaaggttcctggaccttctcaacacagggagcctgcataatgatgcaagagcagcaacctcaaagtacagagaaaagaggctggttgtccctgagactctggtctgtggctgggatttccattgcactcctcagtgcttgcttcattgtgagctgtgtagtaacttaccattttacatatggtgaaactggcaaaaggctgtctgaactacactcatatcattcaagtctcacctgcttcagtgaagggacaaaggtgccagcctggggatgttgcccagcttcttggaagtcatttggttccagttgctacttcatttccagtgaagagaaggtttggtctaagagtgagcagaactgtgttgagatgggagcacatttggttgtgttcaacacagaagcagagcagaatttcattgtccagcagctgaatgagtcattttcttattttctggggctttcagacccacaaggtaataataattggcaatggattgataagacaccttatgagaaaaatgtcagattttggcacctaggtgagcccaatcattctgcagagcaatgtgcttcaatagtcttctggaaacctacaggatggggctggaatgatgttatctgtgaaactagaaggaattcaatatgtgagatgaataagatttacctatgagtagaagcttaattggaaagaagagaagaattactgacgtaattttttccctgacgtctttaaaattgaaccctatcatgaaatgataatttcttcctgaatttacacataatccttatgttatagaggttcacagaaatggaaagatacctgtttccctttaatcaatcttctcgtttcctcttttccattaatgatagaatgcacccttcctctctttgttccattctttcacttgttattcatttttttctttcttcacacttcattacacaaatatttattgtttcagagactgtactattttgtttgttagaagatttataaggcagtatcttttgaaaattatgactttccttcctcaatataccataaagaaatctttttggtcaagatggtagttggaactacaatcatctgaaggcctgacaagagttgaaagacatgttttctagatggctcactcacatggctggcaacttggtgttggctattaatgtaacctggaaataaattttattctgcagttagggatttggcattttatatatgttgattcaatcaagtttggcaagcagggtgttcgatactgctatatcctgtattcttggtttatttgttttatttctgagaaatatgtgttaagatctctcgctgattgggaatttgtctatttctcatttaaattttgtcaaatctttctttgcttgcaagcatttcttgttacccaaatctaatctattcctgaaaatatgatggttagcaaagtttgagataactagagcctgtaatccatcattttaaatggcaatgataatgacagtttatttttatgttatataaaaacctcaacaaattttccaaac

SEQ ID NO: 7049 - DNA, 1154 bp, Homo sapiens
  source 1..1154: mol_type = unassigned DNA
agacagtcatctcaggagcagaaagaaaagagctcccaaatgctatatctattcaggggctctcaagaacaatggaatatcatcctgatttagaaaatttggatgaagatggatatactcaattacacttcgactctcaaagcaataccaggatagctgttgtttcagagaaaggatcgtgtgctgcatctcctccttggcgcctcattgctgtaattttgggaatcctatgcttggtaatactggtgatagctgtggtcctgggtaccatgggggttctttccagcccttgtcctcctaattggattatatatgagaagagctgttatctattcagcatgtcactaaattcctgggatggaagtaaaagacaatgctggcaactgggctctaatctcctaaagatagacagctcaaatgaattgatttcagatcagaaccacagctacccaagaaaacccatctccaaattgtgtatggattcacgtgtcagtcatttatgaccaactgtgtagtgtgccctcatatagtatttgtgagaagaagttttcaatgtaagaggaagggtggagaaggagagagaaatatgtgaggtagtaaggaggacagaaaacagaacagaaaagagtaacagctgaggtcaagataaatgcagaaaatgtttagagagcttggccaactgtaatcttaaccaagaaattgaagggagaggctgtgatttctgtatttgtcgacctacaggtaggctagtattatttttctagttagtagatccctagacatggaatcagggcagccaagcttgagtttttattttttatttatttatttttttgagatagggtctcactttgttacccaggctggagtgcagtggcacaatctcgactcactgcagctatctctcgcctcagcccctcaagtagctgggactacaggtgcatgccaccatgccaggctaatttttggtgttttttgtagagactgggttttgccatgttgaccaagctggtctctaactcctgggcttaagtgatctgcccgccttggcctcccaaagtgctgggattacagatgtgagccaccacacctggccccaagcttgaattttcattctgccattgacttggcatttaccttgggtaagccataag

SEQ ID NO: 7050 - DNA, 1130 bp, Homo sapiens
  source 1..1130: mol_type = unassigned DNA
ggttgaactacttaagcttaatttgttaaactccggtaagtacctagcccacatgatttgactcagagattctcttttgtccacagacagtcatctcaggagcagaaagaaaagagctcccaaatgctatatctattcaggggctctcaagaacaatggaatatcatcctgatttagaaaatttggatgaagatggatatactcaattacacttcgactctcaaagcaataccaggatagctgttgtttcagagaaaggatcgtgtgctgcatctcctccttggcgcctcattgctgtaattttgggaatcctatgcttggtaatactggtgatagctgtggtcctgggtaccatggctatttggagatccaattcaggaagcaacacattggagaatggctactttctatcaagaaataaagagaaccacagtcaacccacacaatcatctttagaagacagtgtgactcctaccaaagctgtcaaaaccacaggggttctttccagcccttgtcctcctaattggattatatatgagaagagctgttatctattcagcatgtcactaaattcctgggatggaagtaaaagacaatgctggcaactgggctctaatctcctaaagatagacagctcaaatgaattgggatttatagtaaaacaagtgtcttcccaacctgataattcattttggataggcctttctcggccccagactgaggtaccatggctctgggaggatggatcaacattctcttctaacttatttcagatcagaaccacagctacccaagaaaacccatctccaaattgtgtatggattcacgtgtcagtcatttatgaccaactgtgtagtgtgccctcatatagtatttgtgagaagaagttttcaatgtaagaggaagggtggagaaggagagagaaatatgtgaggtagtaaggaggacagaaaacagaacagaaaagagtaacagctgaggtcaagataaatgcagaaaatgtttagagagcttggccaactgtaatcttaaccaagaaattgaagggagaggctgtgatttctgtatttgtcgacctacaggtaggctagtattatttttctagttagtagatccctagacatggaatc

SEQ ID NO: 7051 - DNA, 425 bp, Homo sapiens
  source 1..425: mol_type = unassigned DNA
ccacatgatttgactcagagattctcttttgtccacagacagtcatctcaggagcagaaagaaaagagctcccaaatgctatatctattcaggggctctcaagaacaatggaatatcatcctgatttagaaaatttggatgaagatggatatactcaattacacttcgactctcaaagcaataccaggatagctgttgtttcagagaaaggatcgtgtgctgcatctcctccttggcgcctcattgctgtaattttgggaatcctatgcttggtaatactggtgatagctgtggtcctgggtaccatggctggtttcaaagctgtggaattcaaaggataaattaatgaagaaaacaagcggagctgaagaagaaagtacaatatggtgctgtcttcctaatgaaataaattcactaaatggaca

SEQ ID NO: 7052 - DNA, 2446 bp, Homo sapiens
  source 1..2446: mol_type = unassigned DNA
atctggttgaactacttaagcttaatttgttaaactccggtaagtacctagcccacatgatttgactcagagattctcttttgtccacagacagtcatctcaggagcagaaagaaaagagctcccaaatgctatatctattcaggggctctcaagaacaatggaatatcatcctgatttagaaaatttggatgaagatggatatactcaattacacttcgactctcaaagcaataccaggatagctgttgtttcagagaaaggatcgtgtgctgcatctcctccttggcgcctcattgctgtaattttgggaatcctatgcttggtaatactggtgatagctgtggtcctgggtaccatgggggttctttccagcccttgtcctcctaattggattatatatgagaagagctgttatctattcagcatgtcactaaattcctgggatggaagtaaaagacaatgctggcaactgggctctaatctcctaaagatagacagctcaaatgaattgggatttatagtaaaacaagtgtcttcccaacctgataattcattttggataggcctttctcggccccagactgaggtaccatggctctgggaggatggatcaacattctcttctaacttatttcagatcagaaccacagctacccaagaaaacccatctccaaattgtgtatggattcacgtgtcagtcatttatgaccaactgtgtagtgtgccctcatatagtatttgtgagaagaagttttcaatgtaagaggaagggtggagaaggagagagaaatatgtgaggtagtaaggaggacagaaaacagaacagaaaagagtaacagctgaggtcaagataaatgcagaaaatgtttagagagcttggccaactgtaatcttaaccaagaaattgaagggagaggctgtgatttctgtatttgtcgacctacaggtaggctagtattatttttctagttagtagatccctagacatggaatcagggcagccaagcttgagtttttattttttatttatttatttttttgagatagggtctcactttgttacccaggctggagtgcagtggcacaatctcgactcactgcagctatctctcgcctcagcccctcaagtagctgggactacaggtgcatgccaccatgccaggctaatttttggtgttttttgtagagactgggttttgccatgttgaccaagctggtctctaactcctgggcttaagtgatctgcccgccttggcctcccaaagtgctgggattacagatgtgagccaccacacctggccccaagcttgaattttcattctgccattgacttggcatttaccttgggtaagccataagcgaatcttaatttctggctctatcagagttgtttcatgctcaacaatgccattgaagtgcacggtgtgttgccacgatttgaccctcaacttctagcagtatatcagttatgaactgagggtgaaatatatttctgaatagctaaatgaagaaatgggaaaaaatcttcaccacagtcagagcaattttattattttcatcagtatgatcataattatgattatcatcttagtaaaaagcaggaactcctactttttctttatcaattaaatagctcagagagtacatctgccatatctctaatagaatctttttttttttttttttttttgagacagagtttcgctcttgttgcccaggctggagtgcaacggcacgatctcggctcaccgcaacctccgccccctgggttcaagcaattctcctgcctcagcctcccaagtagctgggattacagtcaggcaccaccacacccggctaattttgtatttttttagtagagacagggtttctccatgtcggtcagggtagtcccgaactcctgacctcaagtgatctgcctgcctcggcctcccaagtgctgggattacaggcgtgagccactgcacccagcctagaatcttgtataatatgtaattgtagggaaactgctctcataggaaagttttctgctttttaaatacaaaaatacataaaaatacataaaatctgatgatgaatataaaaaagtaaccaacctcattggaacaagtattaacattttggaatatgttttattagttttgtgatgtactgttttacaatttttaccatttttttcagtaattactgtaaaatggtattattggaatgaaactatatttcctcatgtgctgatttgtcttatttttttcatactttcccactggtgctatttttatttccaatggatatttctgtattactagggaggcatttacagtcctctaatgttgattaatatgtgaaaagaaattgtaccaattttactaaattatgcagtttaaaatggatgattttatgttatgtggatttcatttcaataaaaaaaaactcttatcaaaaaa

SEQ ID NO: 7053 - DNA, 1000 bp, Homo sapiens
  source 1..1000: mol_type = unassigned DNA
atgatttgactcagagattctcttttgtccacagacagtcatctcaggagcagaaagaaaagagctcccaaatgctatatctattcaggggctctcaagaacaatggaatatcatcctgatttagaaaatttggatgaagatggatatactcaattacacttcgactctcaaagcaataccaggatagctgttgtttcagagaaaggggttctttccagcccttgtcctcctaattggattatatatgagaagagctgttatctattcagcatgtcactaaattcctgggatggaagtaaaagacaatgctggcaactgggctctaatctcctaaagatagacagctcaaatgaattgggatttatagtaaaacaagtgtcttcccaacctgataattcattttggataggcctttctcggccccagactgaggtaccatggctctgggaggatggatcaacattctcttctaacttatttcagatcagaaccacagctacccaagaaaacccatctccaaattgtgtatggattcacgtgtcagtcatttatgaccaactgtgtagtgtgccctcatatagtatttgtgagaagaagttttcaatgtaagaggaagggtggagaaggagagagaaatatgtgaggtagtaaggaggacagaaaacagaacagaaaagagtaacagctgaggtcaagataaatgcagaaaatgtttagagagcttggccaactgtaatcttaaccaagaaattgaagggagaggctgtgatttctgtatttgtcgacctacaggtaggctagtattatttttctagttagtagatccctagacatggaatcagggcagccaagcttgagtttttattttttatttatttatttttttgagatagggtctcactttgttacccaggctggagtgcagtggcacaatctcgactcactgcagctatctctcgcctcagcccctcaagtagctgggactacaggtgcatgcca

SEQ ID NO: 7054 - DNA, 881 bp, Homo sapiens
  source 1..881: mol_type = unassigned DNA
atggaatatcatcctgatttagaaaatttggatgaagatggatatactcaattacacttcgactctcaaagcaataccaggatagctgttgtttcagagaaaggatcgtgtgctgcatctcctccttggcgcctcattgctgtaattttgggaatcctatgcttggtaatactggtgatagctgtggtcctgggtaccatgggtactgggcagtttctcaaggatctctcatttttaaataacagaagaaagctatttggagatccaattcaggaagcaacacattggagaatggctactttctatcaagaaataaagagaaccacagtcaacccacacaatcatctttagaagacagtgtgactcctaccaaagctgtcaaaaccacaggggttctttccagcccttgtcctcctaattggattatatatgagaagagctgttatctattcagcatgtcactaaattcctgggatggaagtaaaagacaatgctggcaactgggctctaatctcctaaagatagacagctcaaatgaattgagtctcactctgttgcccaagctagagtgcagtgaagccgcgacatcccaggctcaagtgatcctcccacctcagcttcctgagtagggatttatagtaaaacaagtgtcttcccaacctgataattcattttggataggcctttctcggccccagactgaggtaccatggctctgggaggatggatcaacattctcttctaacttatttcagatcagaaccacagctacccaagaaaacccatctccaaattgtgtatggattcacgtgtcagtcatttatgaccaactgtgtagtgtgccctcatatagtatttgtgagaagaagttttcaatgtaa

SEQ ID NO: 7055 - DNA, 1592 bp, Homo sapiens
  source 1..1592: mol_type = unassigned DNA
atttcctgctcttgaatatctggttgaactacttaagcttaatttgttaaactccggggctctcaagaacaatggaatatcatcctgatttagaaaatttggatgaagatggatatactcaattacacttcgactctcaaagcaataccaggatagctgttgtttcagagaaaggatcgtgtgctgcatctcctccttggcgcctcattgctgtaattttgggaatcctatgcttggtaatactggtgatagctgtggtcctgggtaccatggctatttggagatccaattcaggaagcaacacattggagaatggctactttctatcaagaaataaagagaaccacagtcaacccacacaatcatctttagaagacagtgtgactcctaccaaagctgtcaaaaccacaggggttctttccagcccttgtcctcctaattggattatatatgagaagagctgttatctattcagcatgtcactaaattcctgggatggaagtaaaagacaatgctggcaactgggctctaatctcctaaagatagacagctcaaatgaattgggatttatagtaaaacaagtgtcttcccaacctgataattcattttggataggcctttctcggccccagactgaggtaccatggctctgggaggatggatcaacattctcttctaacttatttcagatcagaaccacagctacccaagaaaacccatctccaaattgtgtatggattcacgtgtcagtcatttatgaccaactgtgtagtgtgccctcatatagtatttgtgagaagaagttttcaatgtaagaggaagggtggagaaggagagagaaatatgtgaggtagtaaggaggacagaaaacagaacagaaaagagtaacagctgaggtcaagataaatgcagaaaatgtttagagagcttggccaactgtaatcttaaccaagaaattgaagggagaggctgtgatttctgtatttgtcgacctacaggtaggctagtattatttttctagttagtagatccctagacatggaatcagggcagccaagcttgagtttttattttttatttatttatttttttgagatagggtctcactttgttacccagcctagaatcttgtataatatgtaattgtagggaaactgctctcataggaaagttttctgctttttaaatacaaaaatacataaaaatacataaaatctgatgatgaatataaaaaagtaaccaacctcattggaacaagtattaacattttggaatatgttttattagttttgtgatgtactgttttacaatttttaccatttttttcagtaattactgtaaaatggtattattggaatgaaactatatttcctcatgtgctgatttgtcttatttttttcatactttcccactggtgctatttttatttccaatggatatttctgtattactagggaggcatttacagtcctctaatgttgattaatatgtgaaaagaaattgtaccaattttactaaattatgcagtttaaaatggatgattttatgttatgtggatttcatttcaataaaaaaaaactcttatcaaaaaa

SEQ ID NO: 7056 - DNA, 625 bp, Homo sapiens
  source 1..625: mol_type = unassigned DNA
atggaatatcatcctgatttagaaaatttggatgaagatggatatactcaattacacttcgactctcaaagcaataccaggatagctgttgtttcagagaaaggatcgtgtgctgcatctcctccttggcgcctcattgctgtaattttgggaatcctatgcttggtaatactggtgatagctgtggtcctgggtaccatggctatttggagatccaattcaggaagcaacacattggagaatggctactttctatcaagaaataaagagaaccacagtcaacccacacaatcatctttagaagacagtgtgactcctaccaaagctgtcaaaaccacaggggttctttccagcccttgtcctcctaattggattatatatgagaagagctgttatctattcagcatgtcactaaattcctgggatggaagtaaaagacaatgctggcaactgggctctaatctcctaaagatagacagctcaaatgaattgatttcagatcagaaccacagctacccaagaaaacccatctccaaattgtgtatggattcacgtgtcagtcatttatgaccaactgtgtagtgtgccctcatatagtatttgtgagaagaagttttcaatgtaa

SEQ ID NO: 7057 - DNA, 10767 bp, Homo sapiens
  source 1..10767: mol_type = unassigned DNA
gttttacctagccacacttgtggaaatcctggagaaatcctgaaaggagttctgcatggaacgagattcaacataggagacaaaatccggtacagctgcctccctggctacatcttggaaggccacgccatcctgacctgcatcgtcagcccaggaaatggtgcatcgtgggacttcccagctcccttttgcagagctgagggagcctgcggaggaaccttacgcgggaccagcagctccatctccagcccgcacttcccttcagagtacgagaacaacgcggactgcacctggaccattctggctgagcccggggacaccattgcgctggtcttcactgactttcagctagaagaaggatatgatttcttagagatcagtggcacggaagctccatccatatggctgactggcatgaacctcccctctccagttatcagtagcaagaattggctacgactccatttcacctctgacagcaaccaccgacgcaaaggatttaacgctcagttccaagtgaaaaaggcgattgagttgaagtcaagaggagtcaagatgctgcccagcaaggatggaagccataaaaactctgtcttgagccaaggaggtgttgcattggtctctgacatgtgtccagatcctgggattccagaaaatggtagaagagcaggttccgacttcagtagggttggtgcaaatgtacagttttcatgtgaggacaattacgtgctccagggatctaaaagcatcacctgtcagagagttacagagacgctcgctgcttggagtgaccacaggcccatctgccgagcgagaacatgtggatccaatctgcgtgggcccagcggcgtcattacctcccctaattatccggttcagtatgaagataatgcacactgtgtgtgggtcatcaccaccaccgacccggacaaggtcatcaagcttgcctttgaagagtttgagctggagcgaggctatgacaccctgacggttggtgatgctgggaaggtgggagacaccagatcggtcttgtacgtgctcacgggatccagtgttcctgacctcattgtgagcatgagcaaccagatgtggctacatctgcagtcggatgatagcattggctcacctgggtttaaagctgtttaccaagaaattgaaaagggagggtgtggggatcctggaatccccgcctatgggaagcggacgggcagcagtttcctccatggagatacactcacctttgaatgcccggcggcctttgagctggtgggggagagagttatcacctgtcagcagaacaatcagtggtctggcaacaagcccagctgtgtattttcatgtttcttcaactttacggcatcatctgggattattctgtcaccaaattatccagaggaatatgggaacaacatgaactgtgtctggttgattatctcggagccaggaagtcgaattcacctaatctttaatgattttgatgttgagcctcagtttgactttctcgcggtcaaggatgatggcatttctgacataactgtcctgggtactttttctggcaatgaagtgccttcccagctggccagcagtgggcatatagttcgcttggaatttcagtctgaccattccactactggcagagggttcaacatcacttacaccacatttggtcagaatgagtgccatgatcctggcattcctataaacggacgacgttttggtgacaggtttctactcgggagctcggtttctttccactgtgatgatggctttgtcaagacccagggatccgagtccattacctgcatactgcaagacgggaacgtggtctggagctccaccgtgccccgctgtgaagctccatgtggtggacatctgacagcgtccagcggagtcattttgcctcctggatggccaggatattataaggattctttacattgtgaatggataattgaagcaaaaccaggccactctatcaaaataacttttgacagatttcagacagaggtcaattatgacaccttggaggtcagagatgggccagccagttcgtccccactgatcggcgagtaccacggcacccaggcaccccagttcctcatcagcaccgggaacttcatgtacctgctgttcaccactgacaacagccgctccagcatcggcttcctcatccactatgagagtgtgacgcttgagtcggattcctgcctggacccgggcatccctgtgaacggccatcgccacggtggagactttggcatcaggtccacagtgactttcagctgtgacccggggtacacactaagtgacgacgagcccctcgtctgtgagaggaaccaccagtggaaccacgccttgcccagctgcgacgctctatgtggaggctacatccaagggaagagtggaacagtcctttctcctgggtttccagatttttatccaaactctctaaactgcacgtggaccattgaagtgtctcatgggaaaggagttcaaatgatctttcacacctttcatcttgagagttcccacgactatttactgatcacagaggatggaagtttttccgagcccgttgccaggctcaccgggtcggtgttgcctcatacgatcaaggcaggcctgtttggaaacttcactgcccagcttcggtttatatcagacttctcaatttcgtacgagggcttcaatatcacattttcagaatatgacctggagccatgtgatgatcctggagtccctgccttcagccgaagaattggttttcactttggtgtgggagactctctgacgttttcctgcttcctgggatatcgtttagaaggtgccaccaagcttacctgcctgggtgggggccgccgtgtgtggagtgcacctctgccaaggtgtgtggccgaatgtggagcaagtgtcaaaggaaatgaaggaacattactgtctccaaattttccatccaattatgataataaccatgagtgtatctataaaatagaaacagaagccggcaagggcatccaccttagaacacgaagcttccagctgtttgaaggagatactctaaaggtatatgatggaaaagacagttcctcacgtccactgggcacgttcactaaaaatgaacttctggggctgatcctaaacagcacatccaatcacctgtggctagagttcaacaccaatggatctgacaccgaccaaggttttcaactcacctataccagttttgatctggtaaaatgtgaggatccgggcatccctaactacggctataggatccgtgatgaaggccactttaccgacactgtagttctgtacagttgcaacccggggtacgccatgcatggcagcaacaccctgacctgtttgagtggagacaggagagtgtgggacaaaccactaccttcgtgcatagcggaatgtggtggtcagatccatgcagccacatcaggacgaatattgtcccctggctatccagctccgtatgacaacaacctccactgcacctggattatagaggcagacccaggaaagaccattagcctccatttcattgttttcgacacggagatggctcacgacatcctcaaggtctgggacgggccggtggacagtgacatcctgctgaaggagtggagtggctccgcccttccggaggacatccacagcaccttcaactcactcaccctgcagttcgacagcgacttcttcatcagcaagtctggcttctccatccagttctccacctcaattgcagccacctgtaacgatccaggtatgccccaaaatggcacccgctatggagacagcagagaggctggagacaccgtcacattccagtgtgaccctggctatcagctccaaggacaagccaaaatcacctgtgtgcagctgaataaccggttcttttggcaaccagaccctcctacatgcatagctgcttgtggagggaatctgacgggcccagcaggtgttattttgtcacccaactacccacagccgtatcctcctgggaaggaatgtgactggagagtaaaagtgaacccggactttgtcatcgccttgatattcaaaagtttcaacatggagcccagctatgacttcctacacatctatgaaggggaagattccaacagccccctcattgggagttaccagggctctcaggccccagaaagaatagagagtagcggaaacagcctgtttctggcatttcggagtgatgcctccgtgggcctttcagggttcgccattgaatttaaagagaaaccacgggaagcttgttttgacccaggaaatataatgaatgggacaagagttggaacagacttcaagcttggctccaccatcacctaccagtgtgactctggctataagattcttgacccctcatccatcacctgtgtgattggggctgatgggaaaccctcctgggaccaagtgctgccctcctgcaatgctccctgtggaggccagtacacgggatcagaaggggtagttttatcaccaaactacccccataattacacagctggtcaaatatgcctctattccatcacggtaccaaaggaattcgtggtctttggacagtttgcctatttccagacagccctgaatgatttggcagaattatttgatggaacccatgcacaggccagacttctcagctcactctcggggtctcactcaggggaaacattgcccttggctacgtcaaatcaaattctgctccgattcagtgcaaagagcggtgcctctgcccgcggcttccacttcgtgtatcaagctgttcctcgtaccagtgacacccaatgcagctctgtccccgagcccagatacggaaggagaattggttctgagttttctgccggctccatcgtccgattcgagtgcaacccgggatacctgcttcagggttccacggcgctccactgccagtccgtgcccaacgccttggcacagtggaacgacacgatccccagctgtgtggtaccctgcagtggcaatttcactcaacgaagaggtacaatcctgtcccccggctaccctgagccatacggaaacaacttgaactgtatatggaagatcatagttacggagggctcgggaattcaggatccaagtgatcagttttgccacggagcagaactgggacttgagatccacgatggtggggatgtgaccgcacccagactgggaagcttctcaggcaccacagtaccggcactgctgaacagtacttccaaccaactctacctgcatttccagtctgacattagtgtggcagctgctggtttccacctggaatacaaaactgtaggtcttgctgcatgccaagaaccagccctccccagcaacagcatcaaaatcggagatcggtacatggtgaacgacgtgctctccttccagtgcgagcccgggtacaccctgcagggccgttcccacatttcctgtatgccagggaccgttcgccgttggaactatccgtctcccctgtgcattgcaacctgtggagggacgctgagcaccttgggtggtgtgatcctgagccccggcttcccaggttcttaccccaacaacttagactgcacctggaggatctcattacccatcggctatggtgcacatattcagtttctgaatttttctaccgaagctaatcatgacttccttgaaattcaaaatggaccttaccacaccagccccatgattggacaatttagcggcacggatctccccgcggccctgctgagcacaacgcatgaaaccctcatccacttttatagtgaccattcgcaaaaccggcaaggatttaaacttgcttaccaagcctatgaattacagaactgtccagatccacccccatttcagaatgggtacatgatcaactcggattacagcgtggggcaatcagtatctttcgagtgttatcctgggtacattctaataggccatcctgtcctcacttgtcagcatgggatcaacagaaactggaactacccttttccaagatgtgatgccccttgtgggtacaacgtaacttctcagaacggcaccatctactcccctggctttcctgatgagtatccgatcctgaaggactgcatttggctcatcacggtgcctccagggcacggagtttacatcaacttcaccctgttacagacggaagctgtcaacgattacattgctgtttgggacggtcccgatcagaactcaccccagctgggagttttcagtggcaacacagccctcgaaacggcgtatagctccaccaaccaagtcctgctcaagttccacagcgacttttcaaatggaggcttctttgtcctcaatttccacgcatttcagctcaagaaatgtcaacctcccccagcggttccacaggcagaaatgcttactgaggatgatgatttcgaaataggagattttgtgaagtaccagtgccaccccgggtacaccttggtggggaccgacattctgacttgcaagctcagttcccagttgcagtttgagggttctctcccaacatgtgaagcacaatgcccagcaaatgaagtccggactggatcatcgggagtcattctcagtccagggtatccgggtaattattttaactcccagacttgctcttggagtattaaagtggaaccaaactacaacattaccatctttgtggacacatttcaaagtgaaaagcagtttgatgcactggaagtgtttgatggttcttctgggcaaagtcctctgctagtagtcttaagtgggaatcatactgaacaatcaaattttacaagcaggagtaatcagttatatctccgctggtccactgaccatgccaccagtaagaaaggattcaagattcgctatgcagcaccttactgcagtttgacccaccccctgaagaatgggggtattctaaacaggactgcaggagcggttggaagcaaagtgcattatttttgcaagcctggataccgaatggtcggccacagcaatgcaacctgtagacgaaacccacttggcatgtaccagtgggactccctcacgccactctgccaggctgtgtcctgtggaatcccagaatccccaggaaacggttcatttaccgggaacgagttcactttggacagtaaagtggtctatgaatgtcatgagggcttcaagcttgaatccagccagcaagcaacagccgtgtgtcaagaagatgggttgtggagtaacaaggggaagccgcccacgtgtaagccggtcgcttgccccagcattgaagctcagctctcagaacatgtcatctggaggctggtttcaggatccttgaatgagtacggtgctcaagtattgctgagctgcagtcctggttactacttagaaggctggaggctcctgcggtgccaggccaatgggacgtggaacataggagatgagaggccaagctgtcgagttatctcgtgtggaagcctttcctttcccccaaatggcaacaagattggaacgttgacagtttatggggccacagctatatttacgtgcaacaccggctacacgcttgtggggtctcatgtcagagagtgcttggcaaatgggctctggagcggcagcgaaactcgatgtctggctggccactgcggttccccagacccgattgtgaacggtcacattagtggagatggcttcagttacagagacacggtggtttaccagtgcaatcctggtttccggcttgtgggaacttccgtgaggatatgcctgcaagaccacaagtggtctggacaaacgcctgtctgtgtccccatcacatgtggtcaccctggaaaccctgcccacggattcactaatggcagtgagttcaacctgaatgatgtcgtgaatttcacctgcaacacgggctatttgctgcagggcgtgtctcgagcccagtgtcggagcaacggccagtggagtagccctctgcccacgtgtcgagtggtgaactgttctgatccaggctttgtggaaaatgccattcgtcacgggcaacagaacttccctgagagttttgagtatggaatgagtatcctgtaccattgcaagaagggattttacttgctgggatcttcagccttgacctgtatggcaaatggcttatgggaccgatccctgcccaagtgtttggctatatcgtgtggacacccaggggtccctgccaacgccgtcctcactggagagctgtttacctatggcgccgtcgtgcactactcctgcagagggagcgagagcctcataggcaacgacacgagagtgtgccaggaagacagtcactggagcggggcactgccccactgcacaggaaataatcctggattctgtggtgatccggggaccccagcacatgggtctcggcttggtgatgactttaagacaaagagtcttctccgcttctcctgtgaaatggggcaccagctgaggggctcccctgaacgcacgtgtttgctcaatgggtcatggtcaggactgcagccggtgtgtgaggccgtgtcctgtggcaaccctggcacacccaccaacggaatgattgtcagtagtgatggcattctgttctccagctcggtcatctatgcctgctgggaaggctacaagacctcagggctcatgacacggcattgcacagccaatgggacctggacaggcactgctcccgactgcacaattataagttgtggggatccaggcacactagcaaatggcatccagtttgggaccgacttcaccttcaacaagactgtgagctatcagtgtaacccaggctatgtcatggaagcagtcacatccgccactattcgctgtaccaaagacggcaggtggaatccgagcaaacctgtctgcaaagccgtgctgtgtcctcagccgccgccggtgcagaatggaacagtggagggaagtgatttccgctggggctccagcataagttacagctgcatggacggttaccagctctctcactccgccatcctctcctgtgaaggtcgcggggtgtggaaaggagagatcccccagtgtctccctgtgttctgcggagaccctggcatccccgcagaagggcgacttagtgggaaaagtttcacctataagtccgaagtcttcttccagtgcaaatctccatttatactcgtgggatcctccagaagagtctgccaagctgacggcacgtggagcggcatacaacccacctgcattgatcctgctcataacacctgcccagaccctggtacgccacactttggaatacagaatagctccagaggctatgaggttggaagcacggtttttttcaggtgcagaaaaggctaccatattcaaggttccacgactcgcacctgccttgccaatttaacatggagtgggatacagaccgaatgtatacctcatgcctgcagacagccagaaaccccggcacacgcggatgtgagagccatcgatcttcctactttcggctacaccttagtgtacacctgccatccaggctttttcctcgcagggggatctgagcacagaacatgtaaagcagacatgaaatggacaggaaagtcgcctgtgtgtaaaagtaaaggagtgagagaagttaatgaaacagttactaaaactccagttccttcagatgtctttttcgtcaattcactgtggaaggggtattatgaatatttagggaaaagacaacccgccactctaactgttgactggttcaatgcaacaagcagtaaggtgaatgccaccttcagcgaagcctcgccagtggagctgaagttgacaggcatttacaagaaggaggaggcccacttactcctgaaagcttttcaaattaaaggccaggcagatatttttgtaagcaagttcgaaaatgacaactggggactagatggttatgtgtcatctggacttgaaagaggaggatttacttttcaaggtgacattcatggaaaagactttggaaaatttaagctagaaaggcaagatcctttaaacccagatcaagactcttccagtcattaccacggcaccagcagtggctctgtggcggctgccattctggttcctttctttgctctaattttatcagggtttgcattttacctctacaaacacagaacgagaccaaaagttcaatacaatggctatgctgggcatgaaaacagcaatggacaagcatcgtttgaaaaccccatgtatgatacaaacttaaaacccacagaagccaaggctgtgaggtttgacacaactctgaacacagtctgtacagtggtatagccctcagtgccccaacaggactgattcatagccatacctctgatggacaagcagtgattcctttggtgccatataccactctcccttccactctggctttactgcagcgatcttcaaccttgtctactggcataagtgcagcggggatctctactcaaatgtgtcagggtcttctacggatcaaactacacatgcgttttcattccaaaagtgggttctaaatgcctggctgcatctgtatgaaatcaaggcacactccaggaagactgccacgtcgcgccaacacgtcatactcaatgcctcagactttcatatttctgtgttgctgagatgcctttcaatgcaatcgtctgggctcgtggatatgtccctcaggtgcggtgacagaatggtggcaccacgatatgtgttctcttgtgttgtttttcctttttaaacccccatgaacacgaatactctgaaaaaaataaaaagctttctggaaga

SEQ ID NO: 7058 - DNA, 10938 bp, Homo sapiens
  source 1..10938: mol_type = unassigned DNA
ccttcctgcccggctcggccggcgctcgtccccggccccggccccgccagcccgggtctccgcgctcggagcagctcagccctgcagtggctcgggacccgatgctatgagagggaagcgagccgggcgcccagaccttcaggaggcgtcggatgcgcggcgggtcttgggaccgggctctctctccggctcgccttgccctcgggtgattatttggctccgctcatagccctgccttcctcggaggagccatcggtgtcgcgtgcgtgtggagtatctgcagacatgactgcgtggaggagattccagtcgctgctcctgcttctcgggctgctggtgctgtgcgcgaggctcctcactgcagcgaagggtcagaactgtggaggcttagtccagggtcccaatggcactattgagagcccagggtttcctcacgggtatccgaactatgccaactgcacctggatcatcatcacgggcgagcgcaataggatacagttgtccttccatacctttgctcttgaagaagattttgatattttatcagtttacgatggacagcctcaacaagggaatttaaaagtgagattatcgggatttcagctgccctcctctatagtgagtacaggatctatcctcactctgtggttcacgacagacttcgctgtgagtgcccaaggtttcaaagcattatatgaagttttacctagccacacttgtggaaatcctggagaaatcctgaaaggagttctgcatggaacgagattcaacataggagacaaaatccggtacagctgcctccctggctacatcttggaaggccacgccatcctgacctgcatcgtcagcccaggaaatggtgcatcgtgggacttcccagctcccttttgcagagctgagggagcctgcggaggaaccttacgcgggaccagcagctccatctccagcccgcacttcccttcagagtacgagaacaacgcggactgcacctggaccattctggctgagcccggggacaccattgcgctggtcttcactgactttcagctagaagaaggatatgatttcttagagatcagtggcacggaagctccatccatatggctaactggcatgaacctcccctctccagttatcagtagcaagaattggctacgactccatttcacctctgacagcaaccaccgacgcaaaggatttaacgctcagttccaagtgaaaaaggcgattgagttgaagtcaagaggagtcaagatgctgcccagcaaggatggaagccataaaaactctgtcttgagccaaggaggtgttgcattggtctctgacatgtgtccagatcctgggattccagaaaatggtagaagagcaggttccgacttcagtagggttggtgcaaatgtacagttttcatgtgaggacaattacgtgctccagggatctaaaagcatcacctgtcagagagttacagagacgctcgctgcttggagtgaccacaggcccatctgccgagcgagaacatgtggatccaatctgcgtgggcccagcggcgtcattacctcccctaattatccggttcagtatgaagataatgcacactgtgtgtgggtcatcaccaccaccgacccggacaaggtcatcaagcttgcctttgaagagtttgagctggagcgaggctatgacaccctgacggttggtgatgctgggaaggtgggagacaccagatcggtcttgtacgtgctcacgggatccagtgttcctgacctcattgtgagcatgagcaaccagatgtggctacatctgcagtcggatgatagcattggctcacctgggtttaaagctgtttaccaagaaattgaaaagggagggtgtggggatcctggaatccccgcctatgggaagcggacgggcagcagtttcctccatggagatacactcacctttgaatgcccggcggcctttgagctggtgggggagagagttatcacctgtcagcagaacaatcagtggtctggcaacaagcccagctgtgtattttcatgtttcttcaactttacggcatcatctgggattattctgtcaccaaattatccagaggaatatgggaacaacatgaactgtgtctggttgattatctcggagccaggaagtcgaattcacctaatctttaatgattttgatgttgagcctcagtttgactttctcgcggtcaaggatgatggcatttctgacataactgtcctgggtactttttctggcaatgaagtgccttcccagctggccagcagtgggcatatagttcgcttggaatttcagtctgaccattccactactggcagagggttcaacatcacttacaccacatttggtcagaatgagtgccatgatcctggcattcctataaacggacgacgttttggtgacaggtttctactcgggagctcggtttctttccactgtgatgatggctttgtcaagacccagggatccgagtccattacctgcatactgcaagacgggaacgtggtctggagctccaccgtgccccgctgtgaagctccatgtggtggacatctgacagcgtccagcggagtcattttgcctcctggatggccaggatattataaggattctttacattgtgaatggataattgaagcaaaaccaggccactctatcaaaataacttttgacagatttcagacagaggtcaattatgacaccttggaggtcagagatgggccagccagttcgtccccactgatcggcgagtaccacggcacccaggcaccccagttcctcatcagcaccgggaacttcatgtacctgctgttcaccactgacaacagccgctccagcatcggcttcctcatccactatgagagtgtgacgcttgagtcggattcctgcctggacccgggcatccctgtgaacggccatcgccacggtggagactttggcatcaggtccacagtgactttcagctgtgacccggggtacacactaagtgacgacgagcccctcgtctgtgagaggaaccaccagtggaaccacgccttgcccagctgcgacgctctatgtggaggctacatccaagggaagagtggaacagtcctttctcctgggtttccagatttttatccaaactctctaaactgcacgtggaccattgaagtgtctcatgggaaaggagttcaaatgatctttcacacctttcatcttgagagttcccacgactatttactgatcacagaggatggaagtttttccgagcccgttgccaggctcaccgggtcggtgttgcctcatacgatcaaggcaggcctgtttggaaacttcactgcccagcttcggtttatatcagacttctcaatttcgtacgagggcttcaatatcacattttcagaatatgacctggagccatgtgatgatcctggagtccctgccttcagccgaagaattggttttcactttggtgtgggagactctctgacgttttcctgcttcctgggatatcgtttagaaggtgccaccaagcttacctgcctgggtgggggccgccgtgtgtggagtgcacctctgccaaggtgtgtggccgaatgtggagcaagtgtcaaaggaaatgaaggaacattactgtctccaaattttccatccaattatgataataaccatgagtgtatctataaaatagaaacagaagccggcaagggcatccaccttagaacacgaagcttccagctgtttgaaggagatactctaaaggtatatgatggaaaagacagttcctcacgtccactgggcacgttcactaaaaatgaacttctggggctgatcctaaacagcacatccaatcacctgtggctagagttcaacaccaatggatctgacaccgaccaaggttttcaactcacctataccagttttgatctggtaaaatgtgaggatccgggcatccctaactacggctataggatccgtgatgaaggccactttaccgacactgtagttctgtacagttgcaacccggggtacgccatgcatggcagcaacaccctgacctgtttgagtggagacaggagagtgtgggacaaaccactaccttcgtgcatagcggaatgtggtggtcagatccatgcagccacatcaggacgaatattgtcccctggctatccagctccgtatgacaacaacctccactgcacctggattatagaggcagacccaggaaagaccattagcctccatttcattgttttcgacacggagatggctcacgacatcctcaaggtctgggacgggccggtggacagtgacatcctgctgaaggagtggagtggctccgcccttccggaggacatccacagcaccttcaactcactcaccctgcagttcgacagcgacttcttcatcagcaagtctggcttctccatccagttctccacctcaattgcagccacctgtaacgatccaggtatgccccaaaatggcacccgctatggagacagcagagaggctggagacaccgtcacattccagtgtgaccctggctatcagctccaaggacaagccaaaatcacctgtgtgcagctgaataaccggttcttttggcaaccagaccctcctacatgcatagctgcttgtggagggaatctgacgggcccagcaggtgttattttgtcacccaactacccacagccgtatcctcctgggaaggaatgtgactggagagtaaaagtgaacccggactttgtcatcgccttgatattcaaaagtttcaacatggagcccagctatgacttcctacacatctatgaaggggaagattccaacagccccctcattgggagttaccagggctctcaggccccagaaagaatagagagtagcggaaacagcctgtttctggcatttcggagtgatgcctccgtgggcctttcagggttcgccattgaatttaaagagaaaccacgggaagcttgttttgacccaggaaatataatgaatgggacaagagttggaacagacttcaagcttggctccaccatcacctaccagtgtgactctggctataagattcttgacccctcatccatcacctgtgtgattggggctgatgggaaaccctcctgggaccaagtgctgccctcctgcaatgctccctgtggaggccagtacacgggatcagaaggggtagttttatcaccaaactacccccataattacacagctggtcaaatatgcctctattccatcacggtaccaaaggaattcgtggtctttggacagtttgcctatttccagacagccctgaatgatttggcagaattatttgatggaacccatgcacaggccagacttctcagctcactctcggggtctcactcaggggaaacattgcccttggctacgtcaaatcaaattctgctccgattcagtgcaaagagcggtgcctctgcccgcggcttccacttcgtgtatcaagctgttcctcgtaccagtgacacccaatgcagctctgtccccgagcccagatacggaaggagaattggttctgagttttctgccggctccatcgtccgattcgagtgcaacccgggatacctgcttcagggttccacggcgctccactgccagtccgtgcccaacgccttggcacagtggaacgacacgatccccagctgtgtggtaccctgcagtggcaatttcactcaacgaagaggtacaatcctgtcccccggctaccctgagccatacggaaacaacttgaactgtatatggaagatcatagttacggagggctcgggaattcagatccaagtgatcagttttgccacggagcagaactgggactcccttgagatccacgatggtggggatgtgaccgcacccagactgggaagcttctcaggcaccacagtaccggcactgctgaacagtacttccaaccaactctacctgcatttccagtctgacattagtgtggcagctgctggtttccacctggaatacaaaactgtaggtcttgctgcatgccaagaaccagccctccccagcaacagcatcaaaatcggagatcggtacatggtgaacgacgtgctctccttccagtgcgagcccgggtacaccctgcagggccgttcccacatttcctgtatgccagggaccgttcgccgttggaactatccgtctcccctgtgcattgcaacctgtggagggacgctgagcaccttgggtggtgtgatcctgagccccggcttcccaggttcttaccccaacaacttagactgcacctggaggatctcattacccatcggctatggtgcacatattcagtttctgaatttttctaccgaagctaatcatgacttccttgaaattcaaaatggaccttaccacaccagccccatgattggacaatttagcggcacggatctccccgcggccctgctgagcacaacgcatgaaaccctcatccacttttatagtgaccattcgcaaaaccggcaaggatttaaacttgcttaccaagcctatgaattacagaactgtccagatccacccccatttcagaatgggtacatgatcaactcggattacagcgtggggcaatcagtatctttcgagtgttatcctgggtacattctaataggccatcctgtcctcacttgtcagcatgggatcaacagaaactggaactacccttttccaagatgtgatgccccttgtgggtacaacgtaacttctcagaacggcaccatctactcccctggctttcctgatgagtatccgatcctgaaggactgcatttggctcatcacggtgcctccagggcacggagtttacatcaacttcaccctgttacagacggaagctgtcaacgattacattgctgtttgggacggtcccgatcagaactcaccccagctgggagttttcagtggcaacacagccctcgaaacggcgtatagctccaccaaccaagtcctgctcaagttccacagcgacttttcaaatggaggcttctttgtcctcaatttccacgcatttcagctcaagaaatgtcaacctcccccagcggttccacaggcagaaatgcttactgaggatgatgatttcgaaataggagattttgtgaagtaccagtgccaccccgggtacaccttggtggggaccgacattctgacttgcaagctcagttcccagttgcagtttgagggttctctcccaacatgtgaagcacaatgcccagcaaatgaagtccggactggatcatcgggagtcattctcagtccagggtatccgggtaattattttaactcccagacttgctcttggagtattaaagtggaaccaaactacaacattaccatctttgtggacacatttcaaagtgaaaagcagtttgatgcactggaagtgtttgatggttcttctgggcaaagtcctctgctagtagtcttaagtgggaatcatactgaacaatcaaattttacaagcaggagtaatcagttatatctccgctggtccactgaccatgccaccagtaagaaaggattcaagattcgctatgcagcaccttactgcagtttgacccaccccctgaagaatgggggtattctaaacaggactgcaggagcggttggaagcaaagtgcattatttttgcaagcctggataccgaatggtcggccacagcaatgcaacctgtagacgaaacccacttggcatgtaccagtgggactccctcacgccactctgccaggctgtgtcctgtggaatcccagaatccccaggaaacggttcatttaccgggaacgagttcactttggacagtaaagtggtctatgaatgtcatgagggcttcaagcttgaatccagccagcaagcaacagccgtgtgtcaagaagatgggttgtggagtaacaaggggaagccgcccacgtgtaagccggtcgcttgccccagcattgaagctcagctctcagaacatgtcatctggaggctggtttcaggatccttgaatgagtacggtgctcaagtattgctgagctgcagtcctggttactacttagaaggctggaggctcctgcggtgccaggccaatgggacgtggaacataggagatgagaggccaagctgtcgagctggccactgcggttccccagacccgattgtgaacggtcacattagtggagatggcttcagttacagagacacggtggtttaccagtgcaatcctggtttccggcttgtgggaacttccgtgaggatatgcctgcaagaccacaagtggtctggacaaacgcctgtctgtgtccccatcacatgtggtcaccctggaaaccctgcccacggattcactaatggcagtgagttcaacctgaatgatgtcgtgaatttcacctgcaacacgggctatttgctgcagggcgtgtctcgagcccagtgtcggagcaacggccagtggagtagccctctgcccacgtgtcgagtggtgaactgttctgatccaggctttgtggaaaatgccattcgtcacgggcaacagaacttccctgagagttttgagtatggaatgagtatcctgtaccattgcaagaagggattttacttgctgggatcttcagccttgacctgtatggcaaatggcttatgggaccgatccctgcccaagtgtttggctatatcgtgtggacacccaggggtccctgccaacgccgtcctcactggagagctgtttacctatggcgccgtcgtgcactactcctgcagagggagcgagagcctcataggcaacgacacgagagtgtgccaggaagacagtcactggagcggggcactgccccactgcacaggaaataatcctggattctgtggtgatccggggaccccagcacatgggtctcggcttggtgatgactttaagacaaagagtcttctccgcttctcctgtgaaatggggcaccagctgaggggctcccctgaacgcacgtgtttgctcaatgggtcatggtcaggactgcagccggtgtgtgaggccgtgctgtgtcctcagccgccgccggtgcagaatggaacagtggagggaagtgatttccgctggggctccagcataagttacagctgcatggacggttaccagctctctcactccgccatcctctcctgtgaaggtcgcggggtgtggaaaggagagatcccccagtgtctccctgtgttctgcggagaccctggcatccccgcagaagggcgacttagtgggaaaagtttcacctataagtccgaagtcttcttccagtgcaaatctccatttatactcgtgggatcctccagaagagtctgccaagctgacggcacgtggagcggcatacaacccacctgcattgatcctgctcataacacctgcccagaccctggtacgccacactttggaatacagaatagctccagaggctatgaggttggaagcacggtttttttcaggtgcagaaaaggctaccatattcaaggttccacgactcgcacctgccttgccaatttaacatggagtgggatacagaccgaatgtatacctcatgcctgcagacagccagaaaccccggcacacgcggatgtgagagccatcgatcttcctactttcggctacaccttagtgtacacctgccatccaggctttttcctcgcagggggatctgagcacagaacatgtaaagcagacatgaaatggacaggaaagtcgcctgtgtgtaaaagtaaaggagtgagagaagttaatgaaacagttactaaaactccagttccttcagatgtctttttcgtcaattcactgtggaaggggtattatgaatatttagggaaaagacaacccgccactctaactgttgactggttcaatgcaacaagcagtaaggtgaatgccaccttcagcgaagcctcgccagtggagctgaagttgacaggcatttacaagaaggaggaggcccacttactcctgaaagcttttcaaattaaaggccaggcagatatttttgtaagcaagttcgaaaatgacaactggggactagatggttatgtgtcatctggacttgaaagaggaggatttacttttcaaggtgacattcatggaaaagactttggaaaatttaagctagaaaggcaagatcctttaaacccagatcaagactcttccagtcattaccacggcaccagcagtggctctgtggcggctgccattctggttcctttctttgctctaattttatcagggtttgcattttacctctacaaacacagaacgagaccaaaagttcaatacaatggctatgctgggcatgaaaacagcaatggacaagcatcgtttgaaaaccccatgtatgatacaaacttaaaacccacagaagccaaggctgtgaggtttgacacaactctgaacacagtctgtacagtggtatagccctcagtgccccaacaggactgattcatagccatacctctgatggacaagcagtgattcctttggtgccatataccactctcccttccactctggctttactgcagcgatcttcaaccttgtctactggcataagtgcagcggggatctctactcaaatgtgtcagggtcttctacggatcaaactacacatgcgttttcattccaaaagtgggttctaaatgcctggctgcatctgtatgaaatcaaggcacactccaggaagactgccacgtcgcgccaacacgtcatactcaatgcctcagactttcatatttctgtgttgctgagatgcctttcaatgcaatcgtctgggctcgtggatatgtccctcaggtgcggtgacagaatggtggcaccacgatatgtgttctcttgtgttgtttttcctttttaaacccccatgaacacgaatactctgaaaaaaataaaaagctttctggaaga

SEQ ID NO: 7059 - DNA, 11740 bp, Homo sapiens
  source 1..11740: mol_type = unassigned DNA
gactgcgccgtgcccagcctcggtcccctctctgtgggtaaggatggttgagtccagcctccacggcagcggctccttgtgccactagcagcccttcttctgcgctctccgccttttctctctagactggatctctcctcccccccgcgcccccctccccgcatctcccactcgctggctctctctccagctgcctcctctccaggtctctcctggctgcgcgcgctcctctccccgcttctccccctcccgcagcctcgccgccttggtgccttcctgcccggctcggccggcgctcgtccccggccccggccccgccagcccgggtctccgcgctcggagcagctcagccctgcagtggctcgggacccgatgctatgagagggaagcgagccgggcgcccagaccttcaggaggcgtcggatgcgcggcgggtcttgggaccgggctctctctccggctcgccttgccctcgggtgattatttggctccgctcatagccctgccttcctcggaggagccatcggtgtcgcgtgcgtgtggagtatctgcagacatgactgcgtggaggagattccagtcgctgctcctgcttctcgggctgctggtgctgtgcgcgaggctcctcactgcagcgaagggtcagaactgtggaggcttagtccagggtcccaatggcactattgagagcccagggtttcctcacgggtatccgaactatgccaactgcacctggatcatcatcacgggcgagcgcaataggatacagttgtccttccatacctttgctcttgaagaagattttgatattttatcagtttacgatggacagcctcaacaagggaatttaaaagtgagattatcgggatttcagctgccctcctctatagtgagtacaggatctatcctcactctgtggttcacgacagacttcgctgtgagtgcccaaggtttcaaagcattatatgaagttttacctagccacacttgtggaaatcctggagaaatcctgaaaggagttctgcatggaacgagattcaacataggagacaaaatccggtacagctgcctccctggctacatcttggaaggccacgccatcctgacctgcatcgtcagcccaggaaatggtgcatcgtgggacttcccagctcccttttgcagagctgagggagcctgcggaggaaccttacgcgggaccagcagctccatctccagcccgcacttcccttcagagtacgagaacaacgcggactgcacctggaccattctggctgagcccggggacaccattgcgctggtcttcactgactttcagctagaagaaggatatgatttcttagagatcagtggcacggaagctccatccatatggctaactggcatgaacctcccctctccagttatcagtagcaagaattggctacgactccatttcacctctgacagcaaccaccgacgcaaaggatttaacgctcagttccaagtgaaaaaggcgattgagttgaagtcaagaggagtcaagatgctgcccagcaaggatggaagccataaaaactctgtcttgagccaaggaggtgttgcattggtctctgacatgtgtccagatcctgggattccagaaaatggtagaagagcaggttccgacttcagtagggttggtgcaaatgtacagttttcatgtgaggacaattacgtgctccagggatctaaaagcatcacctgtcagagagttacagagacgctcgctgcttggagtgaccacaggcccatctgccgagcgagaacatgtggatccaatctgcgtgggcccagcggcgtcattacctcccctaattatccggttcagtatgaagataatgcacactgtgtgtgggtcatcaccaccaccgacccggacaaggtcatcaagcttgcctttgaagagtttgagctggagcgaggctatgacaccctgacggttggtgatgctgggaaggtgggagacaccagatcggtcttgtacgtgctcacgggatccagtgttcctgacctcattgtgagcatgagcaaccagatgtggctacatctgcagtcggatgatagcattggctcacctgggtttaaagctgtttaccaagaaattgaaaagggagggtgtggggatcctggaatccccgcctatgggaagcggacgggcagcagtttcctccatggagatacactcacctttgaatgcccggcggcctttgagctggtgggggagagagttatcacctgtcagcagaacaatcagtggtctggcaacaagcccagctgtgtattttcatgtttcttcaactttacggcatcatctgggattattctgtcaccaaattatccagaggaatatgggaacaacatgaactgtgtctggttgattatctcggagccaggaagtcgaattcacctaatctttaatgattttgatgttgagcctcagtttgactttctcgcggtcaaggatgatggcatttctgacataactgtcctgggtactttttctggcaatgaagtgccttcccagctggccagcagtgggcatatagttcgcttggaatttcagtctgaccattccactactggcagagggttcaacatcacttacaccacatttggtcagaatgagtgccatgatcctggcattcctataaacggacgacgttttggtgacaggtttctactcgggagctcggtttctttccactgtgatgatggctttgtcaagacccagggatccgagtccattacctgcatactgcaagacgggaacgtggtctggagctccaccgtgccccgctgtgaagctccatgtggtggacatctgacagcgtccagcggagtcattttgcctcctggatggccaggatattataaggattctttacattgtgaatggataattgaagcaaaaccaggccactctatcaaaataacttttgacagatttcagacagaggtcaattatgacaccttggaggtcagagatgggccagccagttcgtccccactgatcggcgagtaccacggcacccaggcaccccagttcctcatcagcaccgggaacttcatgtacctgctgttcaccactgacaacagccgctccagcatcggcttcctcatccactatgagagtgtgacgcttgagtcggattcctgcctggacccgggcatccctgtgaacggccatcgccacggtggagactttggcatcaggtccacagtgactttcagctgtgacccggggtacacactaagtgacgacgagcccctcgtctgtgagaggaaccaccagtggaaccacgccttgcccagctgcgacgctctatgtggaggctacatccaagggaagagtggaacagtcctttctcctgggtttccagatttttatccaaactctctaaactgcacgtggaccattgaagtgtctcatgggaaaggagttcaaatgatctttcacacctttcatcttgagagttcccacgactatttactgatcacagaggatggaagtttttccgagcccgttgccaggctcaccgggtcggtgttgcctcatacgatcaaggcaggcctgtttggaaacttcactgcccagcttcggtttatatcagacttctcaatttcgtacgagggcttcaatatcacattttcagaatatgacctggagccatgtgatgatcctggagtccctgccttcagccgaagaattggttttcactttggtgtgggagactctctgacgttttcctgcttcctgggatatcgtttagaaggtgccaccaagcttacctgcctgggtgggggccgccgtgtgtggagtgcacctctgccaaggtgtgtggccgaatgtggagcaagtgtcaaaggaaatgaaggaacattactgtctccaaattttccatccaattatgataataaccatgagtgtatctataaaatagaaacagaagccggcaagggcatccaccttagaacacgaagcttccagctgtttgaaggagatactctaaaggtatatgatggaaaagacagttcctcacgtccactgggcacgttcactaaaaatgaacttctggggctgatcctaaacagcacatccaatcacctgtggctagagttcaacaccaatggatctgacaccgaccaaggttttcaactcacctataccagttttgatctggtaaaatgtgaggatccgggcatccctaactacggctataggatccgtgatgaaggccactttaccgacactgtagttctgtacagttgcaacccggggtacgccatgcatggcagcaacaccctgacctgtttgagtggagacaggagagtgtgggacaaaccactaccttcgtgcatagcggaatgtggtggtcagatccatgcagccacatcaggacgaatattgtcccctggctatccagctccgtatgacaacaacctccactgcacctggattatagaggcagacccaggaaagaccattagcctccatttcattgttttcgacacggagatggctcacgacatcctcaaggtctgggacgggccggtggacagtgacatcctgctgaaggagtggagtggctccgcccttccggaggacatccacagcaccttcaactcactcaccctgcagttcgacagcgacttcttcatcagcaagtctggcttctccatccagttctccacctcaattgcagccacctgtaacgatccaggtatgccccaaaatggcacccgctatggagacagcagagaggctggagacaccgtcacattccagtgtgaccctggctatcagctccaaggacaagccaaaatcacctgtgtgcagctgaataaccggttcttttggcaaccagaccctcctacatgcatagctgcttgtggagggaatctgacgggcccagcaggtgttattttgtcacccaactacccacagccgtatcctcctgggaaggaatgtgactggagagtaaaagtgaacccggactttgtcatcgccttgatattcaaaagtttcaacatggagcccagctatgacttcctacacatctatgaaggggaagattccaacagccccctcattgggagttaccagggctctcaggccccagaaagaatagagagtagcggaaacagcctgtttctggcatttcggagtgatgcctccgtgggcctttcagggttcgccattgaatttaaagagaaaccacgggaagcttgttttgacccaggaaatataatgaatgggacaagagttggaacagacttcaagcttggctccaccatcacctaccagtgtgactctggctataagattcttgacccctcatccatcacctgtgtgattggggctgatgggaaaccctcctgggaccaagtgctgccctcctgcaatgctccctgtggaggccagtacacgggatcagaaggggtagttttatcaccaaactacccccataattacacagctggtcaaatatgcctctattccatcacggtaccaaaggaattcgtggtctttggacagtttgcctatttccagacagccctgaatgatttggcagaattatttgatggaacccatgcacaggccagacttctcagctcactctcggggtctcactcaggggaaacattgcccttggctacgtcaaatcaaattctgctccgattcagtgcaaagagcggtgcctctgcccgcggcttccacttcgtgtatcaagctgttcctcgtaccagtgacacccaatgcagctctgtccccgagcccagatacggaaggagaattggttctgagttttctgccggctccatcgtccgattcgagtgcaacccgggatacctgcttcagggttccacggcgctccactgccagtccgtgcccaacgccttggcacagtggaacgacacgatccccagctgtgtggtaccctgcagtggcaatttcactcaacgaagaggtacaatcctgtcccccggctaccctgagccatacggaaacaacttgaactgtatatggaagatcatagttacggagggctcgggaattcagatccaagtgatcagttttgccacggagcagaactgggactcccttgagatccacgatggtggggatgtgaccgcacccagactgggaagcttctcaggcaccacagtaccggcactgctgaacagtacttccaaccaactctacctgcatttccagtctgacattagtgtggcagctgctggtttccacctggaatacaaaactgtaggtcttgctgcatgccaagaaccagccctccccagcaacagcatcaaaatcggagatcggtacatggtgaacgacgtgctctccttccagtgcgagcccgggtacaccctgcagggccgttcccacatttcctgtatgccagggaccgttcgccgttggaactatccgtctcccctgtgcattgcaacctgtggagggacgctgagcaccttgggtggtgtgatcctgagccccggcttcccaggttcttaccccaacaacttagactgcacctggaggatctcattacccatcggctatggtgcacatattcagtttctgaatttttctaccgaagctaatcatgacttccttgaaattcaaaatggaccttaccacaccagccccatgattggacaatttagcggcacggatctccccgcggccctgctgagcacaacgcatgaaaccctcatccacttttatagtgaccattcgcaaaaccggcaaggatttaaacttgcttaccaagcctatgaattacagaactgtccagatccacccccatttcagaatgggtacatgatcaactcggattacagcgtggggcaatcagtatctttcgagtgttatcctgggtacattctaataggccatcctgtcctcacttgtcagcatgggatcaacagaaactggaactacccttttccaagatgtgatgccccttgtgggtacaacgtaacttctcagaacggcaccatctactcccctggctttcctgatgagtatccgatcctgaaggactgcatttggctcatcacggtgcctccagggcacggagtttacatcaacttcaccctgttacagacggaagctgtcaacgattacattgctgtttgggacggtcccgatcagaactcaccccagctgggagttttcagtggcaacacagccctcgaaacggcgtatagctccaccaaccaagtcctgctcaagttccacagcgacttttcaaatggaggcttctttgtcctcaatttccacgcatttcagctcaagaaatgtcaacctcccccagcggttccacaggcagaaatgcttactgaggatgatgatttcgaaataggagattttgtgaagtaccagtgccaccccgggtacaccttggtggggaccgacattctgacttgcaagctcagttcccagttgcagtttgagggttctctcccaacatgtgaagcacaatgcccagcaaatgaagtccggactggatcatcgggagtcattctcagtccagggtatccgggtaattattttaactcccagacttgctcttggagtattaaagtggaaccaaactacaacattaccatctttgtggacacatttcaaagtgaaaagcagtttgatgcactggaagtgtttgatggttcttctgggcaaagtcctctgctagtagtcttaagtgggaatcatactgaacaatcaaattttacaagcaggagtaatcagttatatctccgctggtccactgaccatgccaccagtaagaaaggattcaagattcgctatgcagcaccttactgcagtttgacccaccccctgaagaatgggggtattctaaacaggactgcaggagcggttggaagcaaagtgcattatttttgcaagcctggataccgaatggtcggccacagcaatgcaacctgtagacgaaacccacttggcatgtaccagtgggactccctcacgccactctgccaggctgtgtcctgtggaatcccagaatccccaggaaacggttcatttaccgggaacgagttcactttggacagtaaagtggtctatgaatgtcatgagggcttcaagcttgaatccagccagcaagcaacagccgtgtgtcaagaagatgggttgtggagtaacaaggggaagccgcccacgtgtaagccggtcgcttgccccagcattgaagctcagctctcagaacatgtcatctggaggctggtttcaggatccttgaatgagtacggtgctcaagtattgctgagctgcagtcctggttactacttagaaggctggaggctcctgcggtgccaggccaatgggacgtggaacataggagatgagaggccaagctgtcgagttatctcgtgtggaagcctttcctttcccccaaatggcaacaagattggaacgttgacagtttatggggccacagctatatttacgtgcaacaccggctacacgcttgtggggtctcatgtcagagagtgcttggcaaatgggctctggagcggcagcgaaactcgatgtctggctggccactgcggttccccagacccgattgtgaacggtcacattagtggagatggcttcagttacagagacacggtggtttaccagtgcaatcctggtttccggcttgtgggaacttccgtgaggatatgcctgcaagaccacaagtggtctggacaaacgcctgtctgtgtccccatcacatgtggtcaccctggaaaccctgcccacggattcactaatggcagtgagttcaacctgaatgatgtcgtgaatttcacctgcaacacgggctatttgctgcagggcgtgtctcgagcccagtgtcggagcaacggccagtggagtagccctctgcccacgtgtcgagtggtgaactgttctgatccaggctttgtggaaaatgccattcgtcacgggcaacagaacttccctgagagttttgagtatggaatgagtatcctgtaccattgcaagaagggattttacttgctgggatcttcagccttgacctgtatggcaaatggcttatgggaccgatccctgcccaagtgtttggctatatcgtgtggacacccaggggtccctgccaacgccgtcctcactggagagctgtttacctatggcgccgtcgtgcactactcctgcagagggagcgagagcctcataggcaacgacacgagagtgtgccaggaagacagtcactggagcggggcactgccccactgcacaggaaataatcctggattctgtggtgatccggggaccccagcacatgggtctcggcttggtgatgactttaagacaaagagtcttctccgcttctcctgtgaaatggggcaccagctgaggggctcccctgaacgcacgtgtttgctcaatgggtcatggtcaggactgcagccggtgtgtgaggccgtgtcctgtggcaaccctggcacacccaccaacggaatgattgtcagtagtgatggcattctgttctccagctcggtcatctatgcctgctgggaaggctacaagacctcagggctcatgacacggcattgcacagccaatgggacctggacaggcactgctcccgactgcacaattataagttgtggggatccaggcacactagcaaatggcatccagtttgggaccgacttcaccttcaacaagactgtgagctatcagtgtaacccaggctatgtcatggaagcagtcacatccgccactattcgctgtaccaaagacggcaggtggaatccgagcaaacctgtctgcaaagccgtgctgtgtcctcagccgccgccggtgcagaatggaacagtggagggaagtgatttccgctggggctccagcataagttacagctgcatggacggttaccagctctctcactccgccatcctctcctgtgaaggtcgcggggtgtggaaaggagagatcccccagtgtctccctgtgttctgcggagaccctggcatccccgcagaagggcgacttagtgggaaaagtttcacctataagtccgaagtcttcttccagtgcaaatctccatttatactcgtgggatcctccagaagagtctgccaagctgacggcacgtggagcggcatacaacccacctgcattgatcctgctcataacacctgcccagaccctggtacgccacactttggaatacagaatagctccagaggctatgaggttggaagcacggtttttttcaggtgcagaaaaggctaccatattcaaggttccacgactcgcacctgccttgccaatttaacatggagtgggatacagaccgaatgtatacctcatgcctgcagacagccagaaaccccggcacacgcggatgtgagagccatcgatcttcctactttcggctacaccttagtgtacacctgccatccaggctttttcctcgcagggggatctgagcacagaacatgtaaagcagacatgaaatggacaggaaagtcgcctgtgtgtaaaagtaaaggagtgagagaagttaatgaaacagttactaaaactccagttccttcagatgtctttttcgtcaattcactgtggaaggggtattatgaatatttagggaaaagacaacccgccactctaactgttgactggttcaatgcaacaagcagtaaggtgaatgccaccttcagcgaagcctcgccagtggagctgaagttgacaggcatttacaagaaggaggaggcccacttactcctgaaagcttttcaaattaaaggccaggcagatatttttgtaagcaagttcgaaaatgacaactggggactagatggttatgtgtcatctggacttgaaagaggaggatttacttttcaaggtgacattcatggaaaagactttggaaaatttaagctagaaaggcaagatcctttaaacccagatcaagactcttccagtcattaccacggcaccagcagtggctctgtggcggctgccattctggttcctttctttgctctaattttatcagggtttgcattttacctctacaaacacagaacgagaccaaaagttcaatacaatggctatgctgggcatgaaaacagcaatggacaagcatcgtttgaaaaccccatgtatgatacaaacttaaaacccacagaagccaaggctgtgaggtttgacacaactctgaacacagtctgtacagtggtatagccctcagtgccccaacaggactgattcatagccatacctctgatggacaagcagtgattcctttggtgccatataccactctcccttccactctggctttactgcagcgatcttcaaccttgtctactggcataagtgcagcggggatctctactcaaatgtgtcagggtcttctacggatcaaactacacatgcgttttcattccaaaagtgggttctaaatgcctggctgcatctgtatgaaatcaaggcacactccaggaagactgccacgtcgcgccaacacgtcatactcaatgcctcagactttcatatttctgtgttgctgagatgcctttcaatgcaatcgtctgggctcgtggatatgtccctcaggtgcggtgacagaatggtggcaccacgatatgtgttctcttgtgttgtttttcctttttaaacccccatgaacacgaatactctgaaaaaaataaaaagctttctggaaga

SEQ ID NO: 7060 - DNA, 10695 bp, Homo sapiens
  source 1..10695: mol_type = unassigned DNA
atgactgcgtggaggagattccagtcgctgctcctgcttctcgggctgctggtgctgtgcgcgaggctcctcactgcagcgaagggtcagaactgtggaggcttagtccagggtcccaatggcactattgagagcccagggtttcctcacgggtatccgaactatgccaactgcacctggatcatcatcacgggcgagcgcaataggatacagttgtccttccatacctttgctcttgaagaagattttgatattttatcagtttacgatggacagcctcaacaagggaatttaaaagtgagattatcgggatttcagctgccctcctctatagtgagtacaggatctatcctcactctgtggttcacgacagacttcgctgtgagtgcccaaggtttcaaagcattatatgaagttttacctagccacacttgtggaaatcctggagaaatcctgaaaggagttctgcatggaacgagattcaacataggagacaaaatccggtacagctgcctccctggctacatcttggaaggccacgccatcctgacctgcatcgtcagcccaggaaatggtgcatcgtgggacttcccagctcccttttgcagagctgagggagcctgcggaggaaccttacgcgggaccagcagctccatctccagcccgcacttcccttcagagtacgagaacaacgcggactgcacctggaccattctggctgagcccggggacaccattgcgctggtcttcactgactttcagctagaagaaggatatgatttcttagagatcagtggcacggaagctccatccatatggctaactggcatgaacctcccctctccagttatcagtagcaagaattggctacgactccatttcacctctgacagcaaccaccgacgcaaaggatttaacgctcagttccaagtgaaaaaggcgattgagttgaagtcaagaggagtcaagatgctgcccagcaaggatggaagccataaaaactctgtcttgagccaaggaggtgttgcattggtctctgacatgtgtccagatcctgggattccagaaaatggtagaagagcaggttccgacttcagggttggtgcaaatgtacagttttcatgtgaggacaattacgtgctccagggatctaaaagcatcacctgtcagagagttacagagacgctcgctgcttggagtgaccacaggcccatctgccgagcgagaacatgtggatccaatctgcgtgggcccagcggcgtcattacctcccctaattatccggttcagtatgaagataatgcacactgtgtgtgggtcatcaccaccaccgacccggacaaggtcatcaagcttgcctttgaagagtttgagctggagcgaggctatgacaccctgacggttggtgatgctgggaaggtgggagacaccagatcggtcttgtacgtgctcacgggatccagtgttcctgacctcattgtgagcatgagcaaccagatgtggctacatctgcagtcggatgatagcattggctcacctgggtttaaagctgtttaccaagaaattgaaaagggagggtgtggggatcctggaatccccgcctatgggaagcggacgggcagcagtttcctccatggagatacactcacctttgaatgcccggcggcctttgagctggtgggggagagagttatcacctgtcagcagaacaatcagtggtctggcaacaagcccagctgtgtattttcatgtttcttcaactttacggcatcatctgggattattctgtcaccaaattatccagaggaatatgggaacaacatgaactgtgtctggttgattatctcggagccaggaagtcgaattcacctaatctttaatgattttgatgttgagcctcagtttgactttctcgcggtcaaggatgatggcatttctgacataactgtcctgggtactttttctggcaatgaagtgccttcccagctggccagcagtgggcatatagttcgcttggaatttcagtctgaccattccactactggcagagggttcaacatcacttacaccacatttggtcagaatgagtgccatgatcctggcattcctataaacggacgacgttttggtgacaggtttctactcgggagctcggtttctttccactgtgatgatggctttgtcaagacccagggatccgagtccattacctgcatactgcaagacgggaacgtggtctggagctccaccgtgccccgctgtgaagctccatgtggtggacatctgacagcgtccagcggagtcattttgcctcctggatggccaggatattataaggattctttacattgtgaatggataattgaagcaaaaccaggccactctatcaaaataacttttgacagatttcagacagaggtcaattatgacaccttggaggtcagagatgggccagccagttcgtccccactgatcggcgagtaccacggcacccaggcaccccagttcctcatcagcaccgggaacttcatgtacctgctgttcaccactgacaacagccgctccagcatcggcttcctcatccactatgagagtgtgacgcttgagtcggattcctgcctggacccgggcatccctgtgaacggccatcgccacggtggagactttggcatcaggtccacagtgactttcagctgtgacccggggtacacactaagtgacgacgagcccctcgtctgtgagaggaaccaccagtggaaccacgccttgcccagctgcgacgctctatgtggaggctacatccaagggaagagtggaacagtcctttctcctgggtttccagatttttatccaaactctctaaactgcacgtggaccattgaagtgtctcatgggaaaggagttcaaatgatctttcacacctttcatcttgagagttcccacgactatttactgatcacagaggatggaagtttttccgagcccgttgccaggctcaccgggtcggtgttgcctcatacgatcaaggcaggcctgtttggaaacttcactgcccagcttcggtttatatcagacttctcaatttcgtacgagggcttcaatatcacattttcagaatatgacctggagccatgtgatgatcctggagtccctgccttcagccgaagaattggttttcactttggtgtgggagactctctgacgttttcctgcttcctgggatatcgtttagaaggtgccaccaagcttacctgcctgggtgggggccgccgtgtgtggagtgcacctctgccaaggtgtgtggccgaatgtggagcaagtgtcaaaggaaatgaaggaacattactgtctccaaattttccatccaattatgataataaccatgagtgtatctataaaatagaaacagaagccggcaagggcatccaccttagaacacgaagcttccagctgtttgaaggagatactctaaaggtatatgatggaaaagacagttcctcacgtccactgggcacgttcactaaaaatgaacttctggggctgatcctaaacagcacatccaatcacctgtggctagagttcaacaccaatggatctgacaccgaccaaggttttcaactcacctataccagttttgatctggtaaaatgtgaggatccgggcatccctaactacggctataggatccgtgatgaaggccactttaccgacactgtagttctgtacagttgcaacccggggtacgccatgcatggcagcaacaccctgacctgtttgagtggagacaggagagtgtgggacaaaccactaccttcgtgcatagcggaatgtggtggtcagatccatgcagccacatcaggacgaatattgtcccctggctatccagctccgtatgacaacaacctccactgcacctggattatagaggcagacccaggaaagaccattagcctccatttcattgttttcgacacggagatggctcacgacatcctcaaggtctgggacgggccggtggacagtgacatcctgctgaaggagtggagtggctccgcccttccggaggacatccacagcaccttcaactcactcaccctgcagttcgacagcgacttcttcatcagcaagtctggcttctccatccagttctccacctcaattgcagccacctgtaacgatccaggtatgccccaaaatggcacccgctatggagacagcagagaggctggagacaccgtcacattccagtgtgaccctggctatcagctccaaggacaagccaaaatcacctgtgtgcagctgaataaccggttcttttggcaaccagaccctcctacatgcatagctgcttgtggagggaatctgacgggcccagcaggtgttattttgtcacccaactacccacagccgtatcctcctgggaaggaatgtgactggagagtaaaagtgaacccggactttgtcatcgccttgatattcaaaagtttcaacatggagcccagctatgacttcctacacatctatgaaggggaagattccaacagccccctcattgggagttaccagggctctcaggccccagaaagaatagagagtagcggaaacagcctgtttctggcatttcggagtgatgcctccgtgggcctttcagggttcgccattgaatttaaagagaaaccacgggaagcttgttttgacccaggaaatataatgaatgggacaagagttggaacagacttcaagcttggctccaccatcacctaccagtgtgactctggctataagattcttgacccctcatccatcacctgtgtgattggggctgatgggaaaccctcctgggaccaagtgctgccctcctgcaatgctccctgtggaggccagtacacgggatcagaaggggtagttttatcaccaaactacccccataattacacagctggtcaaatatgcctctattccatcacggtaccaaaggaattcgtggtctttggacagtttgcctatttccagacagccctgaatgatttggcagaattatttgatggaacccatgcacaggccagacttctcagctcactctcggggtctcactcaggggaaacattgcccttggctacgtcaaatcaaattctgctccgattcagtgcaaagagcggtgcctctgcccgcggcttccacttcgtgtatcaagctgttcctcgtaccagtgacacccaatgcagctctgtccccgagcccagatacggaaggagaattggttctgagttttctgccggctccatcgtccgattcgagtgcaacccgggatacctgcttcagggttccacggcgctccactgccagtccgtgcccaacgccttggcacagtggaacgacacgatccccagctgtgtggtaccctgcagtggcaatttcactcaacgaagaggtacaatcctgtcccccggctaccctgagccatacggaaacaacttgaactgtatatggaagatcatagttacggagggctcgggaattcagatccaagtgatcagttttgccacggagcagaactgggactcccttgagatccacgatggtggggatgtgaccgcacccagactgggaagcttctcaggcaccacagtaccggcactgctgaacagtacttccaaccaactctacctgcatttccagtctgacattagtgtggcagctgctggtttccacctggaatacaaaactgtaggtcttgctgcatgccaagaaccagccctccccagcaacagcatcaaaatcggagatcggtacatggtgaacgacgtgctctccttccagtgcgagcccgggtacaccctgcagggccgttcccacatttcctgtatgccagggaccgttcgccgttggaactatccgtctcccctgtgcattgcaacctgtggagggacgctgagcaccttgggtggtgtgatcctgagccccggcttcccaggttcttaccccaacaacttagactgcacctggaggatctcattacccatcggctatggtgcacatattcagtttctgaatttttctaccgaagctaatcatgacttccttgaaattcaaaatggaccttaccacaccagccccatgattggacaatttagcggcacggatctccccgcggccctgctgagcacaacgcatgaaaccctcatccacttttatagtgaccattcgcaaaaccggcaaggatttaaacttgcttaccaagcctatgaattacagaactgtccagatccacccccatttcagaatgggtacatgatcaactcggattacagcgtggggcaatcagtatctttcgagtgttatcctgggtacattctaataggccatcctgtcctcacttgtcagcatgggatcaacagaaactggaactacccttttccaagatgtgatgccccttgtgggtacaacgtaacttctcagaacggcaccatctactcccctggctttcctgatgagtatccgatcctgaaggactgcatttggctcatcacggtgcctccagggcacggagtttacatcaacttcaccctgttacagacggaagctgtcaacgattacattgctgtttgggacggtcccgatcagaactcaccccagctgggagttttcagtggcaacacagccctcgaaacggcgtatagctccaccaaccaagtcctgctcaagttccacagcgacttttcaaatggaggcttctttgtcctcaatttccacgcatttcagctcaagaaatgtcaacctcccccagcggttccacaggcagaaatgcttactgaggatgatgatttcgaaataggagattttgtgaagtaccagtgccaccccgggtacaccttggtggggaccgacattctgacttgcaagctcagttcccagttgcagtttgagggttctctcccaacatgtgaagcacaatgcccagcaaatgaagtccggactggatcatcgggagtcattctcagtccagggtatccgggtaattattttaactcccagacttgctcttggagtattaaagtggaaccaaactacaacattaccatctttgtggacacatttcaaagtgaaaagcagtttgatgcactggaagtgtttgatggttcttctgggcaaagtcctctgctagtagtcttaagtgggaatcatactgaacaatcaaattttacaagcaggagtaatcagttatatctccgctggtccactgaccatgccaccagtaagaaaggattcaagattcgctatgcagcaccttactgcagtttgacccaccccctgaagaatgggggtattctaaacaggactgcaggagcggttggaagcaaagtgcattatttttgcaagcctggataccgaatggtcggccacagcaatgcaacctgtagacgaaacccacttggcatgtaccagtgggactccctcacgccactctgccaggctgtgtcctgtggaatcccagaatccccaggaaacggttcatttaccgggaacgagttcactttggacagtaaagtggtctatgaatgtcatgagggcttcaagcttgaatccagccagcaagcaacagccgtgtgtcaagaagatgggttgtggagtaacaaggggaagccgcccacgtgtaagccggtcgcttgccccagcattgaagctcagctctcagaacatgtcatctggaggctggtttcaggatccttgaatgagtacggtgctcaagtattgctgagctgcagtcctggttactacttagaaggctggaggctcctgcggtgccaggccaatgggacgtggaacataggagatgagaggccaagctgtcgagttatctcgtgtggaagcctttcctttcccccaaatggcaacaagattggaacgttgacagtttatggggccacagctatatttacgtgcaacaccggctacacgcttgtggggtctcatgtcagagagtgcttggcaaatgggctctggagcggcagcgaaactcgatgtctggctggccactgcggttccccagacccgattgtgaacggtcacattagtggagatggcttcagttacagagacacggtggtttaccagtgcaatcctggtttccggcttgtgggaacttccgtgaggatatgcctgcaagaccacaagtggtctggacaaacgcctgtctgtgtccccatcacatgtggtcaccctggaaaccctgcccacggattcactaatggcagtgagttcaacctgaatgatgtcgtgaatttcacctgcaacacgggctatttgctgcagggcgtgtctcgagcccagtgtcggagcaacggccagtggagtagccctctgcccacgtgtcgagtggtgaactgttctgatccaggctttgtggaaaatgccattcgtcacgggcaacagaacttccctgagagttttgagtatggaatgagtatcctgtaccattgcaagaagggattttacttgctgggatcttcagccttgacctgtatggcaaatggcttatgggaccgatccctgcccaagtgtttggctatatcgtgtggacacccaggggtccctgccaacgccgtcctcactggagagctgtttacctatggcgccgtcgtgcactactcctgcagagggagcgagagcctcataggcaacgacacgagagtgtgccaggaagacagtcactggagcggggcactgccccactgcacaggaaataatcctggattctgtggtgatccggggaccccagcacatgggtctcggcttggtgatgactttaagacaaagagtcttctccgcttctcctgtgaaatggggcaccagctgaggggctcccctgaacgcacgtgtttgctcaatgggtcatggtcaggactgcagccggtgtgtgaggccgtgtcctgtggcaaccctggcacacccaccaacggaatgattgtcagtagtgatggcattctgttctccagctcggtcatctatgcctgctgggaaggctacaagacctcagggctcatgacacggcattgcacagccaatgggacctggacaggcactgctcccgactgcacaattataagttgtggggatccaggcacactagcaaatggcatccagtttgggaccgacttcaccttcaacaagactgtgagctatcagtgtaacccaggctatgtcatggaagcagtcacatccgccactattcgctgtaccaaagacggcaggtggaatccgagcaaacctgtctgcaaagccgtgctgtgtcctcagccgccgccggtgcagaatggaacagtggagggaagtgatttccgctggggctccagcataagttacagctgcatggacggttaccagctctctcactccgccatcctctcctgtgaaggtcgcggggtgtggaaaggagagatcccccagtgtctccctgtgttctgcggagaccctggcatccccgcagaagggcgacttagtgggaaaagtttcacctataagtccgaagtcttcttccagtgcaaatctccatttatactcgtgggatcctccagaagagtctgccaagctgacggcacgtggagcggcatacaacccacctgcattgatcctgctcataacacctgcccagaccctggtacgccacactttggaatacagaatagctccagaggctatgaggttggaagcacggtttttttcaggtgcagaaaaggctaccatattcaaggttccacgactcgcacctgccttgccaatttaacatggagtgggatacagaccgaatgtatacctcatgcctgcagacagccagaaaccccggcacacgcggatgtgagagccatcgatcttcctactttcggctacaccttagtgtacacctgccatccaggctttttcctcgcagggggatctgagcacagaacatgtaaagcagacatgaaatggacaggaaagtcgcctgtgtgtaaaagtaaaggagtgagagaagttaatgaaacagttactaaaactccagttccttcagatgtctttttcgtcaattcactgtggaaggggtattatgaatatttagggaaaagacaacccgccactctaactgttgactggttcaatgcaacaagcagtaaggtgaatgccaccttcagcgaagcctcgccagtggagctgaagttgacaggcatttacaagaaggaggaggcccacttactcctgaaagcttttcaaattaaaggccaggcagatatttttgtaagcaagttcgaaaatgacaactggggactagatggttatgtgtcatctggacttgaaagaggaggatttacttttcaaggtgacattcatggaaaagactttggaaaatttaagctagaaaggcaagatcctttaaacccagatcaagactcttccagtcattaccacggcaccagcagtggctctgtggcggctgccattctggttcctttctttgctctaattttatcagggtttgcattttacctctacaaacacagaacgagaccaaaagttcaatacaatggctatgctgggcatgaaaacagcaatggacaagcatcgtttgaaaaccccatgtatgatacaaacttaaaacccacagaagccaaggctgtgaggtttgacacaactctgaacacagtctgtacagtggtatag

SEQ ID NO: 7061 - DNA, 6330 bp, Homo sapiens
  source 1..6330: mol_type = unassigned DNA
atgactgcgtggaggagattccagtcgctgctcctgcttctcgggctgctggtgctgtgcgcgaggctcctcactgcagcgaagggtcagaactgtggaggcttagtccagggtcccaatggcactattgagagcccagggtttcctcacgggtatccgaactatgccaactgcacctggatcatcatcacgggcgagcgcaataggatacagttgtccttccatacctttgctcttgaagaagattttgatattttatcagtttacgatggacagcctcaacaagggaatttaaaagtgagattatcgggatttcagctgccctcctctatagtgagtacaggatctatcctcactctgtggttcacgacagacttcgctgtgagtgcccaaggtttcaaagcattatatgaagttttacctagccacacttgtggaaatcctggagaaatcctgaaaggagttctgcatggaacgagattcaacataggagacaaaatccggtacagctgcctccctggctacatcttggaaggccacgccatcctgacctgcatcgtcagcccaggaaatggtgcatcgtgggacttcccagctcccttttgcagagctgagggagcctgcggaggaaccttacgcgggaccagcagctccatctccagcccgcacttcccttcagagtacgagaacaacgcggactgcacctggaccattctggctgagcccggggacaccattgcgctggtcttcactgactttcagctagaagaaggatatgatttcttagagatcagtggcacggaagctccatccatatggctaactggcatgaacctcccctctccagttatcagtagcaagaattggctacgactccatttcacctctgacagcaaccaccgacgcaaaggatttaacgctcagttccaagtgaaaaaggcgattgagttgaagtcaagaggagtcaagatgctgcccagcaaggatggaagccataaaaactctgtcttgagccaaggaggtgttgcattggtctctgacatgtgtccagatcctgggattccagaaaatggtagaagagcaggttccgacttcagggttggtgcaaatgtacagttttcatgtgaggacaattacgtgctccagggatctaaaagcatcacctgtcagagagttacagagacgctcgctgcttggagtgaccacaggcccatctgccgagcgagaacatgtggatccaatctgcgtgggcccagcggcgtcattacctcccctaattatccggttcagtatgaagataatgcacactgtgtgtgggtcatcaccaccaccgacccggacaaggtcatcaagcttgcctttgaagagtttgagctggagcgaggctatgacaccctgacggttggtgatgctgggaaggtgggagacaccagatcggtcttgtacgtgctcacgggatccagtgttcctgacctcattgtgagcatgagcaaccagatgtggctacatctgcagtcggatgatagcattggctcacctgggtttaaagctgtttaccaagaaattgaaaagggagggtgtggggatcctggaatccccgcctatgggaagcggacgggcagcagtttcctccatggagatacactcacctttgaatgcccggcggcctttgagctggtgggggagagagttatcacctgtcagcagaacaatcagtggtctggcaacaagcccagctgtgtattttcatgtttcttcaactttacggcatcatctgggattattctgtcaccaaattatccagaggaatatgggaacaacatgaactgtgtctggttgattatctcggagccaggaagtcgaattcacctaatctttaatgattttgatgttgagcctcagtttgactttctcgcggtcaaggatgatggcatttctgacataactgtcctgggtactttttctggcaatgaagtgccttcccagctggccagcagtgggcatatagttcgcttggaatttcagtctgaccattccactactggcagagggttcaacatcacttacaccacatttggtcagaatgagtgccatgatcctggcattcctataaacggacgacgttttggtgacaggtttctactcgggagctcggtttctttccactgtgatgatggctttgtcaagacccagggatccgagtccattacctgcatactgcaagacgggaacgtggtctggagctccaccgtgccccgctgtgaagctccatgtggtggacatctgacagcgtccagcggagtcattttgcctcctggatggccaggatattataaggattctttacattgtgaatggataattgaagcaaaaccaggccactctatcaaaataacttttgacagatttcagacagaggtcaattatgacaccttggaggtcagagatgggccagccagttcgtccccactgatcggcgagtaccacggcacccaggcaccccagttcctcatcagcaccgggaacttcatgtacctgctgttcaccactgacaacagccgctccagcatcggcttcctcatccactatgagagtgtgacgcttgagtcggattcctgcctggacccgggcatccctgtgaacggccatcgccacggtggagactttggcatcaggtccacagtgactttcagctgtgacccggggtacacactaagtgacgacgagcccctcgtctgtgagaggaaccaccagtggaaccacgccttgcccagctgcgacgctctatgtggaggctacatccaagggaagagtggaacagtcctttctcctgggtttccagatttttatccaaactctctaaactgcacgtggaccattgaagtgtctcatgggaaaggagttcaaatgatctttcacacctttcatcttgagagttcccacgactatttactgatcacagaggatggaagtttttccgagcccgttgccaggctcaccgggtcggtgttgcctcatacgatcaaggcaggcctgtttggaaacttcactgcccagcttcggtttatatcagacttctcaatttcgtacgagggcttcaatatcacattttcagaatatgacctggagccatgtgatgatcctggagtccctgccttcagccgaagaattggttttcactttggtgtgggagactctctgacgttttcctgcttcctgggatatcgtttagaaggtgccaccaagcttacctgcctgggtgggggccgccgtgtgtggagtgcacctctgccaaggtgtgtggccgaatgtggagcaagtgtcaaaggaaatgaaggaacattactgtctccaaattttccatccaattatgataataaccatgagtgtatctataaaatagaaacagaagccggcaagggcatccaccttagaacacgaagcttccagctgtttgaaggagatactctaaaggtatatgatggaaaagacagttcctcacgtccactgggcacgttcactaaaaatgaacttctggggctgatcctaaacagcacatccaatcacctgtggctagagttcaacaccaatggatctgacaccgaccaaggttttcaactcacctataccagttttgatctggtaaaatgtgaggatccgggcatccctaactacggctataggatccgtgatgaaggccactttaccgacactgtagttctgtacagttgcaacccggggtacgccatgcatggcagcaacaccctgacctgtttgagtggagacaggagagtgtgggacaaaccactaccttcgtgcatagcggaatgtggtggtcagatccatgcagccacatcaggacgaatattgtcccctggctatccagctccgtatgacaacaacctccactgcacctggattatagaggcagacccaggaaagaccattagcctccatttcattgttttcgacacggagatggctcacgacatcctcaaggtctgggacgggccggtggacagtgacatcctgctgaaggagtggagtggctccgcccttccggaggacatccacagcaccttcaactcactcaccctgcagttcgacagcgacttcttcatcagcaagtctggcttctccatccagttctccacctcaattgcagccacctgtaacgatccaggtatgccccaaaatggcacccgctatggagacagcagagaggctggagacaccgtcacattccagtgtgaccctggctatcagctccaaggacaagccaaaatcacctgtgtgcagctgaataaccggttcttttggcaaccagaccctcctacatgcatagctgcttgtggagggaatctgacgggcccagcaggtgttattttgtcacccaactacccacagccgtatcctcctgggaaggaatgtgactggagagtaaaagtgaacccggactttgtcatcgccttgatattcaaaagtttcaacatggagcccagctatgacttcctacacatctatgaaggggaagattccaacagccccctcattgggagttaccagggctctcaggccccagaaagaatagagagtagcggaaacagcctgtttctggcatttcggagtgatgcctccgtgggcctttcagggttcgccattgaatttaaagagaaaccacgggaagcttgttttgacccaggaaatataatgaatgggacaagagttggaacagacttcaagcttggctccaccatcacctaccagtgtgactctggctataagattcttgacccctcatccatcacctgtgtgattggggctgatgggaaaccctcctgggaccaagtgctgccctcctgcaatgctccctgtggaggccagtacacgggatcagaaggggtagttttatcaccaaactacccccataattacacagctggtcaaatatgcctctattccatcacggtaccaaaggaattcgtggtctttggacagtttgcctatttccagacagccctgaatgatttggcagaattatttgatggaacccatgcacaggccagacttctcagctcactctcggggtctcactcaggggaaacattgcccttggctacgtcaaatcaaattctgctccgattcagtgcaaagagcggtgcctctgcccgcggcttccacttcgtgtatcaagctgttcctcgtaccagtgacacccaatgcagctctgtccccgagcccagatacggaaggagaattggttctgagttttctgccggctccatcgtccgattcgagtgcaacccgggatacctgcttcagggttccacggcgctccactgccagtccgtgcccaacgccttggcacagtggaacgacacgatccccagctgtgtggtaccctgcagtggcaatttcactcaacgaagaggtacaatcctgtcccccggctaccctgagccatacggaaacaacttgaactgtatatggaagatcatagttacggagggctcgggaattcagatccaagtgatcagttttgccacggagcagaactgggactcccttgagatccacgatggtggggatgtgaccgcacccagactgggaagcttctcaggcaccacagtaccggcactgctgaacagtacttccaaccaactctacctgcatttccagtctgacattagtgtggcagctgctggtttccacctggaatacaaaactgtaggtcttgctgcatgccaagaaccagccctccccagcaacagcatcaaaatcggagatcggtacatggtgaacgacgtgctctccttccagtgcgagcccgggtacaccctgcagggccgttcccacatttcctgtatgccagggaccgttcgccgttggaactatccgtctcccctgtgcattgcaacctgtggagggacgctgagcaccttgggtggtgtgatcctgagccccggcttcccaggttcttaccccaacaacttagactgcacctggaggatctcattacccatcggctatggtgcacatattcagtttctgaatttttctaccgaagctaatcatgacttccttgaaattcaaaatggaccttaccacaccagccccatgattggacaatttagcggcacggatctccccgcggccctgctgagcacaacgcatgaaaccctcatccacttttatagtgaccattcgcaaaaccggcaaggatttaaacttgcttaccaaggaggatctggaaacattggtcctgctttcccatgtcttgacaccccattccaagccagatgtcaaggagaagaaaggactttcaattaa

SEQ ID NO: 7062 - DNA, 10164 bp, Homo sapiens
  source 1..10164: mol_type = unassigned DNA
atgactgcgtggaggagattccagtcgctgctcctgcttctcgggctgctggtgctgtgcgcgaggctcctcactgcagcgaagggtcagaactgtggaggcttagtccagggtcccaatggcactattgagagcccagggtttcctcacgggtatccgaactatgccaactgcacctggatcatcatcacgggcgagcgcaataggatacagttgtccttccatacctttgctcttgaagaagattttgatattttatcagtttacgatggacagcctcaacaagggaatttaaaagtgagattatcgggatttcagctgccctcctctatagtgagtacaggatctatcctcactctgtggttcacgacagacttcgctgtgagtgcccaaggtttcaaagcattatatgaagttttacctagccacacttgtggaaatcctggagaaatcctgaaaggagttctgcatggaacgagattcaacataggagacaaaatccggtacagctgcctccctggctacatcttggaaggccacgccatcctgacctgcatcgtcagcccaggaaatggtgcatcgtgggacttcccagctcccttttgcagagctgagggagcctgcggaggaaccttacgcgggaccagcagctccatctccagcccgcacttcccttcagagtacgagaacaacgcggactgcacctggaccattctggctgagcccggggacaccattgcgctggtcttcactgactttcagctagaagaaggatatgatttcttagagatcagtggcacggaagctccatccatatggctaactggcatgaacctcccctctccagttatcagtagcaagaattggctacgactccatttcacctctgacagcaaccaccgacgcaaaggatttaacgctcagttccaagtgaaaaaggcgattgagttgaagtcaagaggagtcaagatgctgcccagcaaggatggaagccataaaaactctgtcttgagccaaggaggtgttgcattggtctctgacatgtgtccagatcctgggattccagaaaatggtagaagagcaggttccgacttcagggttggtgcaaatgtacagttttcatgtgaggacaattacgtgctccagggatctaaaagcatcacctgtcagagagttacagagacgctcgctgcttggagtgaccacaggcccatctgccgagcgagaacatgtggatccaatctgcgtgggcccagcggcgtcattacctcccctaattatccggttcagtatgaagataatgcacactgtgtgtgggtcatcaccaccaccgacccggacaaggtcatcaagcttgcctttgaagagtttgagctggagcgaggctatgacaccctgacggttggtgatgctgggaaggtgggagacaccagatcggtcttgtacgtgctcacgggatccagtgttcctgacctcattgtgagcatgagcaaccagatgtggctacatctgcagtcggatgatagcattggctcacctgggtttaaagctgtttaccaagaaattgaaaagggagggtgtggggatcctggaatccccgcctatgggaagcggacgggcagcagtttcctccatggagatacactcacctttgaatgcccggcggcctttgagctggtgggggagagagttatcacctgtcagcagaacaatcagtggtctggcaacaagcccagctgtgtattttcatgtttcttcaactttacggcatcatctgggattattctgtcaccaaattatccagaggaatatgggaacaacatgaactgtgtctggttgattatctcggagccaggaagtcgaattcacctaatctttaatgattttgatgttgagcctcagtttgactttctcgcggtcaaggatgatggcatttctgacataactgtcctgggtactttttctggcaatgaagtgccttcccagctggccagcagtgggcatatagttcgcttggaatttcagtctgaccattccactactggcagagggttcaacatcacttacaccacatttggtcagaatgagtgccatgatcctggcattcctataaacggacgacgttttggtgacaggtttctactcgggagctcggtttctttccactgtgatgatggctttgtcaagacccagggatccgagtccattacctgcatactgcaagacgggaacgtggtctggagctccaccgtgccccgctgtgaagctccatgtggtggacatctgacagcgtccagcggagtcattttgcctcctggatggccaggatattataaggattctttacattgtgaatggataattgaagcaaaaccaggccactctatcaaaataacttttgacagatttcagacagaggtcaattatgacaccttggaggtcagagatgggccagccagttcgtccccactgatcggcgagtaccacggcacccaggcaccccagttcctcatcagcaccgggaacttcatgtacctgctgttcaccactgacaacagccgctccagcatcggcttcctcatccactatgagagtgtgacgcttgagtcggattcctgcctggacccgggcatccctgtgaacggccatcgccacggtggagactttggcatcaggtccacagtgactttcagctgtgacccggggtacacactaagtgacgacgagcccctcgtctgtgagaggaaccaccagtggaaccacgccttgcccagctgcgacgctctatgtggaggctacatccaagggaagagtggaacagtcctttctcctgggtttccagatttttatccaaactctctaaactgcacgtggaccattgaagtgtctcatgggaaaggagttcaaatgatctttcacacctttcatcttgagagttcccacgactatttactgatcacagaggatggaagtttttccgagcccgttgccaggctcaccgggtcggtgttgcctcatacgatcaaggcaggcctgtttggaaacttcactgcccagcttcggtttatatcagacttctcaatttcgtacgagggcttcaatatcacattttcagaatatgacctggagccatgtgatgatcctggagtccctgccttcagccgaagaattggttttcactttggtgtgggagactctctgacgttttcctgcttcctgggatatcgtttagaaggtgccaccaagcttacctgcctgggtgggggccgccgtgtgtggagtgcacctctgccaaggtgtgtggccgaatgtggagcaagtgtcaaaggaaatgaaggaacattactgtctccaaattttccatccaattatgataataaccatgagtgtatctataaaatagaaacagaagccggcaagggcatccaccttagaacacgaagcttccagctgtttgaaggagatactctaaaggtatatgatggaaaagacagttcctcacgtccactgggcacgttcactaaaaatgaacttctggggctgatcctaaacagcacatccaatcacctgtggctagagttcaacaccaatggatctgacaccgaccaaggttttcaactcacctataccagttttgatctggtaaaatgtgaggatccgggcatccctaactacggctataggatccgtgatgaaggccactttaccgacactgtagttctgtacagttgcaacccggggtacgccatgcatggcagcaacaccctgacctgtttgagtggagacaggagagtgtgggacaaaccactaccttcgtgcatagcggaatgtggtggtcagatccatgcagccacatcaggacgaatattgtcccctggctatccagctccgtatgacaacaacctccactgcacctggattatagaggcagacccaggaaagaccattagcctccatttcattgttttcgacacggagatggctcacgacatcctcaaggtctgggacgggccggtggacagtgacatcctgctgaaggagtggagtggctccgcccttccggaggacatccacagcaccttcaactcactcaccctgcagttcgacagcgacttcttcatcagcaagtctggcttctccatccagttctccacctcaattgcagccacctgtaacgatccaggtatgccccaaaatggcacccgctatggagacagcagagaggctggagacaccgtcacattccagtgtgaccctggctatcagctccaaggacaagccaaaatcacctgtgtgcagctgaataaccggttcttttggcaaccagaccctcctacatgcatagctgcttgtggagggaatctgacgggcccagcaggtgttattttgtcacccaactacccacagccgtatcctcctgggaaggaatgtgactggagagtaaaagtgaacccggactttgtcatcgccttgatattcaaaagtttcaacatggagcccagctatgacttcctacacatctatgaaggggaagattccaacagccccctcattgggagttaccagggctctcaggccccagaaagaatagagagtagcggaaacagcctgtttctggcatttcggagtgatgcctccgtgggcctttcagggttcgccattgaatttaaagagaaaccacgggaagcttgttttgacccaggaaatataatgaatgggacaagagttggaacagacttcaagcttggctccaccatcacctaccagtgtgactctggctataagattcttgacccctcatccatcacctgtgtgattggggctgatgggaaaccctcctgggaccaagtgctgccctcctgcaatgctccctgtggaggccagtacacgggatcagaaggggtagttttatcaccaaactacccccataattacacagctggtcaaatatgcctctattccatcacggtaccaaaggaattcgtggtctttggacagtttgcctatttccagacagccctgaatgatttggcagaattatttgatggaacccatgcacaggccagacttctcagctcactctcggggtctcactcaggggaaacattgcccttggctacgtcaaatcaaattctgctccgattcagtgcaaagagcggtgcctctgcccgcggcttccacttcgtgtatcaagctgttcctcgtaccagtgacacccaatgcagctctgtccccgagcccagatacggaaggagaattggttctgagttttctgccggctccatcgtccgattcgagtgcaacccgggatacctgcttcagggttccacggcgctccactgccagtccgtgcccaacgccttggcacagtggaacgacacgatccccagctgtgtggtaccctgcagtggcaatttcactcaacgaagaggtacaatcctgtcccccggctaccctgagccatacggaaacaacttgaactgtatatggaagatcatagttacggagggctcgggaattcagatccaagtgatcagttttgccacggagcagaactgggactcccttgagatccacgatggtggggatgtgaccgcacccagactgggaagcttctcaggcaccacagtaccggcactgctgaacagtacttccaaccaactctacctgcatttccagtctgacattagtgtggcagctgctggtttccacctggaatacaaaactgtaggtcttgctgcatgccaagaaccagccctccccagcaacagcatcaaaatcggagatcggtacatggtgaacgacgtgctctccttccagtgcgagcccgggtacaccctgcagggccgttcccacatttcctgtatgccagggaccgttcgccgttggaactatccgtctcccctgtgcattgcaacctgtggagggacgctgagcaccttgggtggtgtgatcctgagccccggcttcccaggttcttaccccaacaacttagactgcacctggaggatctcattacccatcggctatggtgcacatattcagtttctgaatttttctaccgaagctaatcatgacttccttgaaattcaaaatggaccttaccacaccagccccatgattggacaatttagcggcacggatctccccgcggccctgctgagcacaacgcatgaaaccctcatccacttttatagtgaccattcgcaaaaccggcaaggatttaaacttgcttaccaagcctatgaattacagaactgtccagatccacccccatttcagaatgggtacatgatcaactcggattacagcgtggggcaatcagtatctttcgagtgttatcctgggtacattctaataggccatcctgtcctcacttgtcagcatgggatcaacagaaactggaactacccttttccaagatgtgatgccccttgtgggtacaacgtaacttctcagaacggcaccatctactcccctggctttcctgatgagtatccgatcctgaaggactgcatttggctcatcacggtgcctccagggcacggagtttacatcaacttcaccctgttacagacggaagctgtcaacgattacattgctgtttgggacggtcccgatcagaactcaccccagctgggagttttcagtggcaacacagccctcgaaacggcgtatagctccaccaaccaagtcctgctcaagttccacagcgacttttcaaatggaggcttctttgtcctcaatttccacgcatttcagctcaagaaatgtcaacctcccccagcggttccacaggcagaaatgcttactgaggatgatgatttcgaaataggagattttgtgaagtaccagtgccaccccgggtacaccttggtggggaccgacattctgacttgcaagctcagttcccagttgcagtttgagggttctctcccaacatgtgaagcacaatgcccagcaaatgaagtccggactggatcatcgggagtcattctcagtccagggtatccgggtaattattttaactcccagacttgctcttggagtattaaagtggaaccaaactacaacattaccatctttgtggacacatttcaaagtgaaaagcagtttgatgcactggaagtgtttgatggttcttctgggcaaagtcctctgctagtagtcttaagtgggaatcatactgaacaatcaaattttacaagcaggagtaatcagttatatctccgctggtccactgaccatgccaccagtaagaaaggattcaagattcgctatgcagcaccttactgcagtttgacccaccccctgaagaatgggggtattctaaacaggactgcaggagcggttggaagcaaagtgcattatttttgcaagcctggataccgaatggtcggccacagcaatgcaacctgtagacgaaacccacttggcatgtaccagtgggactccctcacgccactctgccaggctgtgtcctgtggaatcccagaatccccaggaaacggttcatttaccgggaacgagttcactttggacagtaaagtggtctatgaatgtcatgagggcttcaagcttgaatccagccagcaagcaacagccgtgtgtcaagaagatgggttgtggagtaacaaggggaagccgcccacgtgtaagccggtcgcttgccccagcattgaagctcagctctcagaacatgtcatctggaggctggtttcaggatccttgaatgagtacggtgctcaagtattgctgagctgcagtcctggttactacttagaaggctggaggctcctgcggtgccaggccaatgggacgtggaacataggagatgagaggccaagctgtcgagctggccactgcggttccccagacccgattgtgaacggtcacattagtggagatggcttcagttacagagacacggtggtttaccagtgcaatcctggtttccggcttgtgggaacttccgtgaggatatgcctgcaagaccacaagtggtctggacaaacgcctgtctgtgtccccatcacatgtggtcaccctggaaaccctgcccacggattcactaatggcagtgagttcaacctgaatgatgtcgtgaatttcacctgcaacacgggctatttgctgcagggcgtgtctcgagcccagtgtcggagcaacggccagtggagtagccctctgcccacgtgtcgagtggtgaactgttctgatccaggctttgtggaaaatgccattcgtcacgggcaacagaacttccctgagagttttgagtatggaatgagtatcctgtaccattgcaagaagggattttacttgctgggatcttcagccttgacctgtatggcaaatggcttatgggaccgatccctgcccaagtgtttggctatatcgtgtggacacccaggggtccctgccaacgccgtcctcactggagagctgtttacctatggcgccgtcgtgcactactcctgcagagggagcgagagcctcataggcaacgacacgagagtgtgccaggaagacagtcactggagcggggcactgccccactgcacaggaaataatcctggattctgtggtgatccggggaccccagcacatgggtctcggcttggtgatgactttaagacaaagagtcttctccgcttctcctgtgaaatggggcaccagctgaggggctcccctgaacgcacgtgtttgctcaatgggtcatggtcaggactgcagccggtgtgtgaggccgtgctgtgtcctcagccgccgccggtgcagaatggaacagtggagggaagtgatttccgctggggctccagcataagttacagctgcatggacggttaccagctctctcactccgccatcctctcctgtgaaggtcgcggggtgtggaaaggagagatcccccagtgtctccctgtgttctgcggagaccctggcatccccgcagaagggcgacttagtgggaaaagtttcacctataagtccgaagtcttcttccagtgcaaatctccatttatactcgtgggatcctccagaagagtctgccaagctgacggcacgtggagcggcatacaacccacctgcattgatcctgctcataacacctgcccagaccctggtacgccacactttggaatacagaatagctccagaggctatgaggttggaagcacggtttttttcaggtgcagaaaaggctaccatattcaaggttccacgactcgcacctgccttgccaatttaacatggagtgggatacagaccgaatgtatacctcatgcctgcagacagccagaaaccccggcacacgcggatgtgagagccatcgatcttcctactttcggctacaccttagtgtacacctgccatccaggctttttcctcgcagggggatctgagcacagaacatgtaaagcagacatgaaatggacaggaaagtcgcctgtgtgtaaaagtaaaggagtgagagaagttaatgaaacagttactaaaactccagttccttcagatgtctttttcgtcaattcactgtggaaggggtattatgaatatttagggaaaagacaacccgccactctaactgttgactggttcaatgcaacaagcagtaaggtgaatgccaccttcagcgaagcctcgccagtggagctgaagttgacaggcatttacaagaaggaggaggcccacttactcctgaaagcttttcaaattaaaggccaggcagatatttttgtaagcaagttcgaaaatgacaactggggactagatggttatgtgtcatctggacttgaaagaggaggatttacttttcaaggtgacattcatggaaaagactttggaaaatttaagctagaaaggcaagatcctttaaacccagatcaagactcttccagtcattaccacggcaccagcagtggctctgtggcggctgccattctggttcctttctttgctctaattttatcagggtttgcattttacctctacaaacacagaacgagaccaaaagttcaatacaatggctatgctgggcatgaaaacagcaatggacaagcatcgtttgaaaaccccatgtatgatacaaacttaaaacccacagaagccaaggctgtgaggtttgacacaactctgaacacagtctgtacagtggtatag

SEQ ID NO: 7063 - DNA, 13108 bp, Homo sapiens
  source 1..13108: mol_type = unassigned DNA
tcctgggatggggtaggaggctattgtgaatgaggctcataagcatcgcccccggccctagatggcaagttcaaagccaccacccaagatcagctggccagaactgcacgttccaactgcacggtcccaatgggacagttgagagcccagggttcccatatggctaccccaattacgccaactgcacgtggaccatcaccgcggaagagcagcacagaatccagcttgtgttccagtcctttgccctggaagaggactttgatgtcctgtcggtgtttgatggtccaccccagccagagaatctgcgtacgaggctcacaggctttcagctgccagccaccattgttagtgcagccaccaccctctctctgcgcctcatcagcgactatgcagtcagtgcccaaggcttccacgccacctatgaagttctccccagccacacatgtgggaacccagggaggctgcccaatggcatccagcagggttcaaccttcaacctcggtgacaaggtccgctacagctgcaaccttggcttcttcctggagggccacgccgtgctcacctgccacgctggctctgagaacagcgccacgtgggacttccccctgccttcctgcagagctgatgatgcctgtggtgggaccctgcggggccagagtggcatcatctccagcccccacttcccctcggagtaccataacaatgccgactgcacatggaccatcctggctgagctgggggacaccatcgccctggtgtttattgacttccagctggaggatggttacgactttctggaagtcactgggacagaaggctcctccctctggttcaccggagccagcctcccagcccccgttatcagcagcaagaactggctgcgactgcacttcacatcggatggcaaccaccggcagcgcggattcagtgcccaataccaagtcaagaagcaaattgagttgaagtctcgaggtgtgaagctgatgcccagcaaagacaacagccagaagacgtctgtgttaactcaggttggtgtgtcccaaggacataatatgtgtccagaccctggcatacccgaaaggggcaaaagactaggctcggatttcaggttaggatccagcgtccagttcacctgcaacgagggctatgacctgcaagggtccaagcggatcacctgtatgaaagtgagcgacatgtttgcggcctggagcgaccacaggccagtctgccgagcccgcatgtgtgatgcccaccttcgaggcccctcgggcatcatcacctcccccaatttccccattcagtatgacaacaatgcacactgtgtgtggatcatcacagcactcaacccctccaaggtgatcaagctcgcctttgaggagtttgatttggagaggggctatgacaccctgacggtcggtgatggtggtcaggatggggaccagaagacagttctctacatcctgacaggtacatcggtcccggatctcattgtcagcaccaatcatcaaatgtggctcctcttccagactgatggcagtggcagttccctgggattcaaggcttcttatgaagagatcgagcagggcagttgcggtgaccctggcatacctgcatatggccggagggaaggctcccggtttcaccacggtgacacactcaagtttgagtgccagcccgcctttgagctggtgggacagaaggcaatcacatgccaaaagaataaccaatggtcggctaagaagccaggctgcgtgttctcctgcttcttcaacttcaccagcccgtctggggttgtcctgtctcccaactacccagaggactatggcaaccacctccactgtgtctggctcatcctggccaggcctgagagccgcatccacctggccttcaacgacattgacgtggagcctcagtttgatttcctggtcatcaaggatggggccaccgccgaggcgcccgtcctgggcaccttctcaggaaaccagcttccctcctccatcacaagcagtggccacgtggcccgtctcgagttccagactgaccactccacagggaagaggggcttcaacatcacttttaccaccttccgacacaacgagtgcccggatcctggcgttccagtaaatggcaaacggtttggggacagcctccagctgggcagctccatctccttcctctgtgatgaaggcttccttgggactcagggctcagagaccatcacctgcgtcctgaaggagggcagcgtggtctggaacagcgctgtgctgcggtgtgaagctccctgtggtggtcacctgacttcgcccagcggcaccatcctctctccgggctggcctggcttctacaaggatgccttgagctgtgcctgggtgattgaggcccagccaggctaccccatcaaaatcaccttcgacagattcaaaaccgaggtcaactatgacaccctggaagtacgcgatgggcggacttactcagcgcccttgatcggggtttaccacgggacccaggttccccagttcctcatcagcaccagcaactacctctacctcctcttctctaccgacaagagtcactcggacatcggcttccagctccgctatgagactataacactgcagtcagaccactgtctggatccaggaatcccagtaaatggacagcgtcatgggaatgacttctacgtgggcgcgctggtgaccttcagctgtgactcgggctacacattaagtgacggggagcctctggagtgtgagcccaacttccagtggagccgggccctgcccagttgtgaagctctctgtggtggcttcattcaaggctccagtgggaccatcttgtcgccagggttccctgacttctaccccaacaacttgaactgcacctggattatcgaaacatctcatggcaagggtgtgttcttcactttccacaccttccacctggaaagtggccatgactacctcctcatcactgagaacggcagcttcacccagcccctgaggcagctaactggatctcggctgccagctcccatcagcgctgggctctatggcaacttcactgcccaggtccgcttcatctctgatttctccatgtcatatgaaggattcaacatcaccttctcagagtacgacttggagccctgtgaggagcccgaggtcccagcctacagcatccggaagggcttgcagtttggcgtgggcgacaccttgaccttctcctgcttccccgggtaccgtctggagggcaccgcccgcatcacgtgcctggggggcagacggcgcctgtggagctcgcctctgccaaggtgtgttgctgagtgtgggaattcagtcacaggcactcagggtactttgctgtcccccaactttcctgtgaactacaataacaatcatgaatgcatctactccatccagacccagccagggaagggaattcagctgaaagccagggcattcgaactctccgaaggagatgtcctcaaggtttatgatggcaacaacaactccgcccgtttgctgggagtttttagccattctgagatgatgggggtgactttgaacagcacatccagcagtctgtggcttgatttcatcactgatgctgaaaacaccagcaagggctttgaactgcacttttccagctttgaactcatcaaatgtgaggacccaggaacccccaagtttggctacaaggttcatgatgaaggtcattttgcagggagctccgtgtccttcagctgtgaccctggatacagcctgcggggtagtgaggagctgctgtgtctgagtggagagcgccggacctgggaccggcctctgcccacctgtgtcgccgagtgtggagggacagtgagaggagaggtgtcggggcaggtgctgtcacccgggtatccagctccctatgaacacaatctcaactgcatctggaccatcgaagcagaggccggctgcaccattgggctacacttcctggtgtttgacacagaggaggttcacgacgtgctgcgcatctgggatgggcctgtggagagcggggttctgctgaaggagctgagtggcccggccctgcccaaggacctgcatagcaccttcaactcggtcgtcctgcagttcagcactgacttcttcaccagcaagcagggctttgccattcaattttcagtgtccacagcaacgtcctgcaatgaccctgggatcccgcagaatgggagtcggagtggtgacagttgggaagccggcgactccacagtgttccagtgtgaccctggctacgcgctgcagggaagtgcagagatcagctgtgtgaagatcgagaacaggttcttctggcagcccagcccgccaacatgcatcgctccctgcgggggagacctgacaggaccatctggagtcatcctctcaccaaattacccagaaccctacccgccaggcaaggagtgtgactggaaagtgaccgtctcaccagactacgtcatcgccctggtatttaacatctttaacctggagcctggctatgacttcctccatatctacgacggacgggactctctcagccctctcataggaagcttctatggctcccagctcccaggccgcattgaaagcagcagcaacagcctcttcctcgccttccgcagcgatgcatctgtgagcaatgctggcttcgtcattgactatacagaaaacccgcgggagtcatgttttgatcctggttccatcaagaacggcacacgggtggggtccgacctgaagctgggctcctccgtcacctactactgccacgggggctacgaagttgagggcacctcgaccctgagctgcatcctggggcctgatgggaagcccgtgtggaacaatccccggccagtctgcacagccccctgtgggggacagtatgtgggttcggacggagtggtcttgtcccccaactacccccagaactacaccagtggacagatctgcttgtattttgttactgtgcccaaggactatgtggtgtttggccagttcgccttctttcacacggccctcaacgacgtggtggaggttcacgacggccacagccagcactcgcggctcctcagctccctctcgggctcccatacaggagaatcactgcccttggccacctccaatcaagttctcattaagttcagcgccaaaggcctcgcaccagccagaggcttccactttgtctaccaagcggttcctcgaaccagcgccacgcagtgcagctctgtgccggaaccccgctatggcaagaggctgggcagtgacttctcggtgggggccatcgtccgcttcgaatgcaactccggctatgccctgcaggggtcgccagagatcgagtgcctccctgtgcctggggccttggcccaatggaatgtctcagcgcccacgtgtgtggtgccgtgtggaggcaacctcacagagcgcaggggcaccatcctgtcccctggcttcccagagccgtacctcaacagcctcaactgtgtgtggaagatcgtggtccccgaaggcgctggcatccagatccaagttgtcagttttgtgacagagcagaactgggactcgctggaagtatttgatggtgcagataacactgtaaccatgctggggagtttctcaggaacaaccgtgcctgcccttctgaacagcacctccaaccagctctaccttcatttctactcagatatcagcgtatctgcagctggcttccacttggagtacaaaacggtgggcctgagcagttgtccggaacctgctgtgcccagtaacggggtgaagactggcgagcgctacttggtgaatgatgtggtgtctttccagtgtgagccgggatatgccctccagggccacgcccacatctcctgcatgcccggaacagtgcggcgatggaactaccctcctccactctgtattgcacagtgtgggggaacagtggaggagatggagggggtgatcctgagccccggcttcccaggcaactaccccagtaacatggactgctcctggaaaatagcactgcccgtgggctttggagctcacatccagttcctgaacttctccaccgagcccaaccacgactacatagaaatccggaatggcccctatgagaccagccgcatgatgggaagattcagtggaagcgagcttccaagctccctcctctccacgtcccacgagaccaccgtgtatttccacagcgaccactcccagaatcggccaggattcaagctggagtatcaggatttgacttactcccaccagatttcttccttcctgagaggttttgatctctcggagttggaaagaaccaactcaactcctcccgtcgccgcttcctatgtctgggatcttgatcctggttgtgaagcctatgaacttcaagagtgcccagacccagagccctttgccaatggcattgtgaggggagctggctacaacgtgggacaatcagtgaccttcgagtgcctcccggggtatcaattgactggccaccctgtcctcacgtgtcaacatggcaccaaccggaactgggaccaccccctgcccaagtgtgaagtcccttgtggcgggaacatcacttcttccaacggcactgtgtactccccggggttccctagcccgtactccagctcccaggactgtgtctggctgatcaccgtgcccattggccatggcgtccgcctcaacctcagcctgctgcagacagagccctctggagatttcatcaccatctgggatgggccacagcaaacagcaccacggctcggcgtcttcacccggagcatggccaagaaaacagtgcagagttcatccaaccaggtcctgctcaagttccaccgtgatgcagccacaggggggatcttcgccatagctttctccgcttatccactcaccaaatgccctcctcccaccatcctccccaacgccgaagtcgtcacagagaatgaagaattcaatataggtgacatcgtacgctacagatgcctccctggctttaccttagtggggaatgaaattctgacctgcaaacttggaacctacctgcagtttgaaggaccacccccgatatgtgaagtgcactgtccaacaaatgagcttctgacagactccacaggcgtgatcctgagccagagctaccctggaagctatccccagttccagacctgctcttggctggtgagagtggagcccgactataacatctccctcacagtggagtacttcctcagcgagaagcaatatgatgagtttgagatttttgatggtccatcaggacagagtcctctgctgaaagccctcagtgggaattactcagctcccctgattgtcaccagctcaagcaactctgtgtacctgcgttggtcatctgatcacgcctacaatcggaagggcttcaagatccgctattcagccccttactgcagcctgcccagggctccactccatggcttcatcctaggccagaccagcacccagcccgggggctccatccactttggctgcaacgccggctaccgcctggtgggacacagcatggccatctgtacccggcacccccagggctaccacctgtggagcgaagccatccctctctgtcaagctctttcctgtgggcttcctgaggcccccaagaatggaatggtgtttggcaaggagtacacagtgggaaccaaggccatgtacagctgcagtgaaggctaccacctccaggcaggcgctgaggccactgcagagtgtctggacacaggcctatggagcaaccgcaatgtcccaccacagtgtgtccctgtgacttgtcctgatgtcagtagcatcagcgtggagcatggccgatggaggcttatctttgagacacagtatcagttccaggcccagctgatgctcatctgtgaccctggctactactatactggccaaagggtcatccgctgtcaggccaatggcaaatggagcctcggggactctacgcccacctgccgaatcatctcctgtggagagctcccgattccccccaatggccaccgcatcggaacactgtctgtctacggggcaacagccatcttctcctgcaattccggatacacactggtgggctccagggtgcgtgagtgcatggccaatgggctctggagtggctctgaagtccgctgccttgctggacactgtgggactcctgagcccattgtcaacggacacatcaatggggagaactacagctaccggggcagtgtggtgtaccaatgcaatgctggcttccgcctgatcggcatgtctgtgcgcatctgccagcaggatcatcactggtcgggcaagacccctttctgtgtgctggtgtcctgtggccatccgggctccccgcctcactcccagatgtctggagacagttatactgtgggagcagtggtgcggtacagctgcatcggcaagcgtactctggtgggaaacagcacccgcatgtgtgggctggatggacactggactggctccctccctcactgctcaggaaccagcgtgggagtttgcggtgaccctgggatcccggctcatggcatccgtttgggggacagctttgatccaggcactgtgatgcgcttcagctgtgaagctggccacgtgctccggggatcgtcagagcgcacctgtcaagccaatggctcgtggagcggctcgcagcctgagtgtggagtgatctcttgtgggaaccctgggactccaagtaatgcccgagttgtgttcagtgatggcctggttttctccagctctatcgtctatgagtgccgggaaggatactacgccacaggcctgctcagccgtcactgctcggtcaatggtacctggacaggcagtgaccctgagtgcctcgtcataaactgtggtgaccctgggattccagccaatggccttcggctgggcaatgacttcaggtacaacaaaactgtgacatatcagtgtgtccctggctatatgatggagtcacatagagtatctgtgctgagctgcaccaaggaccggacatggaatggaaccaagcccgtctgcaaagctctcatgtgcaagccacctccgctcatccccaatgggaaggtggtggggtctgacttcatgtggggctcaagtgtgacttatgcctgcctggaggggtaccagctctccctgcccgcggtgttcacctgtgagggaaatgggtcctggaccggagagctgcctcagtgtttccctgtgttctgcggggatcctggtgtcccgtcccgtgggaggagagaggaccgaggcttctcctacaggtcatctgtctccttctcctgccatccccctctggtgctggtgggctctccacgcaggttttgccagtcagatgggacatggagtggcacccagcccagctgcatagatccgaccctgaccacgtgtgcggaccctggtgtgccacagtttgggatacagaacaattctcagggctaccaggttggaagcacagtcctcttccgttgtcaaaaaggctacctgcttcagggctccaccaccaggacctgcctcccaaacctgacctggagtggaaccccacctgactgtgtcccccaccactgcaggcagccagagacgccaacgcatgccaacgtcggggccctggatttgccctccatgggctacacgctcatctactcctgccaggagggcttctccctcaagggtggctccgagcaccgcacctgcaaggcggatggcagctggacaggcaagccgcccatctgcctggaggtccggcccagtgggagacccatcaacactgcccgggagccaccgctcacccaagccttgattcctggggatgtttttgccaagaattccctgtggaaaggggcctatgaataccaggggaagaagcagccagccatgctcagagtgactggcttccaagttgccaacagcaaggtcaatgccaccatgatcgaccacagtggcgtggagctgcacttggctggaacttacaagaaagaagattttcatctcctactccaggtgtaccagattacagggcctgtggagatctttatgaataagttcaaagatgatcactgggctttagatggccatgtctcgtcagagtcctccggagccaccttcatctaccaaggctctgtcaagggccaaggctttgggcagttcggctttcaaagactggacctcaggctgctggagtcagaccccgagtccattggccgccactttgcttccaacagcagctcagtggcagccgcgatcctggtgcctttcatcgccctcattattgcgggcttcgtgctctatctctacaagcacaggagaagacccaaagttcctttcaatggctatgctggccacgagaacaccaatgttcgggccacatttgagaacccaatgtacgaccgcaacatccagcccacagacatcatggccagcgaggcggagttcacagtcagcacagtgtgcacagcagtatagccacccggcctggccgccaccaccgccaccgagagccccgcctccagcagccgttccccagggggcaggaagtaggctcccctgagcacagtgcccagtgcccatcttcgttcgtctccttgcctgtgtctgctactgctgggactcaggccctcgccctgccgccatctatgccagttaccctggagaggactcctgccgtgtcctgaaaaggcagaaaaggaagaggggctgcagacagaggaagaaagtttatggatttaaaatagcaaagcaacttgtggatctgtgtgtgtgtgtgtgtgtatgggcctgatcacacacaaacacacacacctctccttcattcacgtcctatggaagagaccataaaggcttcaaaactagaagtgcgcatgaaggatgcttcatgccctgttccccacacagagaagagatgaagagggggaggtacggtcagctttcaaaacaatatgccccccgcccatcccatgtgtgaggacatggtgactcggtgactgtaacagtaggacacatcccatcatgcggtcagagtgcagaaacccggtcagcgtgcagaaaccagctgtctgctgatgaacggcccatctgcacagcggcagcaaggattaccccaagggcaggaaaaaagtctttggaaatagattgaaaatcagtttctttatttttttcaaacactgttttattgagttctaaacccagtggattaaaaagtcatttgggtcctgggaagcactgggaaagaagggagagccggggaggatagggcaggagtctggccaggagcccaaggtcaagtctggctgtcaactgacaaagagaagagaagacaagtctgtggcccagacaggatgccaagtctgggggcagcagcagggtccttgagagaacaggggagcaagcctgccccagtacccaaaaaacaatggctatcatgtactggggttattctctgtgcctgacactttacctgtagtatttctagtctgcacaataacaccaaaatgtaggatttgttattcccctttgacagatgagaaaacagaagcctgcaaaggtaaagacagagttaggaagtgtggagtcagaatgcaaacccagatcagtctgccccaaagtccactacaccagctgccagaaaccctgttctagaaggggcagctaagaagggaggagccgatgaatctctacagtagcactgtggccaggtctggaaagccaggcaagacacctgtgtgtcctatctgggttctgctgtctccgcgtaggcagcttcggggcaaggattcaactccccaggcctcccacggttggtgctggctccttggctcccagcagccgctgaccatagccagcaaaagacctggcaggtcctgaatcaaaacaacagagtggctgaaagtcacacctctccagctccttgcgagtgggtttgattgattttgacagctatatcatgcttgggtcgttcatgaattccatgagaattgttgggaagttcatgagtttaggaatcaaagtatagcatttagggccactttctctgtcctcgggaaggcccccacaagcttaagcccctgtatacgtgtgacatgctggcctcagagattcatgtcacatattgaaatagcaaatagaaatgtgcaggagcggagggacagcgacacctggttcttaagcaaattctagattggaacaattagaagatctgactgatgttaagagtggccagaggaaagtgagaggcgtccatttccagcagacacaatggaggctgacagaggcaggagcctacccctggccacaccacctctgggacacggcacccccctgggcctggagggagagggccaatccagacacactcacactctcatctctttccttggctggaaacaagtgcaggaagctcccctcccaatttcttatgctcccttcccccttacactcctctccttcgactgctcccttcccccttcttatgcccctctcagaccacccagcggatgcctattcccgccccccacccctcccctgcgtctccttgtaaagttccatgagatgctcgaggagcacctgctggtggggcacccagcactctgctgggcatcaccctccgcacccctgacatttctctccacctccagaggcttggaagggaacagggcagatgaggcccttcacccaccatctacgccatatacccatcaccatcccatgaggaaaaaaaaaaaagtaaaacaaagacaaaaaaaatcttttgtacagagatatatttttattatacaaagtttgtacagtaccaaaaaagaaaaaaaaaaaggtgtaaatttttttttcattattgtaggtaaacggtagtggaagccttttttgtaaatgtaataaaatgtataaatatggttttcagaaaacatcaagtgctgtaaatatgtaatctacacaccttcttggcttgtctgcagtatatacatttaatttatctgtctctgtatatgaggcttccccctggggtcctgcattatggtactttcctgaatttgaaagcaattttaaattttttgaattcaaataaaatataaatttttgcattg

SEQ ID NO: 7064 - DNA, 1544 bp, Homo sapiens
  source 1..1544: mol_type = unassigned DNA
caactgatgaaaggaggaagaagaaagggacttggaacaagcaagaaaatgagcctaatggtggcccatgtgatcaaatttgcataaggacagaagacaagaccgaaggagctgatgggtagagaggagatattgctgtcaacagagtggaggtctcagtggggaaagatgaactctactggaggttcagaaaacaactgtgaaagaaatacttgaggcatgtttcaacagactgcaaatataccatctaattcttggaaacaagtacaagataaattgattctgaagctgagggctttgggcagcaaaatctgactttccggaagaggtgtaagatggtgctggtggagctttgtaaggattctctgcagggctagagttctgagtccacaggtcctctttgcaaagcccgcatgtgtgatgcccaccttcgaggcccctcgggcatcatcacctcccccaatttccccattcagtatgacaacaatgcacactgtgtgtggatcatcacagcactcaacccctccaaggcgggaggagacccagggaacatacaatgcaacaaggagggtctaagtgtggaaactcaaagtctaagactgaggaatagaagttgtcttctgggaaacagcaaggacaatggatgctgtgtgcctaaccctgttcatggaactggcctacaggtgatcaagctcgcctttgaggagtttgatttggagaggggctatgacaccctgacggtcggtgatggtggtcaggatggggaccagaagacagttctctacatcctgacaggtacatcggtcccggatctcattgtcagcaccaatcatcaaatgtggctcctcttccagactgatggcagtggcagttccctgggattcaaggcttcttatgaagagatcgagcagggcagttgcggtgaccctggcatacctgcatatggccggagggaaggctcccggtttcaccacggtgacacactcaagtttgagtgccagcccgcctttgagctggtgggacagaaggcaatcacatgccaaaagaataaccaatggtcggctaagaagccaggctgcgtgtgtaagtgagcagggaggaggccacgccagggtcttcactgagaggcaggggcccgtttcctagctaatccaggggccccgtccctgggaaccttgcaggttgtaacaacagctgcactctggttggtttattctactcctcggaacgttgctggtggggtccttatttctggcaggaatgtcgactgtagcactgagaacaagtgctcctgacatttggggatgctcttcaacaccgtcttacccttcttggtgatccttaagagcaaggagacaccactgggacaaagcccaccaggctcagacccagacatttcctgctcaccgtcattgccacccctgacaccatctaatccagcagggtggaagggactgtcaagtttgtaaggctgtagacaccaccagcctccagtaactgtgggaaactggccttgccaggatataaacagtttcctaaaattg

SEQ ID NO: 7065 - DNA, 3212 bp, Homo sapiens
  source 1..3212: mol_type = unassigned DNA
caggagaatcactgcccttggccacctccaatcaagttctcattaagttcagcgccaaaggcctcgcaccagccagaggcttccactttgtctaccaagcggttcctcgaaccagcgccacgcagtgcagctctgtgccggaaccccgctatggcaagaggctgggcagtgacttctcggtgggggccatcgtccgcttcgaatgcaactccggctatgccctgcaggggtcgccagagatcgagtgcctccctgtgcctggggccttggcccaatggaatgtctcagcgcccacgtgtgtggtgccgtgtggaggcaacctcacagagcgcaggggcaccatcctgtcccctggcttcccagagccgtacctcaacagcctcaactgtgtgtggaagatcgtggtccccgaaggcgctggcatccagatccaagttgtcagttttgtgacagagcagaactgggactcgctggaagtatttgatggtgcagataacactgtaaccatgctggggagtttctcaggaacaaccgtgcctgcccttctgaacagcacctccaaccagctctaccttcatttctactcagatatcagcgtatctgcagctggcttccacttggagtacaaaacggtgggcctgagcagttgtccggaacctgctgtgcccagtaacggggtgaagactggcgagcgctacttggtgaatgatgtggtgtctttccagtgtgagccgggatatgccctccagggccacgcccacatctcctgcatgcccggaacagtgcggcgatggaactaccctcctccactctgtattgcacagtgtgggggaacagtggaggagatggagggggtgatcctgagccccggcttcccaggcaactaccccagtaacatggactgctcctggaaaatagcactgcccgtgggctttggagctcacatccagttcctgaacttctccaccgagcccaaccacgactacatagaaatccggaatggcccctatgagaccagccgcatgatgggaagattcagtggaagcgagcttccaagctccctcctctccacgtcccacgagaccaccgtgtatttccacagcgaccactcccagaatcggccaggattcaagctggagtatcaggcctatgaacttcaagagtgcccagacccagagccctttgccaatggcattgtgaggggagctggctacaacgtgggacaatcagtgaccttcgagtgcctcccggggtatcaattgactggccaccctgtcctcacgtgtcaacatggcaccaaccggaactgggaccaccccctgcccaagtgtgaagtcccttgtggcgggaacatcacttcttccaacggcactgtgtactccccggggttccctagcccgtactccagctcccaggactgtgtctggctgatcaccgtgcccattggccatggcgtccgcctcaacctcagcctgctgcagacagagccctctggagatttcatcaccatctgggatgggccacagcaaacagcaccacggctcggcgtcttcacccggagcatggccaagaaaacagtgcagagttcatccaaccaggtcctgctcaagttccaccgtgatgcagccacaggggggatcttcgccatagctttctccgatcactgcagatattttaaccagaaatcaggaaagctggattttactcccagctccaccttgggccagctgtgtaaaaccttgcacaggtcccttccccacttgagacttcagtttcttcacctgtagaattaccggcttggagtttgtgacctgtaagaattctgtgaggtagtaaggcaaatattctaacccccactttacaaatgaagaaatagggcaaaggaaggctcaagtacttgcccaaaaccatgtggatagaactggaaacagaacccagcctccgcagtatctgctgcagtatctgctacagtatctgctctggtgtgactatacagtgttattacatcatgcgtgcacttgcagaaacacactaagactgtgaaagaggtagtgaaagaaacaggaagcaacagagagaaacaaggatgtaaagaacctaagcagctgtgactgccattcccaggagctatcgtccagggtgagtgcaatgtgggaatgagactccgccctctccatctgctcagttcccatgcccctctcattgggcacacctgtcgctccactaatgaaatccaggctttaaggctctgtcattttgacttgtgactttcccatagagtgataagagtatggacttcagagtcacagacgggttcaaaccttggctctgacacatgcaagctatgtaactttgtctgtcatttcacccttctgagcctcaatgttattatgcacaaaataggaatcatataagtacctaacctcctaaagttaaatgaaacaatgcttggaaatccttagctccaggcacagagtataaaaggtgatcaataaattatagttctaatagtcatcattgtcatgattatttttattatatctagatattgacaggcttggtgtaaagttaccttggtggtaggccaggtctcttgttcctgttcctgagccttcacctgtaccagaaccaggcaaaggaggctcagcacagccccaggccatccttatttccaagttcttctcagcaaggtctttcattgagagtgcttgcctaagggcacaatgctccttctgcctctcagatgagacacaaggcccttgctatggtgtaaatgcttaggcccccctagaattcatatgctgacatcctaacccccaaggtgatggtattaggaggtggggccttgggaggcaattaggtcagacaacagagccctcatgaatgggattagtgcctttataaaagagacccacagaatcaccacactgaagccttctcagtggaaagagctaagaagcacaggaaacacagaggccgaggtgggcggatcgcctgaggtgaggagttcaagaccagcctgaccaacatggagaaaccctgtctctactaaaaatacaaaattagatgggcgtggtggcgcatgcctgtaatcccagctactcaggaggctgaggcagaagaatcggttgaacctgggaggcggaggttgcagtgagccaagatcacgccattgcactccagcctgggcaacaagtgtgaaactccatctc

SEQ ID NO: 7066 - DNA, 4379 bp, Homo sapiens
  source 1..4379: mol_type = unassigned DNA
gagagacagacaaacagcacaagagacagaaacaaagcaggcagcaccataggtagggaagtattttttttttaagtttgagaggcatttctgtagacagtccaacaactggacagacacgcaggcaccttggcaggtagacaggcaaacgacttgtcatctttgtcaggttcttcagagctgtgagttgctttctggatgcagctgatgggggttaatctatggttattgtgattctctttccagctgagtgtgggaattcagtcacaggcactcagggtactttgctgtcccccaactttcctgtgaactacaataacaatcatgaatgcatctactccatccagacccagccagggaagggaattcagctgaaagccagggcattcgaactctccgaaggagatgtcctcaaggtttatgatggcaacaacaactccgcccgtttgctgggagtttttagccattctgagatgatgggggtgactttgaacagcacatccagcagtctgtggcttgatttcatcactgatgctgaaaacaccagcaagggctttgaactgcacttttccagctttgaactcatcaaatgtgaggacccaggaacccccaagtttggctacaaggttcatgatgaaggtcattttgcagggagctccgtgtccttcagctgtgaccctggatacagcctgcggggtagtgaggagctgctgtgtctgagtggagagcgccggacctgggaccggcctctgcccacctgtgtcgccgagtgtggagggacagtgagaggagaggtgtcggggcaggtgctgtcacccgggtatccagctccctatgaacacaatctcaactgcatctggaccatcgaagcagaggccggctgcaccattgggctacacttcctggtgtttgacacagaggaggttcacgacgtgctgcgcatctgggatgggcctgtggagagcggggttctgctgaaggagctgagtggcccggccctgcccaaggacctgcatagcaccttcaactcggtcgtcctgcagttcagcactgacttcttcaccagcaagcagggctttgccattcaattttcagtgtccacagcaacgtcctgcaatgaccctgggatcccgcagaatgggagtcggagtggtgacagttgggaagccggcgactccacagtgttccagtgtgaccctggctacgcgctgcagggaagtgcagagatcagctgtgtgaagatcgagaacaggttcttctggcagcccagcccgccaacatgcatcgctccctgcgggggagacctgacaggaccatctggagtcatcctctcaccaaattacccagaaccctacccgccaggcaaggagtgtgactggaaagtgaccgtctcaccagactacgtcatcgccctggtatttaacatctttaacctggagcctggctatgacttcctccatatctacgacggacgggactctctcagccctctcataggaagcttctatggctcccagctcccaggccgcattgaaagcagcagcaacagcctcttcctcgccttccgcagcgatgcatctgtgagcaatgctggcttcgtcattgactatacagaaaacccgcgggagtcatgttttgatcctggttccatcaagaacggcacacgggtggggtccgacctgaagctgggctcctccgtcacctactactgccacgggggctacgaagttgagggcacctcgaccctgagctgcatcctggggcctgatgggaagcccgtgtggaacaatccccggccagtctgcacagccccctgtgggggacagtatgtgggttcggacggagtggtcttgtcccccaactacccccagaactacaccagtggacagatctgcttgtattttgttactgtgcccaaggactatgtggtgtttggccagttcgccttctttcacacggccctcaacgacgtggtggaggttcacgacggccacagccagcactcgcggctcctcagctccctctcgggctcccatacaggagaatcactgcccttggccacctccaatcaagttctcattaagttcagcgccaaaggcctcgcaccagccagaggcttccactttgtctaccaagcggttcctcgaaccagcgccacgcagtgcagctctgtgccggaaccccgctatggcaagaggctgggcagtgacttctcggtgggggccatcgtccgcttcgaatgcaactccggctatgccctgcaggggtcgccagagatcgagtgcctccctgtgcctggggccttggcccaatggaatgtctcagcgcccacgtgtgtggtgccgtgtggaggcaacctcacagagcgcaggggcaccatcctgtcccctggcttcccagagccgtacctcaacagcctcaactgtgtgtggaagatcgtggtccccgaaggcgctggcatccagatccaagttgtcagttttgtgacagagcagaactgggactcgctggaagtatttgatggtgcagataacactgtaaccatgctggggagtttctcaggaacaaccgtgcctgcccttctgaacagcacctccaaccagctctaccttcatttctactcagatatcagcgtatctgcagctggcttccacttggagtacaaaacggtgggcctgagcagttgtccggaacctgctgtgcccagtaacggggtgaagactggcgagcgctacttggtgaatgatgtggtgtctttccagtgtgagccgggatatgccctccagggccacgcccacatctcctgcatgcccggaacagtgcggcgatggaactaccctcctccactctgtattgcacagtgtgggggaacagtggaggagatggagggggtgatcctgagccccggcttcccaggcaactaccccagtaacatggactgctcctggaaaatagcactgcccgtgggctttggagctcacatccagttcctgaacttctccaccgagcccaaccacgactacatagaaatccggaatggcccctatgagaccagccgcatgatgggaagattcagtggaagcgagcttccaagctccctcctctccacgtcccacgagaccaccgtgtatttccacagcgaccactcccagaatcggccaggattcaagctggagtatcaggcctatgaacttcaagagtgcccagacccagagccctttgccaatggcattgtgaggggagctggctacaacgtgggacaatcagtgaccttcgagtgcctcccggggtatcaattgactggccaccctgtcctcacgtgtcaacatggcaccaaccggaactgggaccaccccctgcccaagtgtgaagtcccttgtggcgggaacatcacttcttccaacggcactgtgtactccccggggttccctagcccgtactccagctcccaggactgtgtctggctgatcaccgtgcccattggccatggcgtccgcctcaacctcagcctgctgcagacagagccctctggagatttcatcaccatctgggatgggccacagcaaacagcaccacggctcggcgtcttcacccggagcatggccaagaaaacagtgcagagttcatccaaccaggtcctgctcaagttccaccgtgatgcagccacaggggggatcttcgccatagctttctccgggcacttggcagctgtttgtacattgtgacacccctccacgcacacatctgccccccagccacagaagcttggaccagaggtggacacctgagctgactgcagcaggggcaatcagatgttctctcttgggaagttgaaataggacccaagagattctacttttgcctggacccatctcctgaaaagataaaaatccaagtgcaatggattgctgctcttctactttccatgtggaccaaaaagtagaacaatcctatgtgcagaaagagaatgattgagaagtggaaaaatttccttggtttctgatggcccttcagttcctcgtcctctacctttgtgaagtctggctgcaaacccacccttgggttctctcttctctgagaggcttttttgcttattctagcctgaattgatttatttacatccaaaggttcccaaggaatacaacaacctaggacccagcaatcctacttctgggaattatgcaaagatatgtgcatgaagatattgcttgatatgttataacagggaaattagaaataatctaaatgtaaaaatagtaagagattaggtattataaatttaaagtgtatactcagagagagagagatagggaaagatacagtcattacaaatcattcatgtatgaacctgggcaacatagtgagactctgcctctacc

SEQ ID NO: 7067 - DNA, 13684 bp, Homo sapiens
  source 1..13684: mol_type = unassigned DNA
gagagcgcagcgcgcctctccccggccgggcggacacttggttcattccagccgcagaagctcagggctcccgcgtaccgggattttttccgagcagaaaaaagctccagagctctcctgacctcctttctcctcggcggcgagcggagcctctccctcggcgctgccggccgcgccatgccgcgctcgcggggacgggagctggggcgctgcggctgccccgcggggagggctcgcggcgaaaccgggatttcggcgcttgtgccgggcgccgggagccgctggggccgcccgccgccgccaacgccgccgcctctgctgctgttgctgggctgtgggttgctcagcgtctcggccgccgcgggccagaactgcacgttccaactgcacggtcccaatgggacagttgagagcccagggttcccatatggctaccccaattacgccaactgcacgtggaccatcaccgcggaagagcagcacagaatccagcttgtgttccagtcctttgccctggaagaggactttgatgtcctgtcggtgtttgatggtccaccccagccagagaatctgcgtacgaggctcacaggctttcagctgccagccaccattgttagtgcagccaccaccctctctctgcgcctcatcagcgactatgcagtcagtgcccaaggcttccacgccacctatgaagttctccccagccacacatgtgggaacccagggaggctgcccaatggcatccagcagggttcaaccttcaacctcggtgacaaggtccgctacagctgcaaccttggcttcttcctggagggccacgccgtgctcacctgccacgctggctctgagaacagcgccacgtgggacttccccctgccttcctgcagagctgatgatgcctgtggtgggaccctgcggggccagagtggcatcatctccagcccccacttcccctcggagtaccataacaatgccgactgcacatggaccatcctggctgagctgggggacaccatcgccctggtgtttattgacttccagctggaggatggttacgactttctggaagtcactgggacagaaggctcctccctctggttcaccggagccagcctcccagcccccgttatcagcagcaagaactggctgcgactgcacttcacatcggatggcaaccaccggcagcgcggattcagtgcccaataccaagtcaagaagcaaattgagttgaagtctcgaggtgtgaagctgatgcccagcaaagacaacagccagaagacgtctgtgttaactcaggttggtgtgtcccaaggacataatatgtgtccagaccctggcatacccgaaaggggcaaaagactaggctcggatttcaggttaggatccagcgtccagttcacctgcaacgagggctatgacctgcaagggtccaagcggatcacctgtatgaaagtgagcgacatgtttgcggcctggagcgaccacaggccagtctgccgagcccgcatgtgtgatgcccaccttcgaggcccctcgggcatcatcacctcccccaatttccccattcagtatgacaacaatgcacactgtgtgtggatcatcacagcactcaacccctccaaggtgatcaagctcgcctttgaggagtttgatttggagaggggctatgacaccctgacggtcggtgatggtggtcaggatggggaccagaagacagttctctacatcctgacaggtacatcggtcccggatctcattgtcagcaccaatcatcaaatgtggctcctcttccagactgatggcagtggcagttccctgggattcaaggcttcttatgaagagatcgagcagggcagttgcggtgaccctggcatacctgcatatggccggagggaaggctcccggtttcaccacggtgacacactcaagtttgagtgccagcccgcctttgagctggtgggacagaaggcaatcacatgccaaaagaataaccaatggtcggctaagaagccaggctgcgtgttctcctgcttcttcaacttcaccagcccgtctggggttgtcctgtctcccaactacccagaggactatggcaaccacctccactgtgtctggctcatcctggccaggcctgagagccgcatccacctggccttcaacgacattgacgtggagcctcagtttgatttcctggtcatcaaggatggggccaccgccgaggcgcccgtcctgggcaccttctcaggaaaccagcttccctcctccatcacaagcagtggccacgtggcccgtctcgagttccagactgaccactccacagggaagaggggcttcaacatcacttttaccaccttccgacacaacgagtgcccggatcctggcgttccagtaaatggcaaacggtttggggacagcctccagctgggcagctccatctccttcctctgtgatgaaggcttccttgggactcagggctcagagaccatcacctgcgtcctgaaggagggcagcgtggtctggaacagcgctgtgctgcggtgtgaagctccctgtggtggtcacctgacttcgcccagcggcaccatcctctctccgggctggcctggcttctacaaggatgccttgagctgtgcctgggtgattgaggcccagccaggctaccccatcaaaatcaccttcgacagattcaaaaccgaggtcaactatgacaccctggaagtacgcgatgggcggacttactcagcgcccttgatcggggtttaccacgggacccaggttccccagttcctcatcagcaccagcaactacctctacctcctcttctctaccgacaagagtcactcggacatcggcttccagctccgctatgagactataacactgcagtcagaccactgtctggatccaggaatcccagtaaatggacagcgtcatgggaatgacttctacgtgggcgcgctggtgaccttcagctgtgactcgggctacacattaagtgacggggagcctctggagtgtgagcccaacttccagtggagccgggccctgcccagttgtgaagctctctgtggtggcttcattcaaggctccagtgggaccatcttgtcgccagggttccctgacttctaccccaacaacttgaactgcacctggattatcgaaacatctcatggcaagggtgtgttcttcactttccacaccttccacctggaaagtggccatgactacctcctcatcactgagaacggcagcttcacccagcccctgaggcagctaactggatctcggctgccagctcccatcagcgctgggctctatggcaacttcactgcccaggtccgcttcatctctgatttctccatgtcatatgaaggattcaacatcaccttctcagagtacgacttggagccctgtgaggagcccgaggtcccagcctacagcatccggaagggcttgcagtttggcgtgggcgacaccttgaccttctcctgcttccccgggtaccgtctggagggcaccgcccgcatcacgtgcctggggggcagacggcgcctgtggagctcgcctctgccaaggtgtgttgctgagtgtgggaattcagtcacaggcactcagggtactttgctgtcccccaactttcctgtgaactacaataacaatcatgaatgcatctactccatccagacccagccagggaagggaattcagctgaaagccagggcattcgaactctccgaaggagatgtcctcaaggtttatgatggcaacaacaactccgcccgtttgctgggagtttttagccattctgagatgatgggggtgactttgaacagcacatccagcagtctgtggcttgatttcatcactgatgctgaaaacaccagcaagggctttgaactgcacttttccagctttgaactcatcaaatgtgaggacccaggaacccccaagtttggctacaaggttcatgatgaaggtcattttgcagggagctccgtgtccttcagctgtgaccctggatacagcctgcggggtagtgaggagctgctgtgtctgagtggagagcgccggacctgggaccggcctctgcccacctgtgtcgccgagtgtggagggacagtgagaggagaggtgtcggggcaggtgctgtcacccgggtatccagctccctatgaacacaatctcaactgcatctggaccatcgaagcagaggccggctgcaccattgggctacacttcctggtgtttgacacagaggaggttcacgacgtgctgcgcatctgggatgggcctgtggagagcggggttctgctgaaggagctgagtggcccggccctgcccaaggacctgcatagcaccttcaactcggtcgtcctgcagttcagcactgacttcttcaccagcaagcagggctttgccattcaattttcagtgtccacagcaacgtcctgcaatgaccctgggatcccgcagaatgggagtcggagtggtgacagttgggaagccggcgactccacagtgttccagtgtgaccctggctacgcgctgcagggaagtgcagagatcagctgtgtgaagatcgagaacaggttcttctggcagcccagcccgccaacatgcatcgctccctgcgggggagacctgacaggaccatctggagtcatcctctcaccaaattacccagaaccctacccgccaggcaaggagtgtgactggaaagtgaccgtctcaccagactacgtcatcgccctggtatttaacatctttaacctggagcctggctatgacttcctccatatctacgacggacgggactctctcagccctctcataggaagcttctatggctcccagctcccaggccgcattgaaagcagcagcaacagcctcttcctcgccttccgcagcgatgcatctgtgagcaatgctggcttcgtcattgactatacagaaaacccgcgggagtcatgttttgatcctggttccatcaagaacggcacacgggtggggtccgacctgaagctgggctcctccgtcacctactactgccacgggggctacgaagttgagggcacctcgaccctgagctgcatcctggggcctgatgggaagcccgtgtggaacaatccccggccagtctgcacagccccctgtgggggacagtatgtgggttcggacggagtggtcttgtcccccaactacccccagaactacaccagtggacagatctgcttgtattttgttactgtgcccaaggactatgtggtgtttggccagttcgccttctttcacacggccctcaacgacgtggtggaggttcacgacggccacagccagcactcgcggctcctcagctccctctcgggctcccatacaggagaatcactgcccttggccacctccaatcaagttctcattaagttcagcgccaaaggcctcgcaccagccagaggcttccactttgtctaccaagcggttcctcgaaccagcgccacgcagtgcagctctgtgccggaaccccgctatggcaagaggctgggcagtgacttctcggtgggggccatcgtccgcttcgaatgcaactccggctatgccctgcaggggtcgccagagatcgagtgcctccctgtgcctggggccttggcccaatggaatgtctcagcgcccacgtgtgtggtgccgtgtggaggcaacctcacagagcgcaggggcaccatcctgtcccctggcttcccagagccgtacctcaacagcctcaactgtgtgtggaagatcgtggtccccgaaggcgctggcatccagatccaagttgtcagttttgtgacagagcagaactgggactcgctggaagtatttgatggtgcagataacactgtaaccatgctggggagtttctcaggaacaaccgtgcctgcccttctgaacagcacctccaaccagctctaccttcatttctactcagatatcagcgtatctgcagctggcttccacttggagtacaaaacggtgggcctgagcagttgtccggaacctgctgtgcccagtaacggggtgaagactggcgagcgctacttggtgaatgatgtggtgtctttccagtgtgagccgggatatgccctccagggccacgcccacatctcctgcatgcccggaacagtgcggcgatggaactaccctcctccactctgtattgcacagtgtgggggaacagtggaggagatggagggggtgatcctgagccccggcttcccaggcaactaccccagtaacatggactgctcctggaaaatagcactgcccgtgggctttggagctcacatccagttcctgaacttctccaccgagcccaaccacgactacatagaaatccggaatggcccctatgagaccagccgcatgatgggaagattcagtggaagcgagcttccaagctccctcctctccacgtcccacgagaccaccgtgtatttccacagcgaccactcccagaatcggccaggattcaagctggagtatcaggcctatgaacttcaagagtgcccagacccagagccctttgccaatggcattgtgaggggagctggctacaacgtgggacaatcagtgaccttcgagtgcctcccggggtatcaattgactggccaccctgtcctcacgtgtcaacatggcaccaaccggaactgggaccaccccctgcccaagtgtgaagtcccttgtggcgggaacatcacttcttccaacggcactgtgtactccccggggttccctagcccgtactccagctcccaggactgtgtctggctgatcaccgtgcccattggccatggcgtccgcctcaacctcagcctgctgcagacagagccctctggagatttcatcaccatctgggatgggccacagcaaacagcaccacggctcggcgtcttcacccggagcatggccaagaaaacagtgcagagttcatccaaccaggtcctgctcaagttccaccgtgatgcagccacaggggggatcttcgccatagctttctccgcttatccactcaccaaatgccctcctcccaccatcctccccaacgccgaagtcgtcacagagaatgaagaattcaatataggtgacatcgtacgctacagatgcctccctggctttaccttagtggggaatgaaattctgacctgcaaacttggaacctacctgcagtttgaaggaccacccccgatatgtgaagtgcactgtccaacaaatgagcttctgacagactccacaggcgtgatcctgagccagagctaccctggaagctatccccagttccagacctgctcttggctggtgagagtggagcccgactataacatctccctcacagtggagtacttcctcagcgagaagcaatatgatgagtttgagatttttgatggtccatcaggacagagtcctctgctgaaagccctcagtgggaattactcagctcccctgattgtcaccagctcaagcaactctgtgtacctgcgttggtcatctgatcacgcctacaatcggaagggcttcaagatccgctattcagccccttactgcagcctgcccagggctccactccatggcttcatcctaggccagaccagcacccagcccgggggctccatccactttggctgcaacgccggctaccgcctggtgggacacagcatggccatctgtacccggcacccccagggctaccacctgtggagcgaagccatccctctctgtcaagctctttcctgtgggcttcctgaggcccccaagaatggaatggtgtttggcaaggagtacacagtgggaaccaaggccatgtacagctgcagtgaaggctaccacctccaggcaggcgctgaggccactgcagagtgtctggacacaggcctatggagcaaccgcaatgtcccaccacagtgtgtccctgtgacttgtcctgatgtcagtagcatcagcgtggagcatggccgatggaggcttatctttgagacacagtatcagttccaggcccagctgatgctcatctgtgaccctggctactactatactggccaaagggtcatccgctgtcaggccaatggcaaatggagcctcggggactctacgcccacctgccgaatcatctcctgtggagagctcccgattccccccaatggccaccgcatcggaacactgtctgtctacggggcaacagccatcttctcctgcaattccggatacacactggtgggctccagggtgcgtgagtgcatggccaatgggctctggagtggctctgaagtccgctgccttgccactcagaccaagctccactccattttctataagctcctcttcgatgtactctcttccccatccctcaccaaagctggacactgtgggactcctgagcccattgtcaacggacacatcaatggggagaactacagctaccggggcagtgtggtgtaccaatgcaatgctggcttccgcctgatcggcatgtctgtgcgcatctgccagcaggatcatcactggtcgggcaagacccctttctgtgtgccaattacctgtggacacccaggcaaccctgtcaacggcctcactcagggtaaccagtttaacctcaacgatgtggtcaagtttgtttgcaaccctgggtatatggctgagggggctgctaggtcccaatgcctggccagcgggcaatggagtgacatgctgcccacctgcagaatcatcaactgtacagatcctggacaccaagaaaatagtgttcgtcaggtccacgccagcggcccgcacaggttcagcttcggcaccactgtgtcttaccggtgcaaccacggcttctacctcctgggcaccccagtgctcagctgccagggagatggcacatgggaccgtccccgcccccagtgtctcttggtgtcctgtggccatccgggctccccgcctcactcccagatgtctggagacagttatactgtgggagcagtggtgcggtacagctgcatcggcaagcgtactctggtgggaaacagcacccgcatgtgtgggctggatggacactggactggctccctccctcactgctcaggaaccagcgtgggagtttgcggtgaccctgggatcccggctcatggcatccgtttgggggacagctttgatccaggcactgtgatgcgcttcagctgtgaagctggccacgtgctccggggatcgtcagagcgcacctgtcaagccaatggctcgtggagcggctcgcagcctgagtgtggagtgatctcttgtgggaaccctgggactccaagtaatgcccgagttgtgttcagtgatggcctggttttctccagctctatcgtctatgagtgccgggaaggatactacgccacaggcctgctcagccgtcactgctcggtcaatggtacctggacaggcagtgaccctgagtgcctcgtcataaactgtggtgaccctgggattccagccaatggccttcggctgggcaatgacttcaggtacaacaaaactgtgacatatcagtgtgtccctggctatatgatggagtcacatagagtatctgtgctgagctgcaccaaggaccggacatggaatggaaccaagcccgtctgcaaagctctcatgtgcaagccacctccgctcatccccaatgggaaggtggtggggtctgacttcatgtggggctcaagtgtgacttatgcctgcctggaggggtaccagctctccctgcccgcggtgttcacctgtgagggaaatgggtcctggaccggagagctgcctcagtgtttccctgtgttctgcggggatcctggtgtcccgtcccgtgggaggagagaggaccgaggcttctcctacaggtcatctgtctccttctcctgccatccccctctggtgctggtgggctctccacgcaggttttgccagtcagatgggacatggagtggcacccagcccagctgcatagatccgaccctgaccacgtgtgcggaccctggtgtgccacagtttgggatacagaacaattctcagggctaccaggttggaagcacagtcctcttccgttgtcaaaaaggctacctgcttcagggctccaccaccaggacctgcctcccaaacctgacctggagtggaaccccacctgactgtgtcccccaccactgcaggcagccagagacgccaacgcatgccaacgtcggggccctggatttgccctccatgggctacacgctcatctactcctgccaggagggcttctccctcaagggtggctccgagcaccgcacctgcaaggcggatggcagctggacaggcaagccgcccatctgcctggaggtccggcccagtgggagacccatcaacactgcccgggagccaccgctcacccaagccttgattcctggggatgtttttgccaagaattccctgtggaaaggggcctatgaataccaggggaagaagcagccagccatgctcagagtgactggcttccaagttgccaacagcaaggtcaatgccaccatgatcgaccacagtggcgtggagctgcacttggctggaacttacaagaaagaagattttcatctcctactccaggtgtaccagattacagggcctgtggagatctttatgaataagttcaaagatgatcactgggctttagatggccatgtctcgtcagagtcctccggagccaccttcatctaccaaggctctgtcaagggccaaggctttgggcagttcggctttcaaagactggacctcaggctgctggagtcagaccccgagtccattggccgccactttgcttccaacagcagctcagtggcagccgcgatcctggtgcctttcatcgccctcattattgcgggcttcgtgctctatctctacaagcacaggagaagacccaaagttcctttcaatggctatgctggccacgagaacaccaatgttcgggccacatttgagaacccaatgtacgaccgcaacatccagcccacagacatcatggccagcgaggcggagttcacagtcagcacagtgtgcacagcagtatagccacccggcctggccgccaccaccgccaccgagagccccgcctccagcagccgttccccagggggcaggaagtaggctcccctgagcacagtgcccagtgcccatcttcgttcgtctccttgcctgtgtctgctactgctgggactcaggccctcgccctgccgccatctatgccagttaccctggagaggactcctgccgtgtcctgaaaaggcagaaaaggaagaggggctgcagacagaggaagaaagtttatggatttaaaatagcaaagcaacttgtggatctgtgtgtgtgtgtgtgtgtatgggcctgatcacacacaaacacacacacctctccttcattcacgtcctatggaagagaccataaaggcttcaaaactagaagtgcgcatgaaggatgcttcatgccctgttccccacacagagaagagatgaagagggggaggtacggtcagctttcaaaacaatatgccccccgcccatcccatgtgtgaggacatggtgactcggtgactgtaacagtaggacacatcccatcatgcggtcagagtgcagaaacccggtcagcgtgcagaaaccagctgtctgctgatgaacggcccatctgcacagcggcagcaaggattaccccaagggcaggaaaaaagtctttggaaatagattgaaaatcagtttctttatttttttcaaacactgttttattgagttctaaacccagtggattaaaaagtcatttgggtcctgggaagcactgggaaagaagggagagccggggaggatagggcaggagtctggccaggagcccaaggtcaagtctggctgtcaactgacaaagagaagagaagacaagtctgtggcccagacaggatgccaagtctgggggcagcagcagggtccttgagagaacaggggagcaagcctgccccagtacccaaaaaacaatggctatcatgtactggggttattctctgtgcctgacactttacctgtagtatttctagtctgcacaataacaccaaaatgtaggatttgttattcccctttgacagatgagaaaacagaagcctgcaaaggtaaagacagagttaggaagtgtggagtcagaatgcaaacccagatcagtctgccccaaagtccactacaccagctgccagaaaccctgttctagaaggggcagctaagaagggaggagccgatgaatctctacagtagcactgtggccaggtctggaaagccaggcaagacacctgtgtgtcctatctgggttctgctgtctccgcgtaggcagcttcggggcaaggattcaactccccaggcctcccacggttggtgctggctccttggctcccagcagccgctgaccatagccagcaaaagacctggcaggtcctgaatcaaaacaacagagtggctgaaagtcacacctctccagctccttgcgagtgggtttgattgattttgacagctatatcatgcttgggtcgttcatgaattccatgagaattgttgggaagttcatgagtttaggaatcaaagtatagcatttagggccactttctctgtcctcgggaaggcccccacaagcttaagcccctgtatacgtgtgacatgctggcctcagagattcatgtcacatattgaaatagcaaatagaaatgtgcaggagcggagggacagcgacacctggttcttaagcaaattctagattggaacaattagaagatctgactgatgttaagagtggccagaggaaagtgagaggcgtccatttccagcagacacaatggaggctgacagaggcaggagcctacccctggccacaccacctctgggacacggcacccccctgggcctggagggagagggccaatccagacacactcacactctcatctctttccttggctggaaacaagtgcaggaagctcccctcccaatttcttatgctcccttcccccttacactcctctccttcgactgctcccttcccccttcttatgcccctctcagaccacccagcggatgcctattcccgccccccacccctcccctgcgtctccttgtaaagttccatgagatgctcgaggagcacctgctggtggggcacccagcactctgctgggcatcaccctccgcacccctgacatttctctccacctccagaggcttggaagggaacagggcagatgaggcccttcacccaccatctacgccatatacccatcaccatcccatgaggaaaaaaaaaaaagtaaaacaaagacaaaaaaaatcttttgtacagagatatatttttattatacaaagtttgtacagtaccaaaaaagaaaaaaaaaaaggtgtaaatttttttttcattattgtaggtaaacggtagtggaagccttttttgtaaatgtaataaaatgtataaatatggttttcagaaaacatcaagtgctgtaaatatgtaatctacacaccttcttggcttgtctgcagtatatacatttaatttatctgtctctgtatatgaggcttccccctggggtcctgcattatggtactttcctgaatttgaaagcaattttaaattttttgaattcaaataaaatataaatttttgc

SEQ ID NO: 7068 - DNA, 3824 bp, Homo sapiens
  source 1..3824: mol_type = unassigned DNA
gagagacagacaaacagcacaagagacagaaacaaagcaggcagcaccataggtagggaagtattttttttttaagtttgagaggcatttctgtagacagtccaacaactggacagacacgcaggcaccttggcaggtagacaggcaaacgacttgtcatctttgtcaggttcttcagagctgtgagttgctttctggatgcagctgatgggggttaatctatggttattgtgattctctttccagctgagtgtgggaattcagtcacaggcactcagggtactttgctgtcccccaactttcctgtgaactacaataacaatcatgaatgcatctactccatccagacccagccagggaagggaattcagctgaaagccagggcattcgaactctccgaaggagatgtcctcaaggtttatgatggcaacaacaactccgcccgtttgctgggagtttttagccattctgagatgatgggggtgactttgaacagcacatccagcagtctgtggcttgatttcatcactgatgctgaaaacaccagcaagggctttgaactgcacttttccagctttgaactcatcaaatgtgaggacccaggaacccccaagtttggctacaaggttcatgatgaaggtcattttgcagggagctccgtgtccttcagctgtgaccctggatacagcctgcggggtagtgaggagctgctgtgtctgagtggagagcgccggacctgggaccggcctctgcccacctgtgtcgccgagtgtggagggacagtgagaggagaggtgtcggggcaggtgctgtcacccgggtatccagctccctatgaacacaatctcaactgcatctggaccatcgaagcagaggccggctgcaccattgggctacacttcctggtgtttgacacagaggaggttcacgacgtgctgcgcatctgggatgggcctgtggagagcggggttctgctgaaggagctgagtggcccggccctgcccaaggacctgcatagcaccttcaactcggtcgtcctgcagttcagcactgacttcttcaccagcaagcagggctttgccattcaattttcagtgtccacagcaacgtcctgcaatgaccctgggatcccgcagaatgggagtcggagtggtgacagttgggaagccggcgactccacagtgttccagtgtgaccctggctacgcgctgcagggaagtgcagagatcagctgtgtgaagatcgagaacaggttcttctggcagcccagcccgccaacatgcatcgctccctgcgggggagacctgacaggaccatctggagtcatcctctcaccaaattacccagaaccctacccgccaggcaaggagtgtgactggaaagtgaccgtctcaccagactacgtcatcgccctggtatttaacatctttaacctggagcctggctatgacttcctccatatctacgacggacgggactctctcagccctctcataggaagcttctatggctcccagctcccaggccgcattgaaagcagcagcaacagcctcttcctcgccttccgcagcgatgcatctgtgagcaatgctggcttcgtcattgactatacagaaaacccgcgggagtcatgttttgatcctggttccatcaagaacggcacacgggtggggtccgacctgaagctgggctcctccgtcacctactactgccacgggggctacgaagttgagggcacctcgaccctgagctgcatcctggggcctgatgggaagcccgtgtggaacaatccccggccagtctgcacagccccctgtgggggacagtatgtgggttcggacggagtggtcttgtcccccaactacccccagaactacaccagtggacagatctgcttgtattttgttactgtgcccaaggactatgtggtgtttggccagttcgccttctttcacacggccctcaacgacgtggtggaggttcacgacggccacagccagcactcgcggctcctcagctccctctcgggctcccatacaggagaatcactgcccttggccacctccaatcaagttctcattaagttcagcgccaaaggcctcgcaccagccagaggcttccactttgtctaccaagcggttcctcgaaccagcgccacgcagtgcagctctgtgccggaaccccgctatggcaagaggctgggcagtgacttctcggtgggggccatcgtccgcttcgaatgcaactccggctatgccctgcaggggtcgccagagatcgagtgcctccctgtgcctggggccttggcccaatggaatgtctcagcgcccacgtgtgtggtgccgtgtggaggcaacctcacagagcgcaggggcaccatcctgtcccctggcttcccagagccgtacctcaacagcctcaactgtgtgtggaagatcgtggtccccgaaggcgctggcatccagatccaagttgtcagttttgtgacagagcagaactgggactcgctggaagtatttgatggtgcagataacactgtaaccatgctggggagtttctcaggaacaaccgtgcctgcccttctgaacagcacctccaaccagctctaccttcatttctactcagatatcagcgtatctgcagctggcttccacttggagtacaaaacggtgggcctgagcagttgtccggaacctgctgtgcccagtaacggggtgaagactggcgagcgctacttggtgaatgatgtggtgtctttccagtgtgagccgggatatgccctccagggccacgcccacatctcctgcatgcccggaacagtgcggcgatggaactaccctcctccactctgtattgcacagtgtgggggaacagtggaggagatggagggggtgatcctgagccccggcttcccaggcaactaccccagtaacatggactgctcctggaaaatagcactgcccgtgggctttggagctcacatccagttcctgaacttctccaccgagcccaaccacgactacatagaaatccggaatggcccctatgagaccagccgcatgatgggaagattcagtggaagcgagcttccaagctccctcctctccacgtcccacgagaccaccgtgtatttccacagcgaccactcccagaatcggccaggattcaagctggagtatcaggcctatgaacttcaagagtgcccagacccagagccctttgccaatggcattgtgaggggagctggctacaacgtgggacaatcagtgaccttcgagtgcctcccggggtatcaattgactggccaccctgtcctcacgtgtcaacatggcaccaaccggaactgggaccaccccctgcccaagtgtgaagtcccttgtggcgggaacatcacttcttccaacggcactgtgtactccccggggttccctagcccgtactccagctcccaggactgtgtctggctgatcaccgtgcccattggccatggcgtccgcctcaacctcagcctgctgcagacagagccctctggagatttcatcaccatctgggatgggccacagcaaacagcaccacggctcggcgtcttcacccggagcatggccaagaaaacagtgcagagttcatccaaccaggtcctgctcaagttccaccgtgatgcagccacaggggggatcttcgccatagctttctccgatcactgcagatattttaaccagaaatcaggaaagctggattttactcccagctccaccttgggccagctgtgtaaaaccttgcacaggtcccttccccacttgagacttcagtttcttcacctgtag

SEQ ID NO: 7069 - DNA, 13212 bp, Homo sapiens
  source 1..13212: mol_type = unassigned DNA
tggtggttgctataacgagccagaattggggtagattttggtggaggggaaaaaacgcacaagaaaagacagaatccagagtagcggagactttgtgcccccgttggagagatggttgagtcctcgtcaaggttgctgtggtatcccagaaacaccattcactccgagctgtgaccgcgcaccaacaacagcaacaactccactgcgccgggctgaggagcaggaattaggagctcgcgaataatatgaaagggatccgcaaaggggaaagccgagcaaaggaatccaaaccctgggagcctggcaagcgaagatgcgctaaatgtggccgcctagacttcatcctgatgaagaaaatggggattaaaagtggatttacgttttggaacctcgtctttttattgacggtgtcttgtgtgaaaggatttatttatacatgtggtggaactttaaaaggacttaatggcactatagaaagccctggttttccatatggatatccaaatggtgcaaactgcacatgggtaataatagcagaagaacgaaatagaatacaaattgtttttcagtcatttgctctagaagaagaatacgactacttatcattatatgatggacatcctcatcctacaaactttaggacaaggttaacaggattccatctgccacctccagtgacaagtaccaaatctgtgttctcactacgtttgaccagtgattttgcagttagtgctcatggatttaaggtatattacgaagaattgcagagtagctcttgtggaaatcctggtgttccacccaaaggtgtattatatggcacaagattcgacgtcggggacaagatccgctacagctgtgtaactggatacatccttgatggccaccctcagctcacctgcatagccaattcagttaatacagcttcgtgggattttcctgttcctatctgtagagctgaagatgcttgtggaggaacaatgagaggatccagtggcatcatatccagccctagttttcctaatgagtaccataacaatgctgattgcacttggaccattgtagcagagcctggggacacaatttcactcatatttactgattttcaaatggaagagaaatatgattacttagaaatagaaggttctgagccacctaccatatggttatctggaatgaatataccaccaccaattatcagcaacaaaaactggctcagactgcattttgttacagacagcaatcatcgataccgtggatttagtgctccctatcaaggttcttctacattgacccacactacctccactggtgagttagaggagcataacaggactaccactggtgctattgctgttgctagcacacctgcagatgttactgtatccagtgttacagctgtcaccatccatagactttccgaggaacagcgagtgcaagttacgagtctcagaaattcaggtctggaccccaacacgtccaaggacgggctctctcctcatccagcagatacacaaagtaccaggagaagaccaagacatgctgaacagatagaaagaactaaagagcttgcagttgttactcatagagtgaaaaaggccatagattttaaatctagaggatttaaattgtttccagggaaagacaacagcaacaagttttctatcttaaatgagggaggtattaaaacagcttccaatttatgcccagatccaggagaaccagaaaatgggaagagaatcggatcagattttagccttggatcaactgtgcagttctcttgtgatgaagattatgtcctacagggcgcaaagagcatcacctgtcaacggatagctgaagtttttgctgcttggagtgatcacaggcctgtgtgtaaagtgaaaacgtgtggctctaatcttcaaggaccaagtggtacctttacatctcccaactttccgttccagtatgacagcaatgcacaatgtgtctgggtcatcacagcagtgaatacaaataaggttatccagataaattttgaagaatttgatctggagattggctatgataccttgacaattggcgatgggggcgaagttggagatcctaggacagtgctccaagtgctgactggaagctttgtaccagacttgatagtgagcatgagtagccaaatgtggctgcaccttcaaacggacgaaagtgttggatctgttggtttcaaggttaactacaaagaaattgagaaagaaagttgtggtgatcctggtacacccttatatggaattagagaaggcgatggattttctaatcgtgatgttttaaggtttgaatgccagtttgggtttgaattaattggagagaaatccattgtttgtcaagagaataaccaatggtctgcaaacatacccatctgtatctttccctgcctgtctaactttactgcaccaatgggaacagttctttctcctgattacccagaagggtatggaaataatttaaattgcatctggacgataatctctgatccagggagccggatacatctttctttcaatgactttgacctggaatcccagtttgatttccttgctgttaaagatggtgactctccagaatccccaattcttggaacctttactggggctgaggtgccttcccatcttactagtaatagtcacatactgcgattggaatttcaggctgaccactcaatgtcaggacgtggctttaacatcacttacaacacatttggacataatgaatgccctgatcctggaataccaatcaatgcacggcggtttggggacaactttcaattaggaagttcaatttcagttatttgtgaagaaggatttattaaaacccagggaacagaaacaattacatgtattcttatggatggaaaagtaatgtggagtggactgattccaaaatgtggagccccatgtggtggccatttttcagctcccagtggagtgattctctcaccaggatggccaggatactacaaagactctttgaattgtgagtgggtgattgaagctgaacctggacactctatcaaaattacatttgaaagatttcagactgaactgaattatgatgttctggaagttcatgatgggccaaatcttctgtcacccttgcttggatcttacaatggcacccaagtgccccagtttctatttagtagcagtaattttatataccttctatttacaacagacaacagtcgttccaataatggtttcaagattcattatgaaagtgttacagtgaacacgtattcttgtttggaccctggcatacctgtacatggccgtcgctatggtcatgatttctccattggctctactgtttcatttagttgtgattcaggatacaggttgagtcatgaagagccccttctatgcgaaaaaaaccactggtggagtcatccacttccaacctgtgatgcattatgtggaggagatgttagagggcctagtggaacaatcttatcacctggttacccggaattttatccaaattctctgaattgtacatggactgttgatgtaacccatggaaaaggtgtgcagttcaacttccacacttttcatttggaagaccatcatgactacttactgatcacagagaatggcagttttacccaaccactggcacgcctgactggttcagatcttcctccaacaatcaatgctggtctctatggaaatttcagggctcaattgcgtttcatttcagatttttcaatatcatatgaaggatttaacataacattctctgaatataaccttgaaccttgtgaagatcctggcattcctcaatatggtagtcgaatcgggttcaactttgggattggtgacactctgaccttctcatgctcttcgggttatcgactggaaggaacatcagagatcatctgtcttggtggtggccgacgagtgtggagtgcacctctgccaaggtgtgtggctgaatgtggtgcatctgcaacgaataatgaaggaattttgctgtctccaaattatccactcaactatgaaaacaaccatgaatgcatttatagtattcaggttcaagcaggaaagggaatcaatatttcagccagaacatttcatttagcacaaggagatgttcttaagatttatgatggaaaagataaaacgactcatctactaggtgcttttactggtgcatctatgcgcggactgacacttagtagtacttcaaatcaactctggctagaatttaattccgatactgaagggacagatgaaggctttcaacttgtgtataccagttttgaactctcacactgtgaagatcctggcattccacaatttggatacaagatcagtgaccaaggccactttgctggtagcaccatcatttatggatgcaatccaggctacactctccacggaagtagccttctcaagtgcatgacaggggagagaagggcatgggactatcctctgccttcctgtattgctgaatgtggaggtcgttttaaaggagaatcatcaggaagaatcttatctcctggctatccttttccatatgacaataacctgcgttgcatgtggatgattgaggtagatcctggaaatattgtcagcttgcagtttcttgcttttgatacggaagcatcacatgatatactccgagtctgggacggtccaccagaaaatgatatgcttttaaaggaaattagtggatctcttattcctgaaggaattcatagcaccctcaatatagtaaccatccagtttgacacggatttttatattagcaaatctggatttgcaattcagttttcaagttctgttgccactgcgtgtcgtgacccaggggtccccatgaatgggactcgaaatggggatggaagagaacctggggacactgttgtttttcaatgtgacccaggatatgaacttcaaggagaggaaagaataacctgcattcaggtagaaaatcggtacttctggcagcccagcccaccagtctgtatagcaccctgtggaggcaatttaacaggatcttcaggctttattctttcaccaaacttccctcatccatatccgcatagcagagactgtgactggactatcaccgtcaatgcagactatgttatctccttggcgttcatcagttttagcatagaaccaaactatgacttcctctatatctatgatggaccagacagtaatagcccactgattggaagttttcaagacagcaagttaccagagagaatagaaagcagctcaaatacaatgcatttggcttttcggagtgatggatctgttagttacactggatttcatctagaatacaaagcaaaactgcgagagtcctgctttgatccaggcaatataatgaatggcaccagacttggaatggattataaattagggtcaacagtcacctattactgtgatgctggttatgttcttcaaggttattcaacactcacctgtatcatgggagatgatggaagacctggatggaatagagccttgccaagttgtcatgcgccctgtggaagtcgttcaacaggttcagaaggcactgttctatcaccaaactatccaaaaaattacagtgtgggacataattgtgtttattctatagcagttccaaaggagtttgtggtgtttggccagtttgtatttttccagacatcactccacgatgttgttgaggtgtatgatgggccaactcagcaatcttctctgttatcttccctctcaggatcccattcaggagaatcacttccactgagttcaggtaatcagatcacaattcgatttacttcagttggaccaataacagctaagggatttcactttgtttaccaagctgttcctagaacaagttctacacaatgcagttctgtgcctgaaccaagattcggaagaagaattggcaatgaatttgcagtcggttcatcggttctttttgattgtaatccaggatatattctccatggatccatagcaattaggtgtgaaacagtgcccaattctttggcccagtggaatgattccttacctacttgtattgtgccctgtggtggaattttaactaagcgcaaagggactattttgtcacctggataccctgagccttatgacaacaatctgaattgtgtgtggaagatcacagtgccagagggagctggcattcaagtgcaagttgttagctttgctacagaacataattgggattctctggacttttatgatgggggagacaacaatgctccaagacttggaagctattcaggaacaacaataccccatcttttgaatagtacgtctaataatctgtatctaaattttcaatcagacatcagtgtttctgctgcaggatttcatcttgaatacacagcaattggtttggattcctgtcctgaaccacaaactcctagcagtggaattaaaattggagacagatatatggttggagatgtagtatcctttcagtgtgatcaaggatattctcttcagggtcactctcacattacatgtatgccaggacctgtaagaagatggaattatccaatcccaatttgtttagctcagtgtggtggtgctatgtcagacttcagtggtgtgatcctcagtcctgggtttcctggaaactatcccagcagtttagattgcacatggacaataaatctacccataggttttggtgtacatctccagtttgtaaatttttctacagaaaccatacatgattatttggaagtacgaagtggatcctcagaaactagtactgttattggccggcttagtggtcctcaaataccatcttccttattcagcaccacccatgaaaccagcttatattttcacagtgactattcacaaaacaaacaagggtttcatattgtataccaagcctatcagttgcaaagctgtcctgatccacgcccgtttcgaaatggttttgtaattggtaatgattttactgtgggtcaaaccatttcatttgaatgtttcccaggatacacattaattggaaattcagctctcacatgccttcacggagtcagtcgtaattggaatcatccacttccaaggtgtgaagctctttgtggtgggaatataactgcaatgaatggcaccatttattctcctgggtatcctgatgaatatccaaactttcaagattgtttttggcttgtaagagtaccccctgggaatggcatctacatcaattttactgtccttcaaacagaaccaatatatgatttcattactgtatgggatggaccagaccaaaattcacctcagatcggtcagttcagtggcaataccgctttggaatcagtctacagtacttcaaatcagattctaatcaaattccacagtgatttcacaacaagtggcttttttgtgctcagttatcacgcctatcaactaagggtgtgccaacctccaccacctgtgcccaatgctgaaattttgacggaagatgatgaatttgaaataggtgatattattaggtatcagtgtcttccaggatttactttagttggtaatgcaattctgacgtgcagattaggagaacgactgcagatggatggagcacctccagtttgtcaagtgctctgtcctgccaatgaattacggctagattctactggagtcatattgagccctggatatcctgacagttacccaaatcttcaaatgtgtgcatggagcatttcagtggaaaagggttataatatcaccatgtttgtagaattcttccagacagaaaaggaatttgatgttcttcaggtgtatgatggaccaaatattcaaagtccagtgcttatttccctcagtggggattattcatctgcttttaatataacaagcaatggtcatgaagtatttcttcagtggtcagcagatcatggcaataacaaaaaaggcttccggataagatatatagctttctactgtagtacaccagaatccccacctcatggatatattatcagtcagacaggtgggcagcttaacagtgtggtccgttgggcctgtgatcgaggattccgacttgttggaaaaagcagtgctgtgtgcagaaagtcttcctatgggtatcatgcatgggatgcgccagtccctgcctgtcaagcaatttcctgtgggattcctaaagctccaacaaatggaggaatactaacaacagactatttggtaggaacgcgagttacctatttttgtaatgatggatatcgattgtcatccaaagaactcactacagctgtatgccaatcagatggaacatggagcaatcataacaagacccctcgctgtgttgttgttacatgtccaagcatcaattcctttatcttggaacatggaagatggcgaattgtgaatggctcccattatgaatacaaaaccaaagtagttttcagctgtgaccctggttatcatggactaggtcctgcctccatcgaatgtcttcctaatggtacttggagttggagaaatgaaagaccatattgccaaattatttcctgtggagaactacctacacctccaaatggaaataagattggaactcaaacttcatatggctcaacagctatctttacctgcgacttgggattcatgcttgtgggctctgctgtaagggaatgcctttcctcaggtctttggagtgaatctgaaaccagatgcctagcgggtcattgtggaattccagaactgattgtgaatggtcaagtcattggagaaaattatggatatagagacacagttgtatatcaatgtaatcctggttttcgattgattggttcttcagtgaggatatgtcaacaggatcacaattggtctggtcagctcccatcctgtgtgcctgttagctgtggtcaccctggtagtccaatttatggaagaacaagtggaaatgggttcaactttaatgatgtggtaacattctcatgcaatattgggtatcttatgcaagggccaacaaaggcacagtgccaggccaacagacagtggagccatcctccacctatgtgcaaagtggtcaactgttctgatcctggaattccagccaattctaaaagagaaagtaaaatagaacatggaaattttacttacggcactgtggtattctatgactgcaatcctggatattttttatttggatcttcagttttgatatgtcaaccaaatggacaatgggacaaacctttaccagaatgtatcatgattgactgtggacaccctggcgttcctcctaatgcagtcctgtctggcgagaagtatacttttgggtctactgttcactattcctgcacaggaaagcgttcccttttaggccagtcatcaagaacctgccaattgaatggccattggagtggatcacaacctcattgttcaggtgatgctactgggacatgtggcgatccaggtactcccggccatggctctagacaggaaagcaatttcagaactaaaagtactgtacgttatgcttgtgatactggttacatccttcatggctcagaagaaagaacatgtttagctaatggcagttggaccggaaggcagccagagtgcaaagctgtgcagtgtggtaacccaggaaccacagccaatgggaaagtcttccgaattgatggcacaacattttctagttcagtcatttattcctgcatggagggatacatcctttctggaccttcagttagacagtgcacagccaatggaacatggtctggaactttacctaactgtacaataatcagttgtggagacccaggtataccagccaatggactgagatatggagatgattatgtggttggacaaaatgtttcttacatgtgccagccaggctacacgatggaattgaatggctccagaatcaggacttgtacaattaatggcacatggagtggagtaatgccaacttgtagagctgttacctgcccaactcctccccagatctctaatggaaggctggaaggaacaaatttcgactggggctttagtattagctacatctgttctccaggctatgagctatccttccctgctgttttgacctgtgtagggaatggtacctggagtggtgaagtaccgcagtgcttaccaaagttttgtggtgaccctggtatacctgcccaaggaaaaagagaaggcaaaagctttatataccagtcagaggtttcattcagctgcaattttcctttcatattagtgggatcaagcaccagaatatgtcaagcagatggcacttggagtggttcatcacctcactgcatagagcctacccaaacctcttgtgaaaacccaggtgtgcctcggcatggatctcagaacaatacattcggatttcaagtaggaagtgttgtacagttccattgcaaaaaaggacaccttctccaagggtctacaacacgcacctgcctccctgatcttacgtggagtgggattcagcctgaatgcataccccacagctgtaaacagccagaaactcctgctcatgcaaatgtcgtagggatggaccttccatctcatgggtatacactgatttatacctgtcagcctggcttcttcttagcaggtggaacagaacatagagtgtgtagatccgataacacctggactggaaaagttcccatttgtgaagctggttctaaaatattggtgaaagatcctagacctgcactgggaacacccagcccaaagctaagtgttcctgatgatgtatttgcccaaaattatatatggaaaggctcttacaatttcaaaggaaggaaacaacccatgaccttaacagttactagtttcaatgcttccactgggagagttaacgcaacactgagcaatagcaacatggagctgctactttcaggggtatataaaagccaggaagctcgcctaatgttacgcatatatcttattaaagtacctgctcatgcttctgtgaagaaaatgaaggaagaaaattgggcaatggatggctttgtttctgctgagcctgatggagctacttatgtatttcaaggatttattcaaggcaaagattatggacaatttggcctacaaagactgggactgaatatgtcagaaggttcaaattcttcaaatcaacctcatggtacaaatagtagttctgtagccattgctattcttgtgcctttttttgcacttatatttgcaggatttggattttatctttataaacaaaggactgcacctaaaacacagtatacaggatgttcagttcatgaaaataacaatggccaagcagcttttgaaaatcccatgtatgacaccaacgcaaagtcagtggaagggaaggcggtacgatttgatcccaacttgaacacggtttgcacaatggtataacgaggcaacctttgccttcttcagaagcttggaaatcgacacacaaaacagtgcacatttagttcactgctaaacaaattaaagcacacttttcaggacttgctgggtcaccttttcctgaggaatgatacagaagagtgttttttcataaactggaccataattcttcatgtttaccatggagagttttacagaaatttggctgcactctgagagtgcttactcacagtttatttgctttttttaaaaaggagattattctaaaatataaacttatttgcatatattggaggagcatccactatcagtatttctgtgctttataaactatattagagggactgggtttaaaaaaaaagatatagggtagaaataagagctatacttacaagagtcaatagatcactgacttctctttaactgtcctgagctacatcacgcccacaaatctgtctttcataccactctatctgccattcattcttgttaaatgaggcattgttttctttatttaagattgagttatgactttaaatgtttatgagctagtttatgcctcggaagacataaggtttcccattccaatttgaatctttctatttctttagcatcatattgctcttcttcttttagactggttgtcatagtttctgcaaagggcaagttcattgtgctaccctcccaattcccccattatggagtaaccagtattattcagtgagctatggggtagtgtttcactccttgcttcaatatggttttttcctatttatttttattattttttaatcccaaatgtgatagtagcttcagtatgtttcctcacccaaaaaccatttggctggcagaaattatctagaaaaattattattttgcagttatctgagacaccaaacttaccatcctttattttacaatatttttgatcgaccaaataaaatgtcctaataatctactctatttatatctacatttccttccagctgagtcttcaaatttagcattattttgacacttttaattttcatttaacaatggattagaaaaatattttggtctagccactaaacataatgactgaaaaaaattattattataaatcaccaatataaatttattgcctacaattgtggacttatcatatttttatatatttttaaatttctgtacctttattgttaaacaccaagtttcacatacaagaggtttctttcattgtcaaattaagatatgtatttgtaagttattggtggctcatttaaactgtatcatacagtaatgccagcatttttatttaataggtcatcgtcttccttttatagctgttttacttcattgaatacgatcatgtacccagtgttaactctttgttgttgtccctttcaaatatggataactctgtgaacagtcttgactttttgtatcatgagacagagtgcctaagagaaacccttgcacctgggagcgctgcttggctctatctctacaacatttaatgaatttcttgtaaaccactttgagatacattgttttggaaattcatacaattttctcaacatggtactctactggcaggatgcagttttaaattttatgccatcagttatttattcttgtttattcaaatgactgcaataacaatgattcattcattaatgttaaggctaatacatttaagatcttgtttaaacaatgtttcttctgcaactggctactcctcttatattaatgcatacacttttgtaaagaagtatatttttatgaaaagaaactttgtaaaagtatgatgtaaattttcagtgcaatgtaaacaaaataaaaatggataattgcttttgtaaaa

SEQ ID NO: 7070 - DNA, 13018 bp, Homo sapiens
  source 1..13018: mol_type = unassigned DNA
tacacccctcggccctttggaggaccggagagccggacgacgccgcagcccttgggggagtccagcgccagctggcgaaaagaagcttcatcttccagatcatccgggaaaggggcagaggtggccggttgttgcgactcataaacaacctcttcagcacaacccggttgaatgtggagttggttcctttgctggaaacctgtacagcttgaccgacagacagcctcaggatttatttatacatgtggtggaactttaaaaggacttaatggcactatagaaagccctggttttccatatggatatccaaatggtgcaaactgcacatgggtaataatagcagaagaacgaaatagaatacaaattgtttttcagtcatttgctctagaagaagaatacgactacttatcattatatgatggacatcctcatcctacaaactttaggacaaggttaacaggattccatctgccacctccagtgacaagtaccaaatctgtgttctcactacgtttgaccagtgattttgcagttagtgctcatggatttaaggtatattacgaagaattgcagagtagctcttgtggaaatcctggtgttccacccaaaggtgtattatatggcacaagattcgacgtcggggacaagatccgctacagctgtgtaactggatacatccttgatggccaccctcagctcacctgcatagccaattcagttaatacagcttcgtgggattttcctgttcctatctgtagagctgaagatgcttgtggaggaacaatgagaggatccagtggcatcatatccagccctagttttcctaatgagtaccataacaatgctgattgcacttggaccattgtagcagagcctggggacacaatttcactcatatttactgattttcaaatggaagagaaatatgattacttagaaatagaaggttctgagccacctaccatatggttatctggaatgaatataccaccaccaattatcagcaacaaaaactggctcagactgcattttgttacagacagcaatcatcgataccgtggatttagtgctccctatcaaggttcttctacattgacccacactacctccactggtgagttagaggagcataacaggactaccactggtgctattgctgttgctagcacacctgcagatgttactgtatccagtgttacagctgtcaccatccatagactttccgaggaacagcgagtgcaagttacgagtctcagaaattcaggtctggaccccaacacgtccaaggacgggctctctcctcatccagcagatacacaaagtaccaggagaagaccaagacatgctgaacagatagaaagaactaaagagcttgcagttgttactcatagagtgaaaaaggccatagattttaaatctagaggatttaaattgtttccagggaaagacaacagcaacaagttttctatcttaaatgagggaggtattaaaacagcttccaatttatgcccagatccaggagaaccagaaaatgggaagagaatcggatcagattttagccttggatcaactgtgcagttctcttgtgatgaagattatgtcctacagggcgcaaagagcatcacctgtcaacggatagctgaagtttttgctgcttggagtgatcacaggcctgtgtgtaaagtgaaaacgtgtggctctaatcttcaaggaccaagtggtacctttacatctcccaactttccgttccagtatgacagcaatgcacaatgtgtctgggtcatcacagcagtgaatacaaataaggttatccagataaattttgaagaatttgatctggagattggctatgataccttgacaattggcgatgggggcgaagttggagatcctaggacagtgctccaagtgctgactggaagctttgtaccagacttgatagtgagcatgagtagccaaatgtggctgcaccttcaaacggacgaaagtgttggatctgttggtttcaaggttaactacaaagaaattgagaaagaaagttgtggtgatcctggtacacccttatatggaattagagaaggcgatggattttctaatcgtgatgttttaaggtttgaatgccagtttgggtttgaattaattggagagaaatccattgtttgtcaagagaataaccaatggtctgcaaacatacccatctgtatctttccctgcctgtctaactttactgcaccaatgggaacagttctttctcctgattacccagaagggtatggaaataatttaaattgcatctggacgataatctctgatccagggagccggatacatctttctttcaatgactttgacctggaatcccagtttgatttccttgctgttaaagatggtgactctccagaatccccaattcttggaacctttactggggctgaggtgccttcccatcttactagtaatagtcacatactgcgattggaatttcaggctgaccactcaatgtcaggacgtggctttaacatcacttacaacacatttggacataatgaatgccctgatcctggaataccaatcaatgcacggcggtttggggacaactttcaattaggaagttcaatttcagttatttgtgaagaaggatttattaaaacccagggaacagaaacaattacatgtattcttatggatggaaaagtaatgtggagtggactgattccaaaatgtggagccccatgtggtggccatttttcagctcccagtggagtgattctctcaccaggatggccaggatactacaaagactctttgaattgtgagtgggtgattgaagctgaacctggacactctatcaaaattacatttgaaagatttcagactgaactgaattatgatgttctggaagttcatgatgggccaaatcttctgtcacccttgcttggatcttacaatggcacccaagtgccccagtttctatttagtagcagtaattttatataccttctatttacaacagacaacagtcgttccaataatggtttcaagattcattatgaaagtgttacagtgaacacgtattcttgtttggaccctggcatacctgtacatggccgtcgctatggtcatgatttctccattggctctactgtttcatttagttgtgattcaggatacaggttgagtcatgaagagccccttctatgcgaaaaaaaccactggtggagtcatccacttccaacctgtgatgcattatgtggaggagatgttagagggcctagtggaacaatcttatcacctggttacccggaattttatccaaattctctgaattgtacatggactgttgatgtaacccatggaaaaggtgtgcagttcaacttccacacttttcatttggaagaccatcatgactacttactgatcacagagaatggcagttttacccaaccactggcacgcctgactggttcagatcttcctccaacaatcaatgctggtctctatggaaatttcagggctcaattgcgtttcatttcagatttttcaatatcatatgaaggatttaacataacattctctgaatataaccttgaaccttgtgaagatcctggcattcctcaatatggtagtcgaatcgggttcaactttgggattggtgacactctgaccttctcatgctcttcgggttatcgactggaaggaacatcagagatcatctgtcttggtggtggccgacgagtgtggagtgcacctctgccaaggtgtgtggctgaatgtggtgcatctgcaacgaataatgaaggaattttgctgtctccaaattatccactcaactatgaaaacaaccatgaatgcatttatagtattcaggttcaagcaggaaagggaatcaatatttcagccagaacatttcatttagcacaaggagatgttcttaagatttatgatggaaaagataaaacgactcatctactaggtgcttttactggtgcatctatgcgcggactgacacttagtagtacttcaaatcaactctggctagaatttaattccgatactgaagggacagatgaaggctttcaacttgtgtataccagttttgaactctcacactgtgaagatcctggcattccacaatttggatacaagatcagtgaccaaggccactttgctggtagcaccatcatttatggatgcaatccaggctacactctccacggaagtagccttctcaagtgcatgacaggggagagaagggcatgggactatcctctgccttcctgtattgctgaatgtggaggtcgttttaaaggagaatcatcaggaagaatcttatctcctggctatccttttccatatgacaataacctgcgttgcatgtggatgattgaggtagatcctggaaatattgtcagcttgcagtttcttgcttttgatacggaagcatcacatgatatactccgagtctgggacggtccaccagaaaatgatatgcttttaaaggaaattagtggatctcttattcctgaaggaattcatagcaccctcaatatagtaaccatccagtttgacacggatttttatattagcaaatctggatttgcaattcagttttcaagttctgttgccactgcgtgtcgtgacccaggggtccccatgaatgggactcgaaatggggatggaagagaacctggggacactgttgtttttcaatgtgacccaggatatgaacttcaaggagaggaaagaataacctgcattcaggtagaaaatcggtacttctggcagcccagcccaccagtctgtatagcaccctgtggaggcaatttaacaggatcttcaggctttattctttcaccaaacttccctcatccatatccgcatagcagagactgtgactggactatcaccgtcaatgcagactatgttatctccttggcgttcatcagttttagcatagaaccaaactatgacttcctctatatctatgatggaccagacagtaatagcccactgattggaagttttcaagacagcaagttaccagagagaatagaaagcagctcaaatacaatgcatttggcttttcggagtgatggatctgttagttacactggatttcatctagaatacaaagcaaaactgcgagagtcctgctttgatccaggcaatataatgaatggcaccagacttggaatggattataaattagggtcaacagtcacctattactgtgatgctggttatgttcttcaaggttattcaacactcacctgtatcatgggagatgatggaagacctggatggaatagagccttgccaagttgtcatgcgccctgtggaagtcgttcaacaggttcagaaggcactgttctatcaccaaactatccaaaaaattacagtgtgggacataattgtgtttattctatagcagttccaaaggagtttgtggtgtttggccagtttgtatttttccagacatcactccacgatgttgttgaggtgtatgatgggccaactcagcaatcttctctgttatcttccctctcaggatcccattcaggagaatcacttccactgagttcaggtaatcagatcacaattcgatttacttcagttggaccaataacagctaagggatttcactttgtttaccaagctgttcctagaacaagttctacacaatgcagttctgtgcctgaaccaagattcggaagaagaattggcaatgaatttgcagtcggttcatcggttctttttgattgtaatccaggatatattctccatggatccatagcaattaggtgtgaaacagtgcccaattctttggcccagtggaatgattccttacctacttgtattgtgccctgtggtggaattttaactaagcgcaaagggactattttgtcacctggataccctgagccttatgacaacaatctgaattgtgtgtggaagatcacagtgccagagggagctggcattcaagtgcaagttgttagctttgctacagaacataattgggattctctggacttttatgatgggggagacaacaatgctccaagacttggaagctattcaggaacaacaataccccatcttttgaatagtacgtctaataatctgtatctaaattttcaatcagacatcagtgtttctgctgcaggatttcatcttgaatacacagcaattggtttggattcctgtcctgaaccacaaactcctagcagtggaattaaaattggagacagatatatggttggagatgtagtatcctttcagtgtgatcaaggatattctcttcagggtcactctcacattacatgtatgccaggacctgtaagaagatggaattatccaatcccaatttgtttagctcagtgtggtggtgctatgtcagacttcagtggtgtgatcctcagtcctgggtttcctggaaactatcccagcagtttagattgcacatggacaataaatctacccataggttttggtgtacatctccagtttgtaaatttttctacagaaaccatacatgattatttggaagtacgaagtggatcctcagaaactagtactgttattggccggcttagtggtcctcaaataccatcttccttattcagcaccacccatgaaaccagcttatattttcacagtgactattcacaaaacaaacaagggtttcatattgtataccaagcctatcagttgcaaagctgtcctgatccacgcccgtttcgaaatggttttgtaattggtaatgattttactgtgggtcaaaccatttcatttgaatgtttcccaggatacacattaattggaaattcagctctcacatgccttcacggagtcagtcgtaattggaatcatccacttccaaggtgtgaagctctttgtggtgggaatataactgcaatgaatggcaccatttattctcctgggtatcctgatgaatatccaaactttcaagattgtttttggcttgtaagagtaccccctgggaatggcatctacatcaattttactgtccttcaaacagaaccaatatatgatttcattactgtatgggatggaccagaccaaaattcacctcagatcggtcagttcagtggcaataccgctttggaatcagtctacagtacttcaaatcagattctaatcaaattccacagtgatttcacaacaagtggcttttttgtgctcagttatcacgcctatcaactaagggtgtgccaacctccaccacctgtgcccaatgctgaaattttgacggaagatgatgaatttgaaataggtgatattattaggtatcagtgtcttccaggatttactttagttggtaatgcaattctgacgtgcagattaggagaacgactgcagatggatggagcacctccagtttgtcaagtgctctgtcctgccaatgaattacggctagattctactggagtcatattgagccctggatatcctgacagttacccaaatcttcaaatgtgtgcatggagcatttcagtggaaaagggttataatatcaccatgtttgtagaattcttccagacagaaaaggaatttgatgttcttcaggtgtatgatggaccaaatattcaaagtccagtgcttatttccctcagtggggattattcatctgcttttaatataacaagcaatggtcatgaagtatttcttcagtggtcagcagatcatggcaataacaaaaaaggcttccggataagatatatagctttctactgtagtacaccagaatccccacctcatggatatattatcagtcagacaggtgggcagcttaacagtgtggtccgttgggcctgtgatcgaggattccgacttgttggaaaaagcagtgctgtgtgcagaaagtcttcctatgggtatcatgcatgggatgcgccagtccctgcctgtcaagcaatttcctgtgggattcctaaagctccaacaaatggaggaatactaacaacagactatttggtaggaacgcgagttacctatttttgtaatgatggatatcgattgtcatccaaagaactcactacagctgtatgccaatcagatggaacatggagcaatcataacaagacccctcgctgtgttgttgttacatgtccaagcatcaattcctttatcttggaacatggaagatggcgaattgtgaatggctcccattatgaatacaaaaccaaagtagttttcagctgtgaccctggttatcatggactaggtcctgcctccatcgaatgtcttcctaatggtacttggagttggagaaatgaaagaccatattgccaaattatttcctgtggagaactacctacacctccaaatggaaataagattggaactcaaacttcatatggctcaacagctatctttacctgcgacttgggattcatgcttgtgggctctgctgtaagggaatgcctttcctcaggtctttggagtgaatctgaaaccagatgcctagcgggtcattgtggaattccagaactgattgtgaatggtcaagtcattggagaaaattatggatatagagacacagttgtatatcaatgtaatcctggttttcgattgattggttcttcagtgaggatatgtcaacaggatcacaattggtctggtcagctcccatcctgtgtgcctgttagctgtggtcaccctggtagtccaatttatggaagaacaagtggaaatgggttcaactttaatgatgtggtaacattctcatgcaatattgggtatcttatgcaagggccaacaaaggcacagtgccaggccaacagacagtggagccatcctccacctatgtgcaaagtggtcaactgttctgatcctggaattccagccaattctaaaagagaaagtaaaatagaacatggaaattttacttacggcactgtggtattctatgactgcaatcctggatattttttatttggatcttcagttttgatatgtcaaccaaatggacaatgggacaaacctttaccagaatgtatcatgattgactgtggacaccctggcgttcctcctaatgcagtcctgtctggcgagaagtatacttttgggtctactgttcactattcctgcacaggaaagcgttcccttttaggccagtcatcaagaacctgccaattgaatggccattggagtggatcacaacctcattgttcaggtgatgctactgggacatgtggcgatccaggtactcccggccatggctctagacaggaaagcaatttcagaactaaaagtactgtacgttatgcttgtgatactggttacatccttcatggctcagaagaaagaacatgtttagctaatggcagttggaccggaaggcagccagagtgcaaagctgtgcagtgtggtaacccaggaaccacagccaatgggaaagtcttccgaattgatggcacaacattttctagttcagtcatttattcctgcatggagggatacatcctttctggaccttcagttagacagtgcacagccaatggaacatggtctggaactttacctaactgtacaataatcagttgtggagacccaggtataccagccaatggactgagatatggagatgattatgtggttggacaaaatgtttcttacatgtgccagccaggctacacgatggaattgaatggctccagaatcaggacttgtacaattaatggcacatggagtggagtaatgccaacttgtagagctgttacctgcccaactcctccccagatctctaatggaaggctggaaggaacaaatttcgactggggctttagtattagctacatctgttctccaggctatgagctatccttccctgctgttttgacctgtgtagggaatggtacctggagtggtgaagtaccgcagtgcttaccaaagttttgtggtgaccctggtatacctgcccaaggaaaaagagaaggcaaaagctttatataccagtcagaggtttcattcagctgcaattttcctttcatattagtgggatcaagcaccagaatatgtcaagcagatggcacttggagtggttcatcacctcactgcatagagcctacccaaacctcttgtgaaaacccaggtgtgcctcggcatggatctcagaacaatacattcggatttcaagtaggaagtgttgtacagttccattgcaaaaaaggacaccttctccaagggtctacaacacgcacctgcctccctgatcttacgtggagtgggattcagcctgaatgcataccccacagctgtaaacagccagaaactcctgctcatgcaaatgtcgtagggatggaccttccatctcatgggtatacactgatttatacctgtcagcctggcttcttcttagcaggtggaacagaacatagagtgtgtagatccgataacacctggactggaaaagttcccatttgtgaagctggttctaaaatattggtgaaagatcctagacctgcactgggaacacccagcccaaagctaagtgttcctgatgatgtatttgcccaaaattatatatggaaaggctcttacaatttcaaaggaaggaaacaacccatgaccttaacagttactagtttcaatgcttccactgggagagttaacgcaacactgagcaatagcaacatggagctgctactttcaggggtatataaaagccaggaagctcgcctaatgttacgcatatatcttattaaagtacctgctcatgcttctgtgaagaaaatgaaggaagaaaattgggcaatggatggctttgtttctgctgagcctgatggagctacttatgtatttcaaggatttattcaaggcaaagattatggacaatttggcctacaaagactgggactgaatatgtcagaaggttcaaattcttcaaatcaacctcatggtacaaatagtagttctgtagccattgctattcttgtgcctttttttgcacttatatttgcaggatttggattttatctttataaacaaaggactgcacctaaaacacagtatacaggatgttcagttcatgaaaataacaatggccaagcagcttttgaaaatcccatgtatgacaccaacgcaaagtcagtggaagggaaggcggtacgatttgatcccaacttgaacacggtttgcacaatggtataacgaggcaacctttgccttcttcagaagcttggaaatcgacacacaaaacagtgcacatttagttcactgctaaacaaattaaagcacacttttcaggacttgctgggtcaccttttcctgaggaatgatacagaagagtgttttttcataaactggaccataattcttcatgtttaccatggagagttttacagaaatttggctgcactctgagagtgcttactcacagtttatttgctttttttaaaaaggagattattctaaaatataaacttatttgcatatattggaggagcatccactatcagtatttctgtgctttataaactatattagagggactgggtttaaaaaaaaagatatagggtagaaataagagctatacttacaagagtcaatagatcactgacttctctttaactgtcctgagctacatcacgcccacaaatctgtctttcataccactctatctgccattcattcttgttaaatgaggcattgttttctttatttaagattgagttatgactttaaatgtttatgagctagtttatgcctcggaagacataaggtttcccattccaatttgaatctttctatttctttagcatcatattgctcttcttcttttagactggttgtcatagtttctgcaaagggcaagttcattgtgctaccctcccaattcccccattatggagtaaccagtattattcagtgagctatggggtagtgtttcactccttgcttcaatatggttttttcctatttatttttattattttttaatcccaaatgtgatagtagcttcagtatgtttcctcacccaaaaaccatttggctggcagaaattatctagaaaaattattattttgcagttatctgagacaccaaacttaccatcctttattttacaatatttttgatcgaccaaataaaatgtcctaataatctactctatttatatctacatttccttccagctgagtcttcaaatttagcattattttgacacttttaattttcatttaacaatggattagaaaaatattttggtctagccactaaacataatgactgaaaaaaattattattataaatcaccaatataaatttattgcctacaattgtggacttatcatatttttatatatttttaaatttctgtacctttattgttaaacaccaagtttcacatacaagaggtttctttcattgtcaaattaagatatgtatttgtaagttattggtggctcatttaaactgtatcatacagtaatgccagcatttttatttaataggtcatcgtcttccttttatagctgttttacttcattgaatacgatcatgtacccagtgttaactctttgttgttgtccctttcaaatatggataactctgtgaacagtcttgactttttgtatcatgagacagagtgcctaagagaaacccttgcacctgggagcgctgcttggctctatctctacaacatttaatgaatttcttgtaaaccactttgagatacattgttttggaaattcatacaattttctcaacatggtactctactggcaggatgcagttttaaattttatgccatcagttatttattcttgtttattcaaatgactgcaataacaatgattcattcattaatgttaaggctaatacatttaagatcttgtttaaacaatgtttcttctgcaactggctactcctcttatattaatgcatacacttttgtaaagaagtatatttttatgaaaagaaactttgtaaaagtatgatgtaaattttcagtgcaatgtaaacaaaataaaaatggataattgcttttgtaaaa

SEQ ID NO: 7071 - DNA, 12912 bp, Homo sapiens
  source 1..12912: mol_type = unassigned DNA
gagactttgtgcccccgttggagagatggttgagtcctcgtcaaggttgctgtggtatcccagaaacaccattcactccgagctgtgaccgcgcaccaacaacagcaacaactccactgcgccgggctgaggagcaggaattaggagctcgcgaataatatgaaagggatccgcaaaggggaaagccgagcaaaggaatccaaaccctgggagcctggcaagcgaagatgcgctaaatgtggccgcctagacttcatcctgatgaagaaaatggggattaaaagtggatttacgttttggaacctcgtctttttattgacggtgtcttgtgtgaaaggatttatttatacatgtggtggaactttaaaaggacttaatggcactatagaaagccctggttttccatatggatatccaaatggtgcaaactgcacatgggtaataatagcagaagaacgaaatagaatacaaattgtttttcagtcatttgctctagaagaagaatacgactacttatcattatatgatggacatcctcatcctacaaactttaggacaaggttaacaggattccatctgccacctccagtgacaagtaccaaatctgtgttctcactacgtttgaccagtgattttgcagttagtgctcatggatttaaggtatattacgaagaattgcagagtagctcttgtggaaatcctggtgttccacccaaaggtgtattatatggcacaagattcgacgtcggggacaagatccgctacagctgtgtaactggatacatccttgatggccaccctcagctcacctgcatagccaattcagttaatacagcttcgtgggattttcctgttcctatctgtagagctgaagatgcttgtggaggaacaatgagaggatccagtggcatcatatccagccctagttttcctaatgagtaccataacaatgctgattgcacttggaccattgtagcagagcctggggacacaatttcactcatatttactgattttcaaatggaagagaaatatgattacttagaaatagaaggttctgagccacctaccatatggttatctggaatgaatataccaccaccaattatcagcaacaaaaactggctcagactgcattttgttacagacagcaatcatcgataccgtggatttagtgctccctatcaaggttcttctacattgacccacactacctccactggtgagttagaggagcataacaggactaccactggtgctattgctgttgctagcacacctgcagatgttactgtatccagtgttacagctgtcaccatccatagactttccgaggaacagcgagtgcaagttacgagtctcagaaattcaggtctggaccccaacacgtccaaggacgggctctctcctcatccagcagatacacaaagtaccaggagaagaccaagacatgctgaacagatagaaagaactaaagagcttgcagttgttactcatagagtgaaaaaggccatagattttaaatctagaggatttaaattgtttccagggaaagacaacagcaacaagttttctatcttaaatgagggaggtattaaaacagcttccaatttatgcccagatccaggagaaccagaaaatgggaagagaatcggatcagattttagccttggatcaactgtgcagttctcttgtgatgaagattatgtcctacagggcgcaaagagcatcacctgtcaacggatagctgaagtttttgctgcttggagtgatcacaggcctgtgtgtaaagtgaaaacgtgtggctctaatcttcaaggaccaagtggtacctttacatctcccaactttccgttccagtatgacagcaatgcacaatgtgtctgggtcatcacagcagtgaatacaaataaggttatccagataaattttgaagaatttgatctggagattggctatgataccttgacaattggcgatgggggcgaagttggagatcctaggacagtgctccaagtgctgactggaagctttgtaccagacttgatagtgagcatgagtagccaaatgtggctgcaccttcaaacggacgaaagtgttggatctgttggtttcaaggttaactacaaagaaattgagaaagaaagttgtggtgatcctggtacacccttatatggaattagagaaggcgatggattttctaatcgtgatgttttaaggtttgaatgccagtttgggtttgaattaattggagagaaatccattgtttgtcaagagaataaccaatggtctgcaaacatacccatctgtatctttccctgcctgtctaactttactgcaccaatgggaacagttctttctcctgattacccagaagggtatggaaataatttaaattgcatctggacgataatctctgatccagggagccggatacatctttctttcaatgactttgacctggaatcccagtttgatttccttgctgttaaagatggtgactctccagaatccccaattcttggaacctttactggggctgaggtgccttcccatcttactagtaatagtcacatactgcgattggaatttcaggctgaccactcaatgtcaggacgtggctttaacatcacttacaacacatttggacataatgaatgccctgatcctggaataccaatcaatgcacggcggtttggggacaactttcaattaggaagttcaatttcagttatttgtgaagaaggatttattaaaacccagggaacagaaacaattacatgtattcttatggatggaaaagtaatgtggagtggactgattccaaaatgtggagccccatgtggtggccatttttcagctcccagtggagtgattctctcaccaggatggccaggatactacaaagactctttgaattgtgagtgggtgattgaagctgaacctggacactctatcaaaattacatttgaaagatttcagactgaactgaattatgatgttctggaagttcatgatgggccaaatcttctgtcacccttgcttggatcttacaatggcacccaagtgccccagtttctatttagtagcagtaattttatataccttctatttacaacagacaacagtcgttccaataatggtttcaagattcattatgaaagtgttacagtgaacacgtattcttgtttggaccctggcatacctgtacatggccgtcgctatggtcatgatttctccattggctctactgtttcatttagttgtgattcaggatacaggttgagtcatgaagagccccttctatgcgaaaaaaaccactggtggagtcatccacttccaacctgtgatgcattatgtggaggagatgttagagggcctagtggaacaatcttatcacctggttacccggaattttatccaaattctctgaattgtacatggactgttgatgtaacccatggaaaaggtgtgcagttcaacttccacacttttcatttggaagaccatcatgactacttactgatcacagagaatggcagttttacccaaccactggcacgcctgactggttcagatcttcctccaacaatcaatgctggtctctatggaaatttcagggctcaattgcgtttcatttcagatttttcaatatcatatgaaggatttaacataacattctctgaatataaccttgaaccttgtgaagatcctggcattcctcaatatggtagtcgaatcgggttcaactttgggattggtgacactctgaccttctcatgctcttcgggttatcgactggaaggaacatcagagatcatctgtcttggtggtggccgacgagtgtggagtgcacctctgccaaggtgtgtggctgaatgtggtgcatctgcaacgaataatgaaggaattttgctgtctccaaattatccactcaactatgaaaacaaccatgaatgcatttatagtattcaggttcaagcaggaaagggaatcaatatttcagccagaacatttcatttagcacaaggagatgttcttaagatttatgatggaaaagataaaacgactcatctactaggtgcttttactggtgcatctatgcgcggactgacacttagtagtacttcaaatcaactctggctagaatttaattccgatactgaagggacagatgaaggctttcaacttgtgtataccagttttgaactctcacactgtgaagatcctggcattccacaatttggatacaagatcagtgaccaaggccactttgctggtagcaccatcatttatggatgcaatccaggctacactctccacggaagtagccttctcaagtgcatgacaggggagagaagggcatgggactatcctctgccttcctgtattgctgaatgtggaggtcgttttaaaggagaatcatcaggaagaatcttatctcctggctatccttttccatatgacaataacctgcgttgcatgtggatgattgaggtagatcctggaaatattgtcagcttgcagtttcttgcttttgatacggaagcatcacatgatatactccgagtctgggacggtccaccagaaaatgatatgcttttaaaggaaattagtggatctcttattcctgaaggaattcatagcaccctcaatatagtaaccatccagtttgacacggatttttatattagcaaatctggatttgcaattcagttttcaagttctgttgccactgcgtgtcgtgacccaggggtccccatgaatgggactcgaaatggggatggaagagaacctggggacactgttgtttttcaatgtgacccaggatatgaacttcaaggagaggaaagaataacctgcattcaggtagaaaatcggtacttctggcagcccagcccaccagtctgtatagcaccctgtggaggcaatttaacaggatcttcaggctttattctttcaccaaacttccctcatccatatccgcatagcagagactgtgactggactatcaccgtcaatgcagactatgttatctccttggcgttcatcagttttagcatagaaccaaactatgacttcctctatatctatgatggaccagacagtaatagcccactgattggaagttttcaagacagcaagttaccagagagaatagaaagcagctcaaatacaatgcatttggcttttcggagtgatggatctgttagttacactggatttcatctagaatacaaagcaaaactgcgagagtcctgctttgatccaggcaatataatgaatggcaccagacttggaatggattataaattagggtcaacagtcacctattactgtgatgctggttatgttcttcaaggttattcaacactcacctgtatcatgggagatgatggaagacctggatggaatagagccttgccaagttgtcatgcgccctgtggaagtcgttcaacaggttcagaaggcactgttctatcaccaaactatccaaaaaattacagtgtgggacataattgtgtttattctatagcagttccaaaggagtttgctgttcctagaacaagttctacacaatgcagttctgtgcctgaaccaagattcggaagaagaattggcaatgaatttgcagtcggttcatcggttctttttgattgtaatccaggatatattctccatggatccatagcaattaggtgtgaaacagtgcccaattctttggcccagtggaatgattccttacctacttgtattgtgccctgtggtggaattttaactaagcgcaaagggactattttgtcacctggataccctgagccttatgacaacaatctgaattgtgtgtggaagatcacagtgccagagggagctggcattcaagtgcaagttgttagctttgctacagaacataattgggattctctggacttttatgatgggggagacaacaatgctccaagacttggaagctattcaggaacaacaataccccatcttttgaatagtacgtctaataatctgtatctaaattttcaatcagacatcagtgtttctgctgcaggatttcatcttgaatacacagcaattggtttggattcctgtcctgaaccacaaactcctagcagtggaattaaaattggagacagatatatggttggagatgtagtatcctttcagtgtgatcaaggatattctcttcagggtcactctcacattacatgtatgccaggacctgtaagaagatggaattatccaatcccaatttgtttagctcagtgtggtggtgctatgtcagacttcagtggtgtgatcctcagtcctgggtttcctggaaactatcccagcagtttagattgcacatggacaataaatctacccataggttttggtgtacatctccagtttgtaaatttttctacagaaaccatacatgattatttggaagtacgaagtggatcctcagaaactagtactgttattggccggcttagtggtcctcaaataccatcttccttattcagcaccacccatgaaaccagcttatattttcacagtgactattcacaaaacaaacaagggtttcatattgtataccaagcctatcagttgcaaagctgtcctgatccacgcccgtttcgaaatggttttgtaattggtaatgattttactgtgggtcaaaccatttcatttgaatgtttcccaggatacacattaattggaaattcagctctcacatgccttcacggagtcagtcgtaattggaatcatccacttccaaggtgtgaagctctttgtggtgggaatataactgcaatgaatggcaccatttattctcctgggtatcctgatgaatatccaaactttcaagattgtttttggcttgtaagagtaccccctgggaatggcatctacatcaattttactgtccttcaaacagaaccaatatatgatttcattactgtatgggatggaccagaccaaaattcacctcagatcggtcagttcagtggcaataccgctttggaatcagtctacagtacttcaaatcagattctaatcaaattccacagtgatttcacaacaagtggcttttttgtgctcagttatcacgcctatcaactaagggtgtgccaacctccaccacctgtgcccaatgctgaaattttgacggaagatgatgaatttgaaataggtgatattattaggtatcagtgtcttccaggatttactttagttggtaatgcaattctgacgtgcagattaggagaacgactgcagatggatggagcacctccagtttgtcaagtgctctgtcctgccaatgaattacggctagattctactggagtcatattgagccctggatatcctgacagttacccaaatcttcaaatgtgtgcatggagcatttcagtggaaaagggttataatatcaccatgtttgtagaattcttccagacagaaaaggaatttgatgttcttcaggtgtatgatggaccaaatattcaaagtccagtgcttatttccctcagtggggattattcatctgcttttaatataacaagcaatggtcatgaagtatttcttcagtggtcagcagatcatggcaataacaaaaaaggcttccggataagatatatagctttctactgtagtacaccagaatccccacctcatggatatattatcagtcagacaggtgggcagcttaacagtgtggtccgttgggcctgtgatcgaggattccgacttgttggaaaaagcagtgctgtgtgcagaaagtcttcctatgggtatcatgcatgggatgcgccagtccctgcctgtcaagcaatttcctgtgggattcctaaagctccaacaaatggaggaatactaacaacagactatttggtaggaacgcgagttacctatttttgtaatgatggatatcgattgtcatccaaagaactcactacagctgtatgccaatcagatggaacatggagcaatcataacaagacccctcgctgtgttgttgttacatgtccaagcatcaattcctttatcttggaacatggaagatggcgaattgtgaatggctcccattatgaatacaaaaccaaagtagttttcagctgtgaccctggttatcatggactaggtcctgcctccatcgaatgtcttcctaatggtacttggagttggagaaatgaaagaccatattgccaaattatttcctgtggagaactacctacacctccaaatggaaataagattggaactcaaacttcatatggctcaacagctatctttacctgcgacttgggattcatgcttgtgggctctgctgtaagggaatgcctttcctcaggtctttggagtgaatctgaaaccagatgcctagcgggtcattgtggaattccagaactgattgtgaatggtcaagtcattggagaaaattatggatatagagacacagttgtatatcaatgtaatcctggttttcgattgattggttcttcagtgaggatatgtcaacaggatcacaattggtctggtcagctcccatcctgtgtgcctgttagctgtggtcaccctggtagtccaatttatggaagaacaagtggaaatgggttcaactttaatgatgtggtaacattctcatgcaatattgggtatcttatgcaagggccaacaaaggcacagtgccaggccaacagacagtggagccatcctccacctatgtgcaaagtggtcaactgttctgatcctggaattccagccaattctaaaagagaaagtaaaatagaacatggaaattttacttacggcactgtggtattctatgactgcaatcctggatattttttatttggatcttcagttttgatatgtcaaccaaatggacaatgggacaaacctttaccagaatgtatcatgattgactgtggacaccctggcgttcctcctaatgcagtcctgtctggcgagaagtatacttttgggtctactgttcactattcctgcacaggaaagcgttcccttttaggccagtcatcaagaacctgccaattgaatggccattggagtggatcacaacctcattgttcaggtgatgctactgggacatgtggcgatccaggtactcccggccatggctctagacaggaaagcaatttcagaactaaaagtactgtacgttatgcttgtgatactggttacatccttcatggctcagaagaaagaacatgtttagctaatggcagttggaccggaaggcagccagagtgcaaagctgtgcagtgtggtaacccaggaaccacagccaatgggaaagtcttccgaattgatggcacaacattttctagttcagtcatttattcctgcatggagggatacatcctttctggaccttcagttagacagtgcacagccaatggaacatggtctggaactttacctaactgtacaataatcagttgtggagacccaggtataccagccaatggactgagatatggagatgattatgtggttggacaaaatgtttcttacatgtgccagccaggctacacgatggaattgaatggctccagaatcaggacttgtacaattaatggcacatggagtggagtaatgccaacttgtagagctgttacctgcccaactcctccccagatctctaatggaaggctggaaggaacaaatttcgactggggctttagtattagctacatctgttctccaggctatgagctatccttccctgctgttttgacctgtgtagggaatggtacctggagtggtgaagtaccgcagtgcttaccaaagttttgtggtgaccctggtatacctgcccaaggaaaaagagaaggcaaaagctttatataccagtcagaggtttcattcagctgcaattttcctttcatattagtgggatcaagcaccagaatatgtcaagcagatggcacttggagtggttcatcacctcactgcatagagcctacccaaacctcttgtgaaaacccaggtgtgcctcggcatggatctcagaacaatacattcggatttcaagtaggaagtgttgtacagttccattgcaaaaaaggacaccttctccaagggtctacaacacgcacctgcctccctgatcttacgtggagtgggattcagcctgaatgcataccccacagctgtaaacagccagaaactcctgctcatgcaaatgtcgtagggatggaccttccatctcatgggtatacactgatttatacctgtcagcctggcttcttcttagcaggtggaacagaacatagagtgtgtagatccgataacacctggactggaaaagttcccatttgtgaagctggttctaaaatattggtgaaagatcctagacctgcactgggaacacccagcccaaagctaagtgttcctgatgatgtatttgcccaaaattatatatggaaaggctcttacaatttcaaaggaaggaaacaacccatgaccttaacagttactagtttcaatgcttccactgggagagttaacgcaacactgagcaatagcaacatggagctgctactttcaggggtatataaaagccaggaagctcgcctaatgttacgcatatatcttattaaagtacctgctcatgcttctgtgaagaaaatgaaggaagaaaattgggcaatggatggctttgtttctgctgagcctgatggagctacttatgtatttcaaggatttattcaaggcaaagattatggacaatttggcctacaaagactgggactgaatatgtcagaaggttcaaattcttcaaatcaacctcatggtacaaatagtagttctgtagccattgctattcttgtgcctttttttgcacttatatttgcaggatttggattttatctttataaacaaaggactgcacctaaaacacagtatacaggatgttcagttcatgaaaataacaatggccaagcagcttttgaaaatcccatgtatgacaccaacgcaaagtcagtggaagggaaggcggtacgatttgatcccaacttgaacacggtttgcacaatggtataacgaggcaacctttgccttcttcagaagcttggaaatcgacacacaaaacagtgcacatttagttcactgctaaacaaattaaagcacacttttcaggacttgctgggtcaccttttcctgaggaatgatacagaagagtgttttttcataaactggaccataattcttcatgtttaccatggagagttttacagaaatttggctgcactctgagagtgcttactcacagtttatttgctttttttaaaaaggagattattctaaaatataaacttatttgcatatattggaggagcatccactatcagtatttctgtgctttataaactatattagagggactgggtttaaaaaaaaagatatagggtagaaataagagctatacttacaagagtcaatagatcactgacttctctttaactgtcctgagctacatcacgcccacaaatctgtctttcataccactctatctgccattcattcttgttaaatgaggcattgttttctttatttaagattgagttatgactttaaatgtttatgagctagtttatgcctcggaagacataaggtttcccattccaatttgaatctttctatttctttagcatcatattgctcttcttcttttagactggttgtcatagtttctgcaaagggcaagttcattgtgctaccctcccaattcccccattatggagtaaccagtattattcagtgagctatggggtagtgtttcactccttgcttcaatatggttttttcctatttatttttattattttttaatcccaaatgtgatagtagcttcagtatgtttcctcacccaaaaaccatttggctggcagaaattatctagaaaaattattattttgcagttatctgagacaccaaacttaccatcctttattttacaatatttttgatcgaccaaataaaatgtcctaataatctactctatttatatctacatttccttccagctgagtcttcaaatttagcattattttgacacttttaattttcatttaacaatggattagaaaaatattttggtctagccactaaacataatgactgaaaaaaattattattataaatcaccaatataaatttattgcctacaattgtggacttatcatatttttatatatttttaaatttctgtacctttattgttaaacaccaagtttcacatacaagaggtttctttcattgtcaaattaagatatgtatttgtaagttattggtggctcatttaaactgtatcatacagtaatgccagcatttttatttaataggtcatcgtcttccttttatagctgttttacttcattgaatacgatcatgtacccagtgttaactctttgttgttgtccctttcaaatatggataactctgtgaacagtcttgactttttgtatcatgagacagagtgcctaagagaaacccttgcacctgggagcgctgcttggctctatctctacaacatttaatgaatttcttgtaaaccactttgagatacattgttttggaaattcatacaattttctcaacatggtactctactggcaggatgcagttttaaattttatgccatcagttatttattcttgtttattcaaatgactgcaataacaatgattcattcattaatgttaaggctaatacatttaagatcttgtttaaacaatgtttcttctgcaactggctactcctcttatattaatgcatacacttttgtaaagaagtatatttttatgaaaagaaactttgtaaaagtatgatgtaaattttcagtgcaatgtaaacaaaataaaaatggataattgcttttgt

SEQ ID NO: 7072 - DNA, 12485 bp, Homo sapiens
  source 1..12485: mol_type = unassigned DNA
ggagcaggaattaggagctcgcgaataatatgaaagggatccgcaaaggggaaagccgagcaaaggaatccaaaccctgggagcctggcaagcgaagatgcgctaaatgtggccgcctagacttcatcctgatgaagaaaatggggattaaaagtggatttacgttttggaacctcgtctttttattgacggtgtcttgtgtgaaaggatttatttatacatgtggtggaactttaaaaggacttaatggcactatagaaagccctggttttccatatggatatccaaatggtgcaaactgcacatgggtaataatagcagaagaacgaaatagaatacaaattgtttttcagtcatttgctctagaagaagaatacgactacttatcattatatgatggacatcctcatcctacaaactttaggacaaggttaacaggattccatctgccacctccagtgacaagtaccaaatctgtgttctcactacgtttgaccagtgattttgcagttagtgctcatggatttaaggtatattacgaagaattgcagagtagctcttgtggaaatcctggtgttccacccaaaggtgtattatatggcacaagattcgacgtcggggacaagatccgctacagctgtgtaactggatacatccttgatggccaccctcagctcacctgcatagccaattcagttaatacagcttcgtgggattttcctgttcctatctgtagagctgaagatgcttgtggaggaacaatgagaggatccagtggcatcatatccagccctagttttcctaatgagtaccataacaatgctgattgcacttggaccattgtagcagagcctggggacacaatttcactcatatttactgattttcaaatggaagagaaatatgattacttagaaatagaaggttctgagccacctaccatatggttatctggaatgaatataccaccaccaattatcagcaacaaaaactggctcagactgcattttgttacagacagcaatcatcgataccgtggatttagtgctccctatcaagtgaaaaaggccatagattttaaatctagaggatttaaattgtttccagggaaagacaacagcaacaagttttctatcttaaatgagggaggtattaaaacagcttccaatttatgcccagatccaggagaaccagaaaatgggaagagaatcggatcagattttagccttggatcaactgtgcagttctcttgtgatgaagattatgtcctacagggcgcaaagagcatcacctgtcaacggatagctgaagtttttgctgcttggagtgatcacaggcctgtgtgtaaagtgaaaacgtgtggctctaatcttcaaggaccaagtggtacctttacatctcccaactttccgttccagtatgacagcaatgcacaatgtgtctgggtcatcacagcagtgaatacaaataaggttatccagataaattttgaagaatttgatctggagattggctatgataccttgacaattggcgatgggggcgaagttggagatcctaggacagtgctccaagtgctgactggaagctttgtaccagacttgatagtgagcatgagtagccaaatgtggctgcaccttcaaacggacgaaagtgttggatctgttggtttcaaggttaactacaaagaaattgagaaagaaagttgtggtgatcctggtacacccttatatggaattagagaaggcgatggattttctaatcgtgatgttttaaggtttgaatgccagtttgggtttgaattaattggagagaaatccattgtttgtcaagagaataaccaatggtctgcaaacatacccatctgtatctttccctgcctgtctaactttactgcaccaatgggaacagttctttctcctgattacccagaagggtatggaaataatttaaattgcatctggacgataatctctgatccagggagccggatacatctttctttcaatgactttgacctggaatcccagtttgatttccttgctgttaaagatggtgactctccagaatccccaattcttggaacctttactggggctgaggtgccttcccatcttactagtaatagtcacatactgcgattggaatttcaggctgaccactcaatgtcaggacgtggctttaacatcacttacaacacatttggacataatgaatgccctgatcctggaataccaatcaatgcacggcggtttggggacaactttcaattaggaagttcaatttcagttatttgtgaagaaggatttattaaaacccagggaacagaaacaattacatgtattcttatggatggaaaagtaatgtggagtggactgattccaaaatgtggagccccatgtggtggccatttttcagctcccagtggagtgattctctcaccaggatggccaggatactacaaagactctttgaattgtgagtgggtgattgaagctgaacctggacactctatcaaaattacatttgaaagatttcagactgaactgaattatgatgttctggaagttcatgatgggccaaatcttctgtcacccttgcttggatcttacaatggcacccaagtgccccagtttctatttagtagcagtaattttatataccttctatttacaacagacaacagtcgttccaataatggtttcaagattcattatgaaagtgttacagtgaacacgtattcttgtttggaccctggcatacctgtacatggccgtcgctatggtcatgatttctccattggctctactgtttcatttagttgtgattcaggatacaggttgagtcatgaagagccccttctatgcgaaaaaaaccactggtggagtcatccacttccaacctgtgatgcattatgtggaggagatgttagagggcctagtggaacaatcttatcacctggttacccggaattttatccaaattctctgaattgtacatggactgttgatgtaacccatggaaaaggtgtgcagttcaacttccacacttttcatttggaagaccatcatgactacttactgatcacagagaatggcagttttacccaaccactggcacgcctgactggttcagatcttcctccaacaatcaatgctggtctctatggaaatttcagggctcaattgcgtttcatttcagatttttcaatatcatatgaaggatttaacataacattctctgaatataaccttgaaccttgtgaagatcctggcattcctcaatatggtagtcgaatcgggttcaactttgggattggtgacactctgaccttctcatgctcttcgggttatcgactggaaggaacatcagagatcatctgtcttggtggtggccgacgagtgtggagtgcacctctgccaaggtgtgtggctgaatgtggtgcatctgcaacgaataatgaaggaattttgctgtctccaaattatccactcaactatgaaaacaaccatgaatgcatttatagtattcaggttcaagcaggaaagggaatcaatatttcagccagaacatttcatttagcacaaggagatgttcttaagatttatgatggaaaagataaaacgactcatctactaggtgcttttactggtgcatctatgcgcggactgacacttagtagtacttcaaatcaactctggctagaatttaattccgatactgaagggacagatgaaggctttcaacttgtgtataccagttttgaactctcacactgtgaagatcctggcattccacaatttggatacaagatcagtgaccaaggccactttgctggtagcaccatcatttatggatgcaatccaggctacactctccacggaagtagccttctcaagtgcatgacaggggagagaagggcatgggactatcctctgccttcctgtattgctgaatgtggaggtcgttttaaaggagaatcatcaggaagaatcttatctcctggctatccttttccatatgacaataacctgcgttgcatgtggatgattgaggtagatcctggaaatattgtcagcttgcagtttcttgcttttgatacggaagcatcacatgatatactccgagtctgggacggtccaccagaaaatgatatgcttttaaaggaaattagtggatctcttattcctgaaggaattcatagcaccctcaatatagtaaccatccagtttgacacggatttttatattagcaaatctggatttgcaattcagttttcaagttctgttgccactgcgtgtcgtgacccaggggtccccatgaatgggactcgaaatggggatggaagagaacctggggacactgttgtttttcaatgtgacccaggatatgaacttcaaggagaggaaagaataacctgcattcaggtagaaaatcggtacttctggcagcccagcccaccagtctgtatagcaccctgtggaggcaatttaacaggatcttcaggctttattctttcaccaaacttccctcatccatatccgcatagcagagactgtgactggactatcaccgtcaatgcagactatgttatctccttggcgttcatcagttttagcatagaaccaaactatgacttcctctatatctatgatggaccagacagtaatagcccactgattggaagttttcaagacagcaagttaccagagagaatagaaagcagctcaaatacaatgcatttggcttttcggagtgatggatctgttagttacactggatttcatctagaatacaaagcaaaactgcgagagtcctgctttgatccaggcaatataatgaatggcaccagacttggaatggattataaattagggtcaacagtcacctattactgtgatgctggttatgttcttcaaggttattcaacactcacctgtatcatgggagatgatggaagacctggatggaatagagccttgccaagttgtcatgcgccctgtggaagtcgttcaacaggttcagaaggcactgttctatcaccaaactatccaaaaaattacagtgtgggacataattgtgtttattctatagcagttccaaaggagtttgtggtgtttggccagtttgtatttttccagacatcactccacgatgttgttgaggtgtatgatgggccaactcagcaatcttctctgttatcttccctctcaggatcccattcaggagaatcacttccactgagttcaggtaatcagatcacaattcgatttacttcagttggaccaataacagctaagggatttcactttgtttaccaagctgttcctagaacaagttctacacaatgcagttctgtgcctgaaccaagattcggaagaagaattggcaatgaatttgcagtcggttcatcggttctttttgattgtaatccaggatatattctccatggatccatagcaattaggtgtgaaacagtgcccaattctttggcccagtggaatgattccttacctacttgtattgtgccctgtggtggaattttaactaagcgcaaagggactattttgtcacctggataccctgagccttatgacaacaatctgaattgtgtgtggaagatcacagtgccagagggagctggcattcaagtgcaagttgttagctttgctacagaacataattgggattctctggacttttatgatgggggagacaacaatgctccaagacttggaagctattcaggaacaacaataccccatcttttgaatagtacgtctaataatctgtatctaaattttcaatcagacatcagtgtttctgctgcaggatttcatcttgaatacacagcaattggtttggattcctgtcctgaaccacaaactcctagcagtggaattaaaattggagacagatatatggttggagatgtagtatcctttcagtgtgatcaaggatattctcttcagggtcactctcacattacatgtatgccaggacctgtaagaagatggaattatccaatcccaatttgtttagctcagtgtggtggtgctatgtcagacttcagtggtgtgatcctcagtcctgggtttcctggaaactatcccagcagtttagattgcacatggacaataaatctacccataggttttggtgtacatctccagtttgtaaatttttctacagaaaccatacatgattatttggaagtacgaagtggatcctcagaaactagtactgttattggccggcttagtggtcctcaaataccatcttccttattcagcaccacccatgaaaccagcttatattttcacagtgactattcacaaaacaaacaagggtttcatattgtataccaagcctatcagttgcaaagctgtcctgatccacgcccgtttcgaaatggttttgtaattggtaatgattttactgtgggtcaaaccatttcatttgaatgtttcccaggatacacattaattggaaattcagctctcacatgccttcacggagtcagtcgtaattggaatcatccacttccaaggtgtgaagctctttgtggtgggaatataactgcaatgaatggcaccatttattctcctgggtatcctgatgaatatccaaactttcaagattgtttttggcttgtaagagtaccccctgggaatggcatctacatcaattttactgtccttcaaacagaaccaatatatgatttcattactgtatgggatggaccagaccaaaattcacctcagatcggtcagttcagtggcaataccgctttggaatcagtctacagtacttcaaatcagattctaatcaaattccacagtgatttcacaacaagtggcttttttgtgctcagttatcacgcctatcaactaagggtgtgccaacctccaccacctgtgcccaatgctgaaattttgacggaagatgatgaatttgaaataggtgatattattaggtatcagtgtcttccaggatttactttagttggtaatgcaattctgacgtgcagattaggagaacgactgcagatggatggagcacctccagtttgtcaagtgctctgtcctgccaatgaattacggctagattctactggagtcatattgagccctggatatcctgacagttacccaaatcttcaaatgtgtgcatggagcatttcagtggaaaagggttataatatcaccatgtttgtagaattcttccagacagaaaaggaatttgatgttcttcaggtgtatgatggaccaaatattcaaagtccagtgcttatttccctcagtggggattattcatctgcttttaatataacaagcaatggtcatgaagtatttcttcagtggtcagcagatcatggcaataacaaaaaaggcttccggataagatatatagctttctactgtagtacaccagaatccccacctcatggatatattatcagtcagacaggtgggcagcttaacagtgtggtccgttgggcctgtgatcgaggattccgacttgttggaaaaagcagtgctgtgtgcagaaagtcttcctatgggtatcatgcatgggatgcgccagtccctgcctgtcaagcaatttcctgtgggattcctaaagctccaacaaatggaggaatactaacaacagactatttggtaggaacgcgagttacctatttttgtaatgatggatatcgattgtcatccaaagaactcactacagctgtatgccaatcagatggaacatggagcaatcataacaagacccctcgctgtgttgttatttcctgtggagaactacctacacctccaaatggaaataagattggaactcaaacttcatatggctcaacagctatctttacctgcgacttgggattcatgcttgtgggctctgctgtaagggaatgcctttcctcaggtctttggagtgaatctgaaaccagatgcctagcgggtcattgtggaattccagaactgattgtgaatggtcaagtcattggagaaaattatggatatagagacacagttgtatatcaatgtaatcctggttttcgattgattggttcttcagtgaggatatgtcaacaggatcacaattggtctggtcagctcccatcctgtgtgcctgttagctgtggtcaccctggtagtccaatttatggaagaacaagtggaaatgggttcaactttaatgatgtggtaacattctcatgcaatattgggtatcttatgcaagggccaacaaaggcacagtgccaggccaacagacagtggagccatcctccacctatgtgcaaagtggtcaactgttctgatcctggaattccagccaattctaaaagagaaagtaaaatagaacatggaaattttacttacggcactgtggtattctatgactgcaatcctggatattttttatttggatcttcagttttgatatgtcaaccaaatggacaatgggacaaacctttaccagaatgtatcatgattgactgtggacaccctggcgttcctcctaatgcagtcctgtctggcgagaagtatacttttgggtctactgttcactattcctgcacaggaaagcgttcccttttaggccagtcatcaagaacctgccaattgaatggccattggagtggatcacaacctcattgttcaggtgatgctactgggacatgtggcgatccaggtactcccggccatggctctagacaggaaagcaatttcagaactaaaagtactgtacgttatgcttgtgatactggttacatccttcatggctcagaagaaagaacatgtttagctaatggcagttggaccggaaggcagccagagtgcaaagctgtgcagtgtggtaacccaggaaccacagccaatgggaaagtcttccgaattgatggcacaacattttctagttcagtcatttattcctgcatggagggatacatcctttctggaccttcagttagacagtgcacagccaatggaacatggtctggaactttacctaactgtacaataatcagttgtggagacccaggtataccagccaatggactgagatatggagatgattatgtggttggacaaaatgtttcttacatgtgccagccaggctacacgatggaattgaatggctccagaatcaggacttgtacaattaatggcacatggagtggagtaatgccaacttgtagagctgttacctgcccaactcctccccagatctctaatggaaggctggaaggaacaaatttcgactggggctttagtattagctacatctgttctccaggctatgagctatccttccctgctgttttgacctgtgtagggaatggtacctggagtggtgaagtaccgcagtgcttaccaaagttttgtggtgaccctggtatacctgcccaaggaaaaagagaaggcaaaagctttatataccagtcagaggtttcattcagctgcaattttcctttcatattagtgggatcaagcaccagaatatgtcaagcagatggcacttggagtggttcatcacctcactgcatagagcctacccaaacctcttgtgaaaacccaggtgtgcctcggcatggatctcagaacaatacattcggatttcaagtaggaagtgttgtacagttccattgcaaaaaaggacaccttctccaagggtctacaacacgcacctgcctccctgatcttacgtggagtgggattcagcctgaatgcataccccacagctgtaaacagccagaaactcctgctcatgcaaatgtcgtagggatggaccttccatctcatgggtatacactgatttatacctgtcagcctggcttcttcttagcaggtggaacagaacatagagtgtgtagatccgataacacctggactggaaaagttcccatttgtgaagctggttctaaaatattggtgaaagatcctagacctgcactgggaacacccagcccaaagctaagtgttcctgatgatgtatttgcccaaaattatatatggaaaggctcttacaatttcaaaggaaggaaacaacccatgaccttaacagttactagtttcaatgcttccactgggagagttaacgcaacactgagcaatagcaacatggagctgctactttcaggggtatataaaagccaggaagctcgcctaatgttacgcatatatcttattaaagtacctgctcatgcttctgtgaagaaaatgaaggaagaaaattgggcaatggatggctttgtttctgctgagcctgatggagctacttatgtatttcaaggatttattcaaggcaaagattatggacaatttggcctacaaagactgggactgaatatgtcagaaggttcaaattcttcaaatcaacctcatggtacaaatagtagttctgtagccattgctattcttgtgcctttttttgcacttatatttgcaggatttggattttatctttataaacaaaggactgcacctaaaacacagtatacaggatgttcagttcatgaaaataacaatggccaagcagcttttgaaaatcccatgtatgacaccaacgcaaagtcagtggaagggaaggcggtacgatttgatcccaacttgaacacggtttgcacaatggtataacgaggcaacctttgccttcttcagaagcttggaaatcgacacacaaaacagtgcacatttagttcactgctaaacaaattaaagcacacttttcaggacttgctgggtcaccttttcctgaggaatgatacagaagagtgttttttcataaactggaccataattcttcatgtttaccatggagagttttacagaaatttggctgcactctgagagtgcttactcacagtttatttgctttttttaaaaaggagattattctaaaatataaacttatttgcatatattggaggagcatccactatcagtatttctgtgctttataaactatattagagggactgggtttaaaaaaaaagatatagggtagaaataagagctatacttacaagagtcaatagatcactgacttctctttaactgtcctgagctacatcacgcccacaaatctgtctttcataccactctatctgccattcattcttgttaaatgaggcattgttttctttatttaagattgagttatgactttaaatgtttatgagctagtttatgcctcggaagacataaggtttcccattccaatttgaatctttctatttctttagcatcatattgctcttcttcttttagactggttgtcatagtttctgcaaagggcaagttcattgtgctaccctcccaattcccccattatggagtaaccagtattattcagtgagctatggggtagtgtttcactccttgcttcaatatggttttttcctatttatttttattattttttaatcccaaatgtgatagtagcttcagtatgtttcctcacccaaaaaccatttggctggcagaaattatctagaaaaattattattttgcagttatctgagacaccaaacttaccatcctttattttacaatatttttgatcgaccaaataaaatgtcctaataatctactctatttatatctacatttccttccagctgagtcttcaaatttagcattattttgacacttttaattttcatttaacaatggattagaaaaatattttggtctagccactaaacataatgactgaaaaaaattattattataaatcaccaatataaatttattgcctacaattgtggacttatcatatttttatatatttttaaatttctgtacctttattgttaaacaccaagtttcacatacaagaggtttctttcattgtcaaattaagatatgtatttgtaagttattggtggctcatttaaactgtatcatacagtaatgccagcatttttatttaataggtcatcgtcttccttttatagctgttttacttcattgaatacgatcatgtacccagtgttaactctttgttgttgtccctttcaaatatggataactctgtgaacagtcttgactttttgtatcatgagacagagtgcctaagagaaacccttgcacctgggagcgctgcttggctctatctctacaacatttaatgaatttcttgtaaaccactttgagatacattgttttggaaattcatacaattttctcaacatggtactctactggcaggatgcagttttaaattttatgccatcagttatttattcttgtttattcaaatgactgcaataacaatgattcattcattaatgttaaggctaatacatttaagatcttgtttaaacaatgtttcttctgcaactggctactcctcttatattaatgcatacacttttgtaaagaagtatatttttatgaaaagaaactttgtaaaagtatgatgtaaattttcagtgcaatgtaaacaaaataaaaatggataattgcttttgt

SEQ ID NO: 7073 - DNA, 6006 bp, Homo sapiens
  source 1..6006: mol_type = unassigned DNA
gggcggggctcgggccggtccgcccgcgcgcaggtgagtgagccagggcggagcgcagctgcgccgggcttgggcgcctggggccgccgctccccaccgtcgttttccccaccgaggccgaggcgtcccggagtcatggccggcctgaactgcggggtctctatcgcactgctaggggttctgctgctgggtgcggcgcgcctgccgcgcggggcagaagcttttgagattgctctgccacgagaaagcaacattacagttctcataaagctggggaccccgactctgctggcaaaaccctgttacatcgtcatttctaaaagacatataaccatgttgtccatcaagtctggagaaagaatagtctttacctttagctgccagagtcctgagaatcactttgtcatagagatccagaaaaatattgactgtatgtcaggcccatgtccttttggggaggttcagcttcagccctcgacatcgttgttgcctaccctcaacagaactttcatctgggatgtcaaagctcataagagcatcggtttagagctgcagttttccatccctcgcctgaggcagatcggtccgggtgagagctgcccagacggagtcactcactccatcagcggccgaatcgatgccaccgtggtcaggatcggaaccttctgcagcaatggcactgtgtcccggatcaagatgcaagaaggagtgaaaatggccttacacctcccatggttccaccccagaaatgtctccggcttcagcattgcaaaccgctcatctataaaacgtctgtgcatcatcgagtctgtgtttgagggtgaaggctcagcaaccctgatgtctgccaactacccagaaggcttccctgaggatgagctcatgacgtggcagtttgtcgttcctgcacacctgcgggccagcgtctccttcctcaacttcaacctctccaactgtgagaggaaggaggagcgggttgaatactacatcccgggctccaccaccaaccccgaggtgttcaagctggaggacaagcagcctgggaacatggcggggaacttcaacctctctctgcaaggctgtgaccaagatgcccaaagtccagggatcctccggctgcagttccaagttttggtccaacatccacaaaatgaaagcaataaaatctacgtggttgacttgagtaatgagcgagccatgtcactcaccatcgagccacggcccgtcaaacagagccgcaagtttgtccctggctgtttcgtgtgtctagaatctcggacctgcagtagcaacctcaccctgacatctggctccaaacacaaaatctccttcctttgtgatgatctgacacgtctgtggatgaatgtggaaaaaaccataagctgcacagaccaccggtactgccaaaggaaatcctactcactccaggtgcccagtgacatcctccacctgcctgtggagctgcatgacttctcctggaagctgctggtgcccaaggacaggctcagcctggtgctggtgccagcccagaagctgcagcagcatacacacgagaagccctgcaacaccagcttcagctacctcgtggccagtgccatacccagccaggacctgtacttcggctccttctgcccgggaggctctatcaagcagatccaggtgaagcagaacatctcggtgacccttcgcacctttgcccccagcttccaacaagaggcctccaggcagggtctgacggtgtcctttataccttatttcaaagaggaaggcgttttcacggtgacccctgacacaaaaagcaaggtctacctgaggacccccaactgggaccggggcctgccatccctcacctctgtgtcctggaacatcagcgtgcccagagaccaggtggcctgcctgactttctttaaggagcggagcggcgtggtctgccagacagggcgcgcattcatgatcatccaggagcagcggacccgggctgaggagatcttcagcctggacgaggatgtgctccccaagccaagcttccaccatcacagcttctgggtcaacatctctaactgcagccccacgagcggcaagcagctagacctgctcttctcggtgacacttaccccaaggactgtggacttgactgtcatcctcatcgcagcggtgggaggtggagtcttactgctgtctgccctcgggctcatcatttgctgtgtgaaaaagaagaaaaagaagacaaacaagggccccgctgtgggtatctacaatgacaacatcaatactgagatgccgaggcagccaaaaaagtttcagaaagggcgaaaggacaatgactcccatgtgtatgcagtcatcgaggacaccatggtatatgggcatctgctacaggattccagcggctccttcctgcagccagaggtggacacctaccggccgttccagggcaccatgggggtctgtcctccctccccacccaccatatgctccagggccccaactgcaaagttggccactgaggagccacctcctcgctcccctcctgagtctgagagtgaaccgtacaccttctcccatcccaacaatggggatgtaagcagcaaggacacagacattcccttactgaacactcaggagcccatggagccagcagaataacttgatccattccagacgctttgctgagtttcataaagcagggcactgagacacccgtccgtgttcctaaccagaaatcctaaagaagaggaattatacagaaggaacagcaggaggttttcctggacaccgccaacttcacattgctcagtggactcattctaagggcaagacattgaaaatgatgaattccaatctggatacagtcatgacagctcatgtgctcctcaacttaggctgtgcggttagccagcctgtaatgagaggagagaggcctgagtcacctagcatagggttgcagcaagccctggattcagagtgttaaacagaggcttgccctcttcaggacaacagttccaattccaaggagcctacctgaggtccctactctcactggggtccccaggatgaaaacgacaatgtgcctttttattattatttatttggtggtcctgtgttatttaagagatcaaatgtataaccacctagctcttttcacctgacttagtaataactcatactaactggtttggatgcctgggttgtgacttctactgaccgctagataaacgtgtgcctgtcccccaggtggtgggaataatttacaatctgtccaaccagaaaagaatgtgtgtgtttgagcagcattgacacatatctgctttgataagagacttcctgattctctaggtcggttcgtggttatcccattgtggaaattcatcttgaatcccattgtcctatagtcctagcaataagagaaatttcctcaagtttccatgtgcggttctcctagctgcagcaatactttgacatttaaagagaaatttagagaatattctcatcctctaaaaatgtttaaatatataccaaacagtggccccctgcattagttttctgttgccactgcaacctattacttggtagcttaaaaacaacacattagcttatagtcctggggatcagaattccaaaatggatgtccctgaatgaaaatcaaggtgtcagcagagctgtgctccttctgaaggctctagggagaagccggttccttgccatttcaagcttctagaggctggctgcattcccaggctccagtggctggtcaagcttttctcacatggcatcactgtgacactggccctcccacttccctctttgacttacaaagcccaccaggaagatccaggataatctctccatctaaagttccttcatcatcctggaagagccttttgccatgcaagacaacatagccacaggtggggattaggaccagaacatctttggggtgctgttattctgcctaccacaccttcctgccactgactcccacaggagaggctacaaaatgatctggcgcacagggatgttttgtttagcttgcggactctaacacttaaaaaaaaacccagatcagaagatctggccatgctggggctcacattctcacctagcaacaactggctggagctgggcaccagctctgcctttagaaggggtgtccacttcaccaggtcaccacagcccacactacgccctatcacttcccacaatgaggctgagtgtttgtttctactgatcaatgcccctgcaggttgcatttattgtaatgaaaaagaaagactgggattaatctctaatcaggtgagtagaccatgagaccaatgtgtgctcacattaccctttttcttttttttctttttctttttctttttttttttaatgtgagacaggatctcattctgttgcctaggctggagtgcagtggcgcaatctcggctcactgcaacctctgcctcctgggctcaagcaattctcccacctcagcctcccaaatagctgggatcactggcacaaaccaccatgcccagctaattttgtattttttgtagagacagggtttcaccatgttgcccaggctggtctcaacctcctgggctcaagcaatcctcctgcctcggcctcccaaagtgctgggattacagatgtgagccaccgcatccagccccacaccctcatttataccaattacctgcccagtaactgtggacttttgcttcctcacccctgctctgatctggaaggagagggattatgttatagcttgtcagcacagtcccaagttcaatatttctgcggcaaaaacttccttcaaaaaataaatgtacttcattgtattcaatgaattcaccttggaaatgcaccgcctcaacttgttcacatggcataaatgaaaggaattttatagtctcctaaatggcgtgtactgcaagacctcttgaacactttccagaggataggatatttaagtcatgcccttggcgttgcctatggcacctttcccttctgaaagtctggttcctgcccagtgacccttggccttgtgagccgagatgctgaccctgcataaagggccaaaggagggctgcggcttccttccctcactgaagagcccttatttgaattcactgtgtggagccctagccctccattctcgacattccccaacctcccagccccttccaagcaggactaggtgccctgcattccacccaaggtgggattggccttccttaggctggctacttgtcaccatcaccgacatcactgttgcctgcaaggacaccacgtggccattttccttcaactgagggctcaaaactcctggacaagttgctggctcctgagaccagtatttcctggagctgtgcctcagtgaaggggcccagcctgaggaaccctggctcttttctttaaagcccaggccccacttacgtaaaacatttcagggtcactggaaacagtgaagtgccatttgttgaagcctactgcatgccagcccactgctcatccacgtggtctgccatgcctacgaggaaggccagcgcatgcaggactggtctctaatgctgtggtcattgcacagaagggaaaggtctcaaggaagagtcaactggaacaagcacaagcccaccggacatggccttggtaaaggttagcagactggtgtgtgtggatctgcagtgcttcactggaaataatttattcattgcagatactttttaggtggcattttattcatttcctgtgctttaaataaacaaatgtaccaaaaaacaagtatcaagctgtttaagtgcttcggctacttgtcccctggttcagtagaggccccggtttcccagttgttgactgtgacaggctcagcatgggctcagcagatgctgtcttaatttgtggatgatacagaaagccaggctttgggatacaagttctttcctcttcatttgatgccgtgcactgtgtgaagcagatgtttttgtccggaaataaaaataatagtcttggagtctcgcc

SEQ ID NO: 7074 - DNA, 1416 bp, Homo sapiens
  source 1..1416: mol_type = unassigned DNA
gggcggggctcgggccggtccgcccgcgcgcaggtgagtgagccagggcggagcgcagctgcgccgggcttgggcgcctggggccgccgctccccaccgtcgttttccccaccgaggccgaggcgtcccggagtcatggccggcctgaactgcggggtctctatcgcactgctaggggttctgctgctgggtgcggcgcgcctgccgcgcggggcagaagcttttgagattgctctgccacgagaaagcaacattacagttctcataaagctggggaccccgactctgctggcaaaaccctgttacatcgtcatttctaaaagacatataaccatgttgtccatcaagtctggagaaagaatagtctttacctttagctgccagagtcctgagaatcactttgtcatagagatccagaaaaatattgactgtatgtcaggcccatgtccttttggggaggttcagcttcagccctcgacatcgttgttgcctaccctcaacagaactttcatctgggatgtcaaagctcataagagcatcggtttagagctgcagttttccatccctcgcctgaggcagatcggtccgggtgagagctgcccagacggagtcactcactccatcagcggccgaatcgatgccaccgtggtcaggatcggaaccttctgcagcaatggcactgtgtcccggatcaagatgcaagaaggagtgaaaatggccttacacctcccatggttccaccccagaaatgtctccggcttcagcattgcaaaccgctcatctataaaacgtctgtgcatcatcgagtctgtgtttgagggtgaaggctcagcaaccctgatgtctgccaactacccagaaggcttccctgaggatgagctcatgacgtggcagtttgtcgttcctgcacacctgcgggccagcgtctccttcctcaacttcaacctctccaactgtgagaggaaggaggagcgggttgaatactacatcccgggctccaccaccaaccccgaggtgttcaagctggaggacaagcagcctgggaacatggcggggaacttcaacctctctctgcaaggctgtgaccaagatgcccaaagtccagggatcctccggctgcagttccaagttttggtccaacatccacaaaatgaaagcagtgagtgagccccactttcctttttcttcctcctccagcaccttcgttgtttcctgggtagtctgcctgggtgaggctcccttcctgtttctcatctgtggcttctgaaacacttagactctggacccagcaagagtttcaggaagtgggttgctaggcagttagacaggcttgttggtgaacacccggtatgtagttccatttcagcacaataaaaagaaatcttgcattcaagatgctaaattgtttttaacgaa

SEQ ID NO: 7075 - DNA, 705 bp, Homo sapiens
  source 1..705: mol_type = unassigned DNA
tggagtggcctcactcttacctgccaacctgggaggttgatgatgaacatgtctttaccttttctttggagtttgcttaccttattaatatttgctgaagtaaatggcgaagctggagaacttgagctgcagagacaaaaaagaagcatcaatctccaacagcctcgaatggctacagagagaggaaatttggtgtttcttacggggtctgctcaaaacattgagtttagaaccggatccctgggaaaaattaaattaaatgatgaagatctcagtgagtgtttacatcagatccagaaaaacaaagaagatattatagagttaaaagggagtgcaattggtctgcctcaaaatatatctagtcaaatctatcagcttaattccaagctggtggatcttgagagaaaattccaaggcttgcagcagactgttgacaaaaaggtttgcagcagcaatccttgccagaatggtggaacctgcctcaatctgcatgattcctttttttgtatctgtcccccacagtggaaggtgagtcatctactctttggttaagaatgatggcaggtcagcatctgtggtttccttggaatcatcaggcatatttaattctccatctaaagtttctaggattctgtggcctcccaaatcaaattgaaatataccaggtatgctaaaacccaaacagtggtgagtatgattgtataa

SEQ ID NO: 7076 - DNA, 11949 bp, Homo sapiens
  source 1..11949: mol_type = unassigned DNA
ttctccaaaatcccatgctcagttggttggagtggcctcactcttacctgccaacctgggaggttgatgatgaacatgtctttaccttttctttggagtttgcttaccttattaatatttgctgaagtaaatggcgaagctggagaacttgagctgcagagacaaaaaagaagcatcaatctccaacagcctcgaatggctacagagagaggaaatttggtgtttcttacggggtctgctcaaaacattgagtttagaaccggatccctgggaaaaattaaattaaatgatgaagatctcagtgagtgtttacatcagatccagaaaaacaaagaagatattatagagttaaaagggagtgcaattggtctgcctcaaaatatatctagtcaaatctatcagcttaattccaagctggtggatcttgagagaaaattccaaggcttgcagcagactgttgacaaaaaggtttgcagcagcaatccttgccagaatggtggaacctgcctcaatctgcatgattcctttttttgtatctgtcccccacagtggaagggtcctctctgctcagctgatgttaacgaatgtgagatttactcaggaacacccttgagctgccagaatggaggcacatgtgttaatacaatgggaagttacagttgtcactgcccacctgagacgtacggaccccagtgtgcatccaaatatgacgactgtgaagggggttctgtggcacgctgtgtccatggcatctgtgaggatttaatgcgagagcaagctggagagcccaagtacagctgcgtctgtgatgctgggtggatgttttcacccaacagccctgcctgcacgctggacagagacgagtgcagcttccagcccgggccttgctccacacttgtgcagtgtttcaacactcaaggctctttctactgtggggcctgtccaacaggctggcaaggcaatggatatatttgcgaagatatcaatgaatgtgagataaataacggcggctgttctgtggctccacccgttgagtgtgtgaatacacctgggtcttcccactgccaggcctgtccaccagggtaccagggtgacggaagagtgtgcacactcacagacatctgctcagtcagtaatggaggctgccacccagatgcctcatgctcctcaactctaggttccttacctctctgcacgtgtctcccgggttatactggaaatggttatgggccaaatggatgtgtgcagctcagtaatatttgcctaagtcacccctgtctaaatggacaatgcatcgacactgtctctggttatttttgtaagtgtgactcaggttggacaggtgtcaactgtacagaaaacatcaatgagtgtttgagcaacccctgtttgaatggaggaacttgtgttgatggcgttgattctttcagttgtgaatgcacacgtctctggactggagctctctgtcaggttcctcagcaagtttgtggagagtccctctcaggaataaatggaagcttcagctacaggagcccggatgttggttatgttcatgatgttaactgcttctgggttatcaaaactgaaatgggaaaggtcctgcgtatcactttcacttttttccggttagaatccatggacaactgtccacacgagtttcttcaggtttatgatggagattcctcttctgcttttcaacttggaagattttgtggctccagcctccctcatgaactcctcagcagtgacaatgctctctattttcatctctattctgaacatttaagaaatgggagaggctttacagtaagatgggaaacacagcaaccagagtgtggaggtatcctgactggtccttacggttctattaagtctccggggtatcctggaaactatcccccaggaagagattgtgtctggattgttgtaactagtcctgacctcctggtaacatttacttttgggaccttgagcctcgagcaccatgatgactgcaacaaagattaccttgagattcgagatggtcctttgtatcaggacccccttcttgggaagttctgcaccactttctctgtcccaccgctccagactactggcccctttgccagaattcacttccattcagactcccagattagtgaccaaggcttccatatcacctacttaacatcaccttcggatctgcgttgtggtgggaactacacggacccagagggtgaactcttcttgcctgagttgtctgggcctttcactcacaccaggcaatgcgtctatatgatgaagcagccccagggagaacaaatacaaatcaacttcacccacgtggagctgcaatgccagagtgacagttctcagaattacattgaggttcgagatggtgaaaccttacttggaaaagtctgtggcaacggaaccatctctcacattaaatccattactaatagtgtctggatcaggtttaaaatagatgcttctgttgaaaaagctagtttcagagctgtttatcaagtcgcttgcggggatgaattaactggagaaggggtcattcgctcgcctttttttcctaacgtgtatcctggagaaagaacctgtaggtggaccatccaccagccccaaagccaagtcattctcctcaacttcactgtctttgaaattggaagttctgcccactgtgaaacagattatgttgagattggtagcagttccattttgggttctcctgaaaataaaaagtattgcggtacagacataccttcatttataacatctgtgtacaattttctttatgtcacattcgtgaaaagttcttctactgaaaaccatggtttcatggctaagttcagtgctgaggatttggcatgtggagaaattcttacagaatcaacagggaccattcaaagtcctggccatccaaatgtctacccccacggtatcaactgtacttggcatatattagtccaacctaatcacctgattcatttaatgttcgaaacatttcatctggagtttcattacaattgcacaaacgactacttggaagtttatgacaccgactctgagacatcccttggaagatactgtggaaagtcgatcccgccatctctcacaagcagtggtaactcattgatgctggtgtttgtgactgactccgacctcgcttatgaaggcttcttaataaactatgaagcaatcagtgcagcaacagcatgtttgcaagactacacagatgatttggggacattcacttctccaaacttccccaataattatcccaacaactgggaatgcatttatcggatcacagtgagaactggccaactgattgcagtgcacttcacaaacttctccttggaggaagccattggaaactattatacagattttctggaaatcagagatggaggctatgaaaaatcaccattgctgggaatattctatggctcaaatctacccccaacaatcatctctcatagtaacaaactatggttaaaatttaagagtgaccaaatagacacaaggtctggattctcagcttactgggatgggtcatcaacaggttgcgggggtaatctcaccacttcaagcggcacgttcatatctcccaactacccgatgccctattaccacagctctgaatgctactggtggttgaaatctagccacggcagcgcatttgaactggaattcaaagactttcacttggagcatcatccaaactgcactttagattacctggctgtatatgatggcccaagtagcaactctcatctgctaactcagctttgtggggatgagaaaccccctcttattcgttctagtggagacagcatgtttataaaactgaggacagatgaaggtcagcaaggacgtggcttcaaggctgaataccggcagacatgtgagaatgtggtaatagtcaatcaaacctatggcatcttagagagtatagggtatccgaatccttattctgaaaatcagcattgcaactggaccatccgggcaacaacaggcaacactgtgaactacacatttttagcatttgacttggaacatcacataaactgctccacagattatttagagctctatgatggaccacggcagatgggacgctactgtggagtagacctgccccctccagggagtactacaagctccaagcttcaagtgctgctccttacagatggggttggccgccgtgagaaaggatttcagatgcagtggtttgtttacggttgtggtggagagctgtctggggccacaggctccttcagcagccccgggttccccaacaggtatccaccaaacaaggagtgtatctggtacattaggacggaccccgggagtagcattcagctcaccatccatgacttcgatgtggagtatcattcaaggtgcaactttgatgtcttggagatctatggaggccccgatttccactctcccagaatagcccaactgtgtacccagagatcacctgagaaccccatgcaggtctccagcactggaaatgagctagcaattcgattcaagaccgacttgtccataaatgggagaggcttcaatgcgtcatggcaagcagtcactggaggttgtggtgggattttccaggctcccagtggagagattcattctccaaattaccccagtccttataggagcaacacagactgttcttgggtcattcgggttgacagaaatcatcgtgttctcttgaacttcactgactttgatcttgaaccacaagactcttgtattatggcatacgatggcttaagctccacaatgtcccgccttgccaggacgtgtggaagggagcagctggctaaccccatcgtctcctcaggaaacagcctcttcttgagatttcagtctggcccttccagacagaacagaggcttccgagctcaattcaggcaagcctgcggaggccacatcctcaccagctcatttgatactgtttcctctccacggttccctgccaattatccaaacaatcagaactgcagctggatcattcaagcgcaacctccattaaatcatatcaccctctcttttacccactttgaacttgaaagaagcacaacgtgtgcacgtgactttgtagaaattttggatggcggccacgaagacgcgcccctccgaggccgttactgtggcaccgacatgccccatcctatcacatccttcagcagcgccctgacgctgagattcgtctctgattctagcatcagtgctgggggtttccacaccacggtcaccgcatcagtgtcggcttgtggtggaacgttctacatggctgaaggcatcttcaacagccctggctacccagacatttatccccctaatgtggaatgtgtctggaacatcgtcagttcccctggcaaccggctccagctgtcttttatatctttccagttggaagactctcaggactgcagcagagattttgtggagatccgtgaaggaaatgccacgggtcacttggtgggacgatactgtggaaactccttccctctcaattattcttccatcgttggacataccctgtgggtcagatttatctcagatggttctggcagcggcacgggcttccaggccacatttatgaagatatttggcaatgataatattgtgggaactcatgggaaagtcgcctctcctttctggcctgaaaactacccacataactccaattaccaatggacagtaaatgtgaatgcatctcacgttgtccatggtagaatcttggagatggacatagaagaaatacaaaactgctattatgacaaattaaggatctatgatgggcctagcattcacgcccgcctaattggagcttactgtggtacccagactgaatctttcagctccactggaaattctttgacatttcatttttactccgactcttcaatctcagggaagggattccttctggagtggtttgcagtggatgcacctgatggtgttttacctaccattgctccaggtgcttgtggtggcttcctgaggacgggagatgcacccgtgtttctcttctccccgggctggcctgacagttacagtaatagagtggactgtacgtggctcatccaggctcccgactctaccgtggaactcaacattctttccctggacattgaatctcaccgaacgtgtgcctatgatagccttgtgatacgagatggagataataacttggcccagcagctagcagttctctgtggcagagagatccctgggcccatccggtctactggagagtacatgttcatccgcttcacctcggactccagtgtaaccagggcaggcttcaatgcatcctttcacaagagctgcggtggatatttgcatgcagacagagggatcatcacgtcccccaagtatccagagacttacccatccaacctcaactgttcttggcacgtcctggtccaaagtggcctgaccattgctgtccattttgaacagcctttccagattccaaatggagattcttcttgcaaccagggggattacttggtgctaagaaatggtcctgatatctgttctccacccttgggaccccctggaggaaatggtcatttttgtggcagtcatgcttcatcaactctgttcacctcggataatcaaatgtttgttcagtttatttctgatcacagtaatgaagggcaaggatttaaaatcaaatatgaggcaaagagtttagcctgtgggggcaacgtctacatccatgatgctgattctgctgggtatgtgacctcccccaaccaccctcataattatcccccgcacgctgattgcatttggatcttagcggctccaccggaaacacgcatacagctgcaatttgaagatcgattcgatattgaagtaacacccaactgtacttccaactaccttgagttgcgggatggagtggattcggatgcaccaatactttccaaattttgtgggacatctttgcccagcagtcagtggtcctcaggagaggttatgtatttgagatttcgatctgacaacagccccacacatgtgggattcaaggccaagtattctatagctcagtgtgggggaagagtaccagggcaaagtggtgttgttgaaagcattggacatccaacacttccatacagagacaacttattctgtgagtggcatctccaggggctctctggacactatctcaccatctcttttgaagactttaaccttcagaattcttctggctgtgaaaaagacttcgtggagatctgggacaatcatacctctggaaacatcttgggcagatactgtggaaacaccattcctgacagcatagacacttctagcaatactgctgtggtcaggtttgtcacagacggctctgtgactgcctcaggattcagactgcgatttgaatccagtatggaagagtgtggtggggatcttcagggctctattggaacatttacttctcccaactacccgaacccaaatcctcatggccggatctgcgagtggagaatcactgccccggagggaaggcggatcaccctaatgtttaacaacctgaggctggccacgcatccgtcctgcaacaatgagcatgtgatagtattcaatggcattagaagtaactcaccccagctagagaaactgtgtagtagtgtgaatgtaagcaatgagattaaatcttcaggaaacacaatgaaagtcatttttttcacggatggatccaggccatatggcggcttcactgcttcctatacctccagtgaagatgcagtgtgtggtgggtctcttccaaatactcctgaaggaaactttacttctcctggctatgacggagtcaggaattactcaagaaacctgaactgcgaatggactctcagcaatccaaatcagggaaattcatccatttccattcactttgaagatttttacctagaaagtcaccaagactgtcaatttgatgtcctcgagtttcgagtgggtgatgctgatgggcccctgatgtggagactttgtggtccttcaaagcctacattgccattggttataccttattctcaggtatggattcactttgtcaccaacgaacgtgtagaacacattggattccatgcaaagtattcctttacagattgtggcggaatacagataggtgacagtggagtgatcacaagccccaactatccaaatgcttatgacagcctgacccactgctcttcgctgttggaggccccacaagggcacaccatcactctcacatttagtgactttgatattgaaccccatacaacttgtgcttgggactctgtcactgtcaggaatggtgggtcccctgaatcacccatcataggacaatactgtggaaattcaaaccccaggacaatacagtcaggttccaatcagctggtcgtgacttttaactcagaccattcattgcaaggtggtggattttatgctacgtggaacacacaaactttaggttgtggtggaatatttcattctgataatggtacaatcagatcccctcactggcctcagaattttcccgaaaacagcagatgttcctggacggccattactcacaaaagtaaacacttggagatcagctttgacaacaacttcctaatccccagcggtgatggacaatgtcagaatagcttcgtgaaggtgtgggcaggaactgaggaggtggacaaagccctgctagccactggctgtgggaacgtggctccgggtcccgttatcacaccaagtaacacattcactgccgtcttccagtctcaggaggcaccagctcagggcttctccgcgtcctttgttagccgatgtggaagtaatttcactggcccttcaggttacatcatttctccaaattacccaaaacaatatgacaacaacatgaattgcacctatgtcatagaggctaatcctctgtcagtggtcctcttgacttttgtgtccttccacttagaagctcgttccgctgtgacgggaagctgtgtcaacgatggcgtgcacattatcagaggttacagcgtcatgtccaccccatttgctactgtgtgtggggatgagatgccagctcccctcaccatcgctgggccggttctgcttaacttctactccaacgagcaaatcacagacttcggattcaagttttcctataggataatctcctgtggtggtgtgttcaatttctcttctggaatcatcacaagtcctgcctattcatacgcagactacccaaatgatatgcactgtctgtataccatcaccgttagtgacgacaaggtgatcgagctcaagttcagtgattttgatgtggttccctccacctcctgctcccatgactacctggcaatttacgatggtgccaataccagcgatccccttcttggcaaattctgcggttccaagcgcccaccaaatgtgaagagcagcaataatagtatgctcctggtgttcaagacagattcatttcagacagcaaaaggctggaagatgtctttccggcagacattggggcctcagcaaggatgtggtggttatctgacaggctcgaataatacctttgcctctcctgattctgattcgaatggaatgtatgacaagaatttaaactgtgtatggatcataattgcacctgtaaacaaagtaattcacctcaccttcaatacatttgctctggaggcagcaagtactaggcaaagatgcctttatgattatgtaaagttatatgatggggatagtgaaaatgcgaacttggctggaacgttttgtggttccacagtacctgctccttttatctcttctggtaacttccttacggttcaattcatcagtgacttaacattagagagggaaggatttaatgctacatacaccatcatggacatgccttgtggtggaacatacaatgcaacttggaccccacaaaatatttcatcacccaattcatcagacccagatgtcccattttccatctgtacttgggtcattgattcccctccgcatcagcaggtcaagataactgtgtgggcattacagctgacctcgcaagactgcacgcagaattacttacagcttcaggactcaccgcagggtcacggaaattcaagatttcagttctgtggcagaaatgcttcggctgtgccagtgttttattcttctatgagtactgcaatggtcattttcaaatctggagttgtaaacagaaactctagaatgagtttcacctatcagattgcagattgcaacagagactatcacaaggcatttggcaacctgagaagccctggatggccagataactacgacaatgacaaggattgcaccgttactctcacagccccccagaaccacaccatttccctcttttttcattcacttggcatcgagaactcagttgaatgcagaaacgatttcttggaggtgagaaatggaagtaacagcaattcaccattactgggcaagtactgtggaactctgctgccaaaccctgtcttctctcaaaataatgaactatacctacgatttaagagtgatagtgtaacttctgatcgtggatatgaaatcatctggacttcatcaccctctggatgtggtggaactctttatggagacagaggctcattcaccagccccggctatccaggcacatacccaaacaacacgtactgcgagtgggtccttgttgctcctgctggaaggcttgtcaccatcaacttctacttcatcagcattgacgatccaggagactgtgtccagaactatctcacactctatgatgggcccaacgccagctctccatcctctggaccatactgcggaggcgacaccagcatagctcccttcgtggcttcctcaaatcaggtcttcataaaatttcatgctgattatgcacggcgtccatccgcattccgattaacttgggacagctaagtgggtaacaactcgtgttcactcagcactttccctctgcagcacgctggacagcactctgccatcctgatacatgacccctgctgatgccacagagaataagctgaacttgtatggtttttcaccaaaccatggatagaatcaatatttgtaggccaggcgtggtggctcacccccctgtattctcagcactttgggaggccgaggcaggttgatcacctgaggtcaggagtttgagactagcctggccagcatggtgaaacctcatctctctaacaatataataattagccaggcgtggtggtgggtgcctgtaattccagccactcgagaggctgaggcaggagaattgcttgaacccaggaggcagaggttgcagtgagctaagatcacaccactacactccagcctgggcgagacggcaagactccatctcaaaaaaaaaagaaacaaaaaaaaccagaatcaatatttgtacattttctcgaacatagaatatagcttctttagtcttgagtgtgcatttcattctaatattttgagctgaaatttaaaaaaactttgaaagagttggaaatgattatggcatatgtgacatacatttttaaaagttaataataatagccaggggcagtggctcatacccataatcccagcacgctgggaggccatgatgggaggattgcttgaacctaggagtttgagaccagcctgggcaacaaagtgagacctgatttttacaaaaaatcaaaaaattagccaggcatggtggcatgcacccgtggttccagctacacaggaggttgaagcaggaggatcacttgagcccagtaggttaaggctgcagtgaaaccctgtgaattaaccactgtactccagcctgggtgacagactgagaccctatctcaaaaatgacaacaagaacaacaaaagttaatgataatatagaagcataaatttcctgtgaatgttcaattacacataataaacattattgaattgtacacaatt

SEQ ID NO: 7077 - DNA, 958 bp, Homo sapiens
  source 1..958: mol_type = unassigned DNA
aattccaagctggtggatcttgagagaaaattccaaggcttgcagcagactgttgacaaaaaggtttgcagcagcaatccttgccagaatggtggaacctgcctcaatctgcatgattcctttttttgtatctgtcccccacagtggaagggtcctctctgctcagctgatgttaacgaatgtgagatttactcaggaacacccttgagctgccagaatggaggcacatgtgttaatacaatgggaagttacagaaatccttgctctaacatccccaaggaaccggaagaaggctcccgtgattggcacagagagtaagcatggcctggtgcaaaaggagctgaagacttaggaagagccggagcattgaaggggagccactgaatggccttaagtagaaaaggggacaccccaccacaccagtgtccccagctgtactctttccatgtattagcaagctcatagttttgggtaaagagagctttattcaatgctatgtcaaaatgtgaccataacgaggtcaaagattaaactgaggttcaatgaatgaagtaactctctctgaccacagtcatcattatcagtacagctctatcttctcttctgacttattctgtcaagtgacttgtccacagaattctcctgctcagctcaggcatcactttctgcaggaaactttcccttccctttttaagcagagtgaggcatctcagggcctctatgttcccatcatgctctagggatatccatcgtcaaagctttgctgatgccacacacattgtctttctaaaaacgaagtccaaaaaattaaggcagatcaatgccaaacttacttttgtacagttctttgaagtcaccttttaaactagacagtgtctttccttatagtttggctggtctcttttattttgtgatttttaaaagattaataaataaattctgctatagaatgaacaaa

SEQ ID NO: 7078 - DNA, 599 bp, Homo sapiens
  source 1..599: mol_type = unassigned DNA
agcactggaaatgagctagcaattcgattcaagaccgacttgtccataaatgggagaggcttcaatgcgtcatggcaagcagtcactggaggttgtggtgggattttccaggctcccagtggagagattcattctccaaattaccccagtccttataggagcaacacagactgttcttgggtcattcgggttgacagaaatcatcgtgttctcttgaacttcactgactttgatcttgaaccacaagactcttgtattatggtttaatcatacttggtcggacgtcagacagatggggtttgtatattggctctgcactgctaagcgtgtgattgggcaagtcatgtatgttttcagagctcagttttccctgctgcaaagtggaactgtaagaatcaaatgtaaacaaatgtatttaagtacctatcagtgtctggttcagataagtatttgctgctattcctaatttttctattacaatgactcctgcttctattactattaacgctatgttaaagatcttaaggaatcttttaaaaaaattttctccctgagcaagatgaaacttagtaaacaagataaaaaatccagtagaaaaa

SEQ ID NO: 7079 - DNA, 1841 bp, Homo sapiens
  source 1..1841: mol_type = unassigned DNA
agtagttgcaatgagtcacagctggaacgtcctgtggttaacattctgctctgattcgaatggaatgtatgacaagaatttaaactgtgtatggatcataattgcacctgtaaacaaagtaattcacctcaccttcaatacatttgctctggaggcagcaagtactaggcaaagatgcctttatgattatgtaaagttatatgatggggatagtgaaaatgcgaacttggctggaacgttttgtggttccacagtacctgctccttttatctcttctggtaacttccttacggttcaattcatcagtgacttaacattagagagggaaggatttaatgctacatacaccatcatggacatgccttgtggtggaacatacaatgcaacttggaccccacaaaatatttcatcacccaattcatcagacccagatgtcccattttccatctgtacttgggtcattgattcccctccgcatcagcaggtcaagataactgtgtgggcattacagctgacctcgcaagactgcacgcagaattacttacagcttcaggactcaccgcagggtcacggaaattcaagatttcagttctgtggcagaaatgcttcggctgtgccagtgttttattcttctatgagtactgcaatggtcattttcaaatctggagttgtaaacagaaactctagaatgagtttcacctatcagattgcagattgcaacagagactatcacaaggcatttggcaacctgagaagccctggatggccagataactacgacaatgacaaggattgcaccgttactctcacagccccccagaaccacaccatttccctcttttttcattcacttggcatcgagaactcagttgaatgcagaaacgatttcttggaggtgagaaatggaagtaacagcaattcaccattactgggcaagtactgtggaactctgctgccaaaccctgtcttctctcaaaataatgaactatacctacgatttaagagtgatagtgtaacttctgatcgtggatatgaaatcatctggacttcatcaccctctggatgtggtggaactctttatggagacagaggctcattcaccagccccggctatccaggcacatacccaaacaacacgtactgcgagtgggtccttgttgctcctgctggaaggcttgtcaccatcaacttctacttcatcagcattgacgatccaggagactgtgtccagaactatctcacactctatgatgggcccaacgccagctctccatcctctggaccatactgcggaggcgacaccagcatagctcccttcgtggcttcctcaaatcaggtcttcataaaatttcatgctgattatgcacggcgtccatccgcattccgattaacttgggacagctaagtgggtaacaactcgtgttcactcagcactttccctctgcagcacgctggacagcactctgccatcctgatacatgacccctgctgatgccacagagaataagctgaacttgtatggtttttcaccaaaccatggatagaatcaatatttgtaggccaggcgtggtggctcacccccctgtattctcagcactttgggaggccgaggcaggttgatcacctgaggtcaggagtttgagactagcctggccagcatggtgaaacctcatctctctaacaatataataattagccaggcgtggtggtgggtgcctgtaattccagccactcgagaggctgaggcaggagaattgcttgaacccaggaggcagaggttgcagtgagctaagatcacaccactacactccagcctgggcgagacggcaagactccatctc

SEQ ID NO: 7080 - DNA, 1191 bp, Homo sapiens
  source 1..1191: mol_type = unassigned DNA
gcccttctcaaacatggccgccacggcgcctctggaagggaaccgctctgggccccgcctttgatctcgttggtggggctgggggatgagagctgcaccgcgcgggacaagtcgccggcggcgcccgacggagcagaagagagagcatggagctggagaggatcgtcagtgcagccctccttgcctttgtccagacacacctcccggaggccgacctcagtggcttggatgaggtcatcttctcctatgtgcttggggtcctggaggacctgggcccctcgggcccatcagaggagaacttcgatatggaggctttcactgagatgatggaggcctatgtgcctggcttcgcccacatccccaggggcacaataggggacatgatgcagaagctctcagggcagctgagcgatgccaggaacaaagagaacctgcaaccgcagagctctggtgtccaaggtcaggtgcccatctccccagagcccctgcagcggcccgaaatgctcaaagaagagactaggtcttcggctgctgctgctgcagacacccaagatgaggcaactggcgctgaggaggagcttctgccaggggtggatgtactcctggaggtgttccctacctgttcggtggagcaggcccagtgggtgctggccaaagctcggggggacttggaagaagctgtgcagatgctggtagagggaaaggaagaggggcctgcagcctgggagggccccaaccaggacctgcccagacgcctcagaggcccccaaaaggatgagctgaagtccttcatcctgcagaagtacatgatggtggatagcgcagaggatcagaagattcaccggcccatggctcccaaggaggcccccaagaagctgatccgatacatcgacaaccaggtagtgagcaccaaaggggagcgattcaaagatgtgcggaaccctgaggccgaggagatgaaggccacatacatcaacctcaagccagccagaaagtaccgcttccattgaggcactcgccggactctgcccgagccttctaggctcagatcccagagggatgcaggagccctatacccctacacaggggccccctaactcctgtcccccttctctactcctttgctccatagtgttaacctactctcggagctgcctccatgggcacagtaaaggtggcccaaggaaggtg

SEQ ID NO: 7081 - DNA, 1496 bp, Homo sapiens
  source 1..1496: mol_type = unassigned DNA
gcggggacatggccgcggcgccgggagggtcagcgcagcccgctggccccggcccgcgcctgggtttcagcaccgcggacagcggcgtcggcatgagcgggctaaaccccggtcccgccgtacccatgaaggaccacgacgccatcaagctcttcgtggggcagatcccgcggggcttggacgagcaggacctcaagccgctgttcgaggagttcggccgcatctacgagctgacggtgctgaaggaccggctcaccggcctccacaaaggctgtgccttcctcacctactgcgcccgggactctgctctcaaggcccagagtgcactgcacgagcagaagaccctgccagggatgaatcgtccgatccaagtgaagccagctgccagtgagggccgaggagaggaccgaaagctgtttgtggggatgctgggcaagcagcagggtgaggaggacgtcagacgcctgttccagccctttggccacatcgaggagtgcacggtcctgcggagtcctgacggcaccagtaaaggctgtgcctttgtgaagttcgggagtcaaggggaagctcaggcggccatccggggtctgcacggcagccggaccatggcgggcgcctcgtccagcctcgtggtcaagctggcggacaccgaccgggagcgcgcgctgcggcggatgcagcagatggccggccacctgggcgccttccaccccgcgccactgccgctaggggcctgcggcgcctacaccacggcgatcctgcagcaccaggcggccctgctggcggcggcacagggcccaggcctaggcccggtggcggcagtggcggcccagatgcaacacgtggcggcctttagcctggtagctgcgcctctgttgcccgcggcagcagccaactccccgcctggcagcggccctggcaccctcccaggtcttccggcgcccatcggggtcaatggattcggccctctgaccccccagaccaatggccagccgggctccgacacgctctacaataacgggctctccccttatccagcccagagccccggcgtggctgaccccctgcagcaggcctacgctgggatgcaccactacgcaggccccgaaggctgtaacctcttcatctatcacctgcctcaggagtttggtgatgcggaactcatacagacattcctgccctttggagccgttgtctctgctaaagtctttgtggatcgagccaccaaccagagcaagtgttttgggtttgttagttttgacaatccaactagtgcccagactgctattcaggcgatgaatggctttcaaattggcatgaagaggctcaaggtccagctaaagcggcccaaggatgccaaccggccttactgacctgctttcactgaccagccacagaaagaaacagaagagtgagaagaaaggagaggaaaagcacagaaacgcttgagcagcccttcccgaaggagcagctgcggacggaggtggatcggaccc

SEQ ID NO: 7082 - DNA, 3246 bp, Homo sapiens
  source 1..3246: mol_type = unassigned DNA
tggaggggggaggtttttgttgaggagagcgcggccggagagcagagctccgggacccaggtgaccgggaaagcaggcagccccagcggcgggagcagccggcagcagcccaggcccggggactggggtgggggtgggaggggggctgaggggaggacctgaaggggggcggcagggcaaaagggacccctggagccctgccgccatcagagatcaagcatctggcatcagggatcttcggacccagcagaaggatccgccacaggggaggtgtcctcccagggaagccaacgagagattcacctgccccacatcaggagtgggccccccttactgacgctgctggcaaccatagcaggccccttaacccctcagtctcctccccatcaccctcctcaggccctttccccgcctccagctctcatctcaactcccagttcccagccctctaagccctagcacccccggctaccacctaaccctccaggtcttggccatactcacccccatcctgggacatttgccagatctctgggagggagatcgtttgtttaggcgatgccccctggtggcatgacagcgtctgcctagacccctgacccctagcactcaactccctgggcctcctttgtgtgaagagccgcccctctgcttagcagcgtggttgggggccaaagggaaagccagccccagctgggcccccgggccccaccacttatctccttgctgggcagctccccttggcctttgggcctctccctgctcccctcggcccctcctcctgggccgcctcaatgaaggagccggatgccatcaagctgtttgtggggcagatcccgaggcatctggaggagaaggacctgaagcccatcttcgaacagtttggtcggatctttgagctgactgtcatcaaggacaagtacaccgggctgcacaagggatgtgccttcctgacatactgtgcccgggattcagccctgaaggcccagagcgccctgcacgaacagaagacgcttccagggatgaacaggccgatccaggtcaagccagccgacagcgagagccgaggagaagaccggaagctctttgtggggatgctagggaagcagcagacagatgaggacgtccggaagatgtttgagcccttcgggaccatcgacgagtgcactgtgctccgggggccagatggcaccagcaaaggctgcgccttcgtgaagttccagacccacgctgaggcccaggcggccatcaacacccttcacagcagccggaccctgccaggtgcctcgtccagcctggtggtgaagtttgctgacactgagaaggagcgaggtctccgccgcatgcagcaggtggccacccagttgggcatgttcagccccatcgccctccagtttggagcctacagcgcctacacccaggccctgatgcagcagcaggcggccctggtagcggctcacagtgcctacctcagccccatggccaccatggctgccgtgcagatgcagcacatggctgccatcaatgccaatggcctcatcgccacccccatcaccccatcctcaggaaccagcacccctcctgccatcgctgccacgcctgtctctgccattccggctgccctgggcgtcaacggctacagcccggtgcccacccagcccactgggcagcctgcccctgatgctctgtatcccaacggggttcacccctacccagcccagagccccgcggcccccgtggaccccctgcagcaggcctacgcggggatgcagcactacacagcagcctacccagcagcctacagcctggttgcacctgcgttcccgcagcctccagccctggtcgcccagcagcccccaccaccacctcaacagcagcagcagcagcagcagcagcaacagcagcagcagcaaagagaaggccctgatggctgcaacatcttcatctaccacctgccccaggagttcactgactcagagatcctccagatgtttgtcccctttggccacgtcatctcagccaaagtctttgttgaccgagccaccaatcaaagcaaatgttttggctttgtgagtttcgacaatccggccagtgcccaggctgccatccaggccatgaatggcttccagatcggcatgaagcgcctcaaagtccagctaaagcggcctaaggatgccaaccggccctactgagggcccccaggtctggagatcccagaggaaggggcgcctcacaccctcttcccacgactggccccggccctctccgcacacctgccctgggccttgactgggttctggggcaaacgctgcttcgtggcccccgggggcacaagacaccggcccctcccacccccctgcctctctgaagggccatggctatgcttccctggctccaagggcccatttcctcctagatgcccttttggcctttgtgagggagcgaggaacaggctcgaaggctccggggtatctgccttctgctgggctcctgtgacaggccttctgtacccagcgtttgtacttgcctcccccaacagtgggcctgttctacccgtgcaggccccaggagagccgcaggggcctgccacacactcccagctcaccctcaccccagcctcttccccacattaggggtttcttggaagctggctctcactcccctccaccctcagctagaggtaggatatccctgattcctgggctcccagccttaaaactcactgcctcccccaagggccccctctaaggagggtgtgggggagccctgagggctgcctctctgccagtcagccacagagaccctcctcctttcacgaggaaaagaccttcccctgaacccctaaaaatgtttacagtctctgctggttccctctgtgtaaataccactaccacccgtgcgttatccagcccgcccggcctggcccggacgctgccatctctctttctgggagtttagacaatgttgcccttggatttttttctctctcttaatttctccctttgctttggggggtaattgggtattgggaggaggggtgtggggaggggtcaaggggtttattacctgatcattttctttaggaagaggttttagggaaaagaaaatggggtgggggtgggggtggtaaggggagaccggggagtcagtttcagacagttctctatgcttaacttatttatttattgcattttacttttaaagagttggtcttttctgtctaaataaagaaaaaagtttaaaagc

SEQ ID NO: 7083 - DNA, 2335 bp, Homo sapiens
  source 1..2335: mol_type = unassigned DNA
ctcccctcggcccctcctcctgggccgcctcaatgaaggagccggatgccatcaagctgtttgtggggcagatcccgaggcatctggaggagaaggacctgaagcccatcttcgaacagtttggtcggatctttgagctgactgtcatcaaggacaagtacaccgggctgcacaagggatgtgccttcctgacatactgtgcccgggattcagccctgaaggcccagagcgccctgcacgaacagaagacgcttccagggatgaacaggccgatccaggtcaagccagccgacagcgagagccgaggagaagaccggaagctctttgtggggatgctagggaagcagcagacagatgaggacgtccggaagatgtttgagcccttcgggaccatcgacgagtgcactgtgctccgggggccagatggcaccagcaaaggctgcgccttcgtgaagttccagacccacgctgaggcccaggcggccatcaacacccttcacagcagccggaccctgccaggtgcctcgtccagcctggtggtgaagtttgctgacactgagaaggagcgaggtctccgccgcatgcagcaggtggccacccagttgggcatgttcagccccatcgccctccagtttggagcctacagcgcctacacccaggccctgatgcagcagcaggcggccctggtagcggctcacagtgcctacctcagccccatggccaccatggctgccgtgcagatgcagcacatggctgccatcaatgccaatggcctcatcgccacccccatcaccccatcctcagcccagagccccgcggcccccgtggaccccctgcagcaggcctacgcggggatgcagcactacacagcagcctacccagcagcctacagcctggttgcacctgcgttcccgcagcctccagccctggtcgcccagcagcccccaccaccacctcaacagcagcagcagcagcagcagcagcaacagcagcagcagcaaagagaaggccctgatggctgcaacatcttcatctaccacctgccccaggagttcactgactcagagatcctccagatgtttgtcccctttggccacgtcatctcagccaaagtctttgttgaccgagccaccaatcaaagcaaatgttttggctttgtgagtttcgacaatccggccagtgcccaggctgccatccaggccatgaatggcttccagatcggcatgaagcgcctcaaagtccagctaaagcggcctaaggatgccaaccggccctactgagggcccccaggtctggagatcccagaggaaggggcgcctcacaccctcttcccacgactggccccggccctctccgcacacctgccctgggccttgactgggttctggggcaaacgctgcttcgtggcccccgggggcacaagacaccggcccctcccacccccctgcctctctgaagggccatggctatgcttccctggctccaagggcccatttcctcctagatgcccttttggcctttgtgagggagcgaggaacaggctcgaaggctccggggtatctgccttctgctgggctcctgtgacaggccttctgtacccagcgtttgtacttgcctcccccaacagtgggcctgttctacccgtgcaggccccaggagagccgcaggggcctgccacacactcccagctcaccctcaccccagcctcttccccacattaggggtttcttggaagctggctctcactcccctccaccctcagctagaggtaggatatccctgattcctgggctcccagccttaaaactcactgcctcccccaagggccccctctaaggagggtgtgggggagccctgagggctgcctctctgccagtcagccacagagaccctcctcctttcacgaggaaaagaccttcccctgaacccctaaaaatgtttacagtctctgctggttccctctgtgtaaataccactaccacccgtgcgttatccagcccgcccggcctggcccggacgctgccatctctctttctgggagtttagacaatgttgcccttggatttttttctctctcttaatttctccctttgctttggggggtaattgggtattgggaggaggggtgtggggaggggtcaaggggtttattacctgatcattttctttaggaagaggttttagggaaaagaaaatggggtgggggtgggggtggtaaggggagaccggggagtcagtttcagacagttctctatgcttaacttatttatttattgcattttacttttaaagagttggtcttttctgtctaaataaagaaaaaagtttaaaagca

SEQ ID NO: 7084 - DNA, 1694 bp, Homo sapiens
  source 1..1694: mol_type = unassigned DNA
tggaggggggaggtttttgttgaggagagcgcggccggagagcagagctccgggacccaggtgaccgggaaagcaggcagccccagcggcgggagcagccggcagcagcccaggcccggggactggggtgggggtgggaggggggctgaggggaggacctgaaggggggcggcagggcaaaagggacccctggagccctgccgccatcagagatcaagcatctggcatcagggatcttcggacccagcagaaggatccgccacaggggaggtgtcctcccagggaagccaacgagagattcacctgccccacatcaggagtgggccccccttactgacgctgctggcaaccatagcaggccccttaacccctcagtctcctccccatcaccctcctcaggccctttccccgcctccagctctcatctcaactcccagttcccagccctctaagccctagcacccccggctaccacctaaccctccaggtcttggccatactcacccccatcctgggacatttgccagatctctgggagggagatcgtttgtttaggcgatgccccctggtggcatgacagcgtctgcctagacccctgacccctagcactcaactccctgggcctcctttgtgtgaagagccgcccctctgcttagcagcgtggttgggggccaaagggaaagccagccccagctgggcccccgggccccaccacttatctccttgctgggcagctccccttggcctttgggcctctccctgctcccctcggcccctcctcctgggccgcctcaatgaaggagccggatgccatcaagctgtttgtggggcagatcccgaggcatctggaggagaaggacctgaagcccatcttcgaacagtttggtcggatctttgagctgactgtcatcaaggacaagtacaccgggctgcacaagggatgtgccttcctgacatactgtgcccgggattcagccctgaaggcccagagcgccctgcacgaacagaagacgcttccagggatgaacaggccgatccaggtcaagccagccgacagcgagagccgaggagaccggaagctctttgtggggatgctagggaagcagcagacagatgaggacgtccggaagatgtttgagcccttcgggaccatcgacgagtgcactgtgctccgggggccagatggcaccagcaaaggctgcgccttcgtgaagttccagacccacgctgaggcccaggcggccatcaacacccttcacagcagccggaccctgccaggtgcctcgtccagcctggtggtgaagtttgctgacactgagaaggagcgaggtctccgccgcatgcagcaggtggccacccagttgggcatgttcagccccatcgccctccagtttggagcctacagcgcctacacccaggccctgatgcagcagcaggcggccctggtagcggctcacagtgcctacctcagccccatggccaccatggctgccgtgcagatgcagcacatggctgccatcaatgccaatggcctcatcgccacccccatcaccccatcctcagccaaaggccatggctatgcttccctggctccaagggcccatttcctcctagatgcccttttggcctttgtgagggagcgaggaacaggctcgaaggctccggggtatctgccttctgctgggctcctgtga

SEQ ID NO: 7085 - DNA, 1330 bp, Homo sapiens
  source 1..1330: mol_type = unassigned DNA
agtttgctgacactgagaaggagcgaggtctccgccgcatgcagcaggtggccacccagttgggcatgttcagccccatcgccctccagtttggagcctacagcgcctacacccaggccctgatgcagcagcaggcggccctggtagcggctcacagtgcctacctcagccccatggccaccatggctgccgtgcagatgcagcacatggctgccatcaatgccaatggcctcatcgccacccccatcaccccatcctcaggaaccagcacccctcctgccatcgctgccacgcctgtctctgccattccggctgccctgggcgtcaacggctacagcccggtgcccacccagcccactgggcagcctgcccctgatgctctgtatcccaacggggttcacccctacccagcagcctacccagcagcctacagcctggttgcacctgcgttcccgcagcctccagccctggtcgcccagcagcccccaccaccacctcaacagcagcagcagcagcagcagcagcaacagcagcagcagcaaagagaaggccctgatggctgcaacatcttcatctaccacctgccccaggagttcactgactcagagatcctccagatgtttgtcccctttggccacgtcatctcagccaaagtctttgttgaccgagccaccaatcaaagcaaatgttttggctttgtgagtttcgacaatccggccagtgcccaggctgccatccaggccatgaatggcttccagatcggcatgaagcgcctcaaagtccagctaaagcggcctaaggatgccaaccggccctactgagggcccccaggtctggagatcccagaggaaggggcgcctcacaccctcttcccacgactggccccggccctctccgcacacctgccctgggccttgactgggttctggggcaaacgctgcttcgtggcccccgggggcacaagacaccggcccctcccacccccctgcctctctgaagggccatggctatgcttccctggctccaagggcccatttcctcctagatgcccttttggcctttgtgagggagcgaggaacaggctcgaaggctccggggtatctgccttctgctgggctcctgtgacaggccttctgtacccagcgtttgtacttgcctcccccaacagtgggcctgttctacccgtgcaggccccaggagagccgcaggggcctgccacacactcccagctcaccctcaccccagcctcttccccacattaggggtttcttggaagctggctctcactcccctccaccctcagctagaggtaggatatccctgattcctg

SEQ ID NO: 7086 - DNA, 2444 bp, Homo sapiens
  source 1..2444: mol_type = unassigned DNA
ttgttgaggagagcgcggccggagagcagagctccgggacccagatcccgaggcatctggaggagaaggacctgaagcccatcttcgaacagtttggtcggatctttgagctgactgtcatcaaggacaagtacaccgggctgcacaagggatgtgccttcctgacatactgtgcccgggattcagccctgaaggcccagagcgccctgcacgaacagaagacgcttccagggatgaacaggccgatccaggtcaagccagccgacagcgagagccgaggagaccggaagctctttgtggggatgctagggaagcagcagacagatgaggacgtccggaagatgtttgagcccttcgggaccatcgacgagtgcactgtgctccgggggccagatggcaccagcaaaggctgcgccttcgtgaagttccagacccacgctgaggcccaggcggccatcaacacccttcacagcagccggaccctgccaggtgcctcgtccagcctggtggtgaagtttgctgacactgagaaggagcgaggtctccgccgcatgcagcaggtggccacccagttgggcatgttcagccccatcgccctccagtttggagcctacagcgcctacacccaggccctgatgcagcagcaggcggccctggtagcggctcacagtgcctacctcagccccatggccaccatggctgccgtgcagatgcagcacatggctgccatcaatgccaatggcctcatcgccacccccatcaccccatcctcaggaaccagcacccctcctgccatcgctgccacgcctgtctctgccattccggctgccctgggcgtcaacggctacagcccggtgcccacccagcccactgggcagcctgcccctgatgctctgtatcccaacggggttcacccctacccagcccagagccccgcggcccccgtggaccccctgcagcaggcctacgcggggatgcagcactacacagcagcctacccagcagcctacagcctggttgcacctgcgttcccgcagcctccagccctggtcgcccagcagcccccaccaccacctcaacagcagcagcagcagcagcagcagcaacagcagcagcagcaaagagaaggccctgatggctgcaacatcttcatctaccacctgccccaggagttcactgactcagagatcctccagatgtttgtcccctttggccacgtcatctcagccaaagtctttgttgaccgagccaccaatcaaagcaaatgttttggctttgtgagtttcgacaatccggccagtgcccaggctgccatccaggccatgaatggcttccagatcggcatgaagcgcctcaaagtccagctaaagcggcctaaggatgccaaccggccctactgagggcccccaggtctggagatcccagaggaaggggcgcctcacaccctcttcccacgactggccccggccctctccgcacacctgccctgggccttgactgggttctggggcaaacgctgcttcgtggcccccgggggcacaagacaccggcccctcccacccccctgcctctctgaagggccatggctatgcttccctggctccaagggcccatttcctcctagatgcccttttggcctttgtgagggagcgaggaacaggctcgaaggctccggggtatctgccttctgctgggctcctgtgacaggccttctgtacccagcgtttgtacttgcctcccccaacagtgggcctgttctacccgtgcaggccccaggagagccgcaggggcctgccacacactcccagctcaccctcaccccagcctcttccccacattaggggtttcttggaagctggctctcactcccctccaccctcagctagaggtaggatatccctgattcctgggctcccagccttaaaactcactgcctcccccaagggccccctctaaggagggtgtgggggagccctgagggctgcctctctgccagtcagccacagagaccctcctcctttcacgaggaaaagaccttcccctgaacccctaaaaatgtttacagtctctgctggttccctctgtgtaaataccactaccacccgtgcgttatccagcccgcccggcctggcccggacgctgccatctctctttctgggagtttagacaatgttgcccttggatttttttctctctcttaatttctccctttgctttggggggtaattgggtattgggaggaggggtgtggggaggggtcaaggggtttattacctgatcattttctttaggaagaggttttagggaaaagaaaatggggtgggggtgggggtggtaaggggagaccggggagtcagtttcagacagttctctatgcttaacttatttatttattgcattttacttttaaagagttggtcttttctgtctaaataaagaaaaaa

SEQ ID NO: 7087 - DNA, 3938 bp, Homo sapiens
  source 1..3938: mol_type = unassigned DNA
gtccagcctgtttaaacggaaaggacagagatcctgtctgttcaatgtaaaaaaaaaaaaaaaaaaaaaaaaaagaaaaaaagaaaaaaaaaatcagatcagaccgagagagagaggagagagggagagagagagggagagagagagggagagagagaggagagggagggagggagagagagaggggggagagcagagagagagcgcgagcgcgagcgagcgagagaagaggagaaagagagagagcagagagcgagcggagagcgaggtgtagagaaaccgagggggagagaacccgagtgtgtgtatgcgtgtgcgtgtgtgagcgcgagcgagcgagagagaggagcgagagagtgtgagcgagaaagaataaaaggaaagaagattttctctatgtatataaagatggccacgttagcaaacggacaggctgacaacgcaagcctcagtaccaacgggctcggcagcagcccgggcagtgccgggcacatgaacggattaagccacagcccggggaacccgtcgaccattcccatgaaggaccacgatgccatcaagctgttcattgggcagatcccccgcaacctggatgagaaggacctcaagcccctcttcgaggagtttggcaaaatctacgagcttacggttctgaaggacaggttcacaggcatgcacaaaggctgcgccttcctcacctactgcgagcgtgagtcagcgctgaaggcccagagcgcgctgcacgagcagaagactctgcccgggatgaaccggccgatccaggtgaagcctgcggacagcgagagccgaggagaagatagaaaactcttcgtgggcatgctcaacaagcaacagtccgaggacgacgtgcgccgccttttcgaggcctttgggaacatcgaggagtgcaccatcctgcgcgggcccgacggcaacagcaaggggtgcgcctttgtgaagtactcctcccacgccgaggcgcaggccgccatcaacgcgctacacggcagccagaccatgccgggagcctcgtccagtctggtggtcaagttcgccgacaccgacaaggagcgcacgatgcggcgaatgcagcagatggctggccagatgggcatgttcaaccccatggccatccctttcggggcctacggcgcctacgctcaggcactgatgcagcagcaagcggccctgatggcatcagtcgcgcagggcggctacctgaaccccatggctgccttcgctgccgcccagatgcagcagatggcggccctcaacatgaatggcctggcggccgcacctatgaccccaacctcaggtggcagcacccctccgggcatcactgcaccagccgtgcctagcatcccatcccccattggggtgaatggcttcaccggcctccccccacaggccaatgggcaacctgctgcggaagctgtgttcgccaatggcatccacccctacccagcacagagccccaccgccgcggaccccctgcagcaggcctacgccggagtgcagcagtatgcaggtccagctgcctaccctgctgcctatggtcagataagccaggcctttcctcagccgcctccaatgatcccccagcagcagagagaaggcttcgtgagcttcgacaacccggccagcgcgcagaccgccatccaggccatgaacggcttccagatcggcatgaagaggctcaaggtgcagctgaagcggcccaaagacgccaatcgcccgtactgagcgccggcgggagcgtcccccgggggagaccaggactcgcacagggcaggatgctgaacgggctacattaaaaaacaaacctctctctatatatatttataaatgagaactgttggatgacacctttgacatatcagccaatatcaatcaagctgaagactccagacactgtctgtgtgactgtaacatttcttcaaggaaagtatagcgtctatggagttcagagggcacgtgtttgggggaaaatatatatgacatgaagaagaagatgaagaaaaatgagaaaaaaacacacaaaaggcaactttaaaacaaaatatcacgagcagacggggaggctgaagggctgggagctgggaggagacgctgcttaccgatcccggggcttttccagcccacgggcgcctgacgcaggctggggcaagtggtgcgtggggcctggtccccaaggggcggctgagaggccgccactgagcatctctatctgtcattcctttagctatttagggaccaaaggaccaaactttttattgcagatgtgtagctctatgtcaaatagagggggaatggaggaccccctccttcctgcctcatggctgttcttgaaacagcttagagcgattctatgaaaaaatgtaataaaaaattaaaaaaaaaacaaaaaacaaaaaaaacaacaaaaaaaggaaaaataacgcttcaatgcttttaaaacagcaagataatagttctttgatactttgagaggcgctttgatgaccctcatccaagtctatgacactttcctatggttttctgtattctatgtctggatggagctgttaaaagatgaacaaattggtggatatttggggaaagcaacacaaatcttaaaactcacccgtgaagtgtgagaaaacaaggaggggaacaaatgggacttaccaagcaaggtcattgttgtgaaaagtctgtaaatgcttctaactcttccccctcttaaaatcataatagttgtacagaattttaaaaaggaaaagtttaaaatacctatataatagaagaaaaattagaggaaagcaaaaaataaaaaaaaaaaataaaaaaggaaaaaaaaaacctatagaagttagcattactgctaaaatcccagatgttgtaggactgtacttttgtagagtttagacagagcatcaatcccttctccccgcgagtgcagtcggatgccgttgtccccaagggccaggccgaactcgccccacacctgcgggcgcctggctgccgacgccggtggaggccacgccgtcggtcgggaacggtcgcgtcgcccgggtcgccgccgccgccgccgccgtcatcctcgcctctcgcttccctctgggagctgcgcgcgcttcactcaccttccgcttcactcgccttccacgcttgctccagagactttccgggcaagggagaactgggaactttcatcttaaaacaactagacaacacacacacacacaaaaccttaaaaaagagagagaaaaataaacaatctttgaagaatttctgaaactgtttacaaggaattttgaaaaacagggatgtttaaatgatgccggctctgtttttctgtaaataaatttgcatattttgtaggacttttaattgtaatgatagagaaaaaaacaaggaaaactatttaatgaaagcacgatatttatctttggtaaatgactttagagcagttaaagacattgcttaaaaaactcagaatcagaaaaaacactgaattatttaagaacacatatattttaaagtataacatatttattataatttatttgcacccttgggaagattgctttggcattctgccttgattccttctcattgatgtccaggtcatctggaggccgggggttctcagacctaccagtttccctttagaagaacaaatttccagttcctctagggcctcctgcctttcctttctttctgtcaattttgttgttgttgttgtttttcattttctttttttctcttgactcctccttttaggatgtccagatgtaaaaaaaaaaaaaaaaaaaagaaaaaaagaaaaaaaaaagaaaacagctgcagttcagtacaactgctcttttcacactcaactccctaaaactccttgtaaccttctgtaactattggatgacgctttctccagcttagccctaaataaagcacagttt

SEQ ID NO: 7088 - DNA, 4016 bp, Homo sapiens
  source 1..4016: mol_type = unassigned DNA
gtccagcctgtttaaacggaaaggacagagatcctgtctgttcaatgtaaaaaaaaaaaaaaaaaaaaaaaaaagaaaaaaagaaaaaaaaaatcagatcagaccgagagagagaggagagagggagagagagagggagagagagagggagagagagaggagagggagggagggagagagagaggggggagagcagagagagagcgcgagcgcgagcgagcgagagaagaggagaaagagagagagcagagagcgagcggagagcgaggtgtagagaaaccgagggggagagaacccgagtgtgtgtatgcgtgtgcgtgtgtgagcgcgagcgagcgagagagaggagcgagagagtgtgagcgagaaagaataaaaggaaagaagattttctctatgtatataaagatggccacgttagcaaacggacaggctgacaacgcaagcctcagtaccaacgggctcggcagcagcccgggcagtgccgggcacatgaacggattaagccacagcccggggaacccgtcgaccattcccatgaaggaccacgatgccatcaagctgttcattgggcagatcccccgcaacctggatgagaaggacctcaagcccctcttcgaggagtttggcaaaatctacgagcttacggttctgaaggacaggttcacaggcatgcacaaaggctgcgccttcctcacctactgcgagcgtgagtcagcgctgaaggcccagagcgcgctgcacgagcagaagactctgcccgggatgaaccggccgatccaggtgaagcctgcggacagcgagagccgaaagatagaaaactcttcgtgggcatgctcaacaagcaacagtccgaggacgacgtgcgccgccttttcgaggcctttgggaacatcgaggagtgcaccatcctgcgcgggcccgacggcaacagcaaggggtgcgcctttgtgaagtactcctcccacgccgaggcgcaggccgccatcaacgcgctacacggcagccagaccatgccgggagcctcgtccagtctggtggtcaagttcgccgacaccgacaaggagcgcacgatgcggcgaatgcagcagatggctggccagatgggcatgttcaaccccatggccatccctttcggggcctacggcgcctacgctcaggcactgatgcagcagcaagcggccctgatggcatcagtcgcgcagggcggctacctgaaccccatggctgccttcgctgccgcccagatgcagcagatggcggccctcaacatgtggcctggcggccgcacctatgaccccaacctcaggtggcagcacccctccgggcatcactgcaccagccgtgcctagcatcccatcccccattggggtgaatggcttcaccggcctccccccacaggccaatgggcaacctgctgcggaagctgtgttcgccaatggcatccacccctacccagcacagagccccaccgccgcggaccccctgcagcaggcctacgccggagtgcagcagtatgcaggtccagctgcctaccctgctgcctatggtcagataagccaggcctttcctcagccgcctccaatgatcccccagcagcagagagaagggcccgagggctgtaacctgttcatctaccatctgccccaggagtttggggacgctgagctgatgcagatgttcctccctttcggcttcgtgagcttcgacaacccggccagcgcgcagaccgccatccaggccatgaacggcttccagatcggcatgaagaggctcaaggtgcagctgaagcggcccaaagacgccaatcgcccgtactgagcgccggcgggagcgtcccccgggggagaccaggactcgcacagggcaggatgctgaacgggctacattaaaaaacaaacctctctctatatatatttataaatgagaactgttggatgacacctttgacatatcagccaatatcaatcaagctgaagactccagacactgtctgtgtgactgtaacatttcttcaaggaaagtatagcgtctatggagttcagagggcacgtgtttgggggaaaatatatatgacatgaagaagaagatgaagaaaaatgagaaaaaaacacacaaaaggcaactttaaaacaaaatatcacgagcagacggggaggctgaagggctgggagctgggaggagacgctgcttaccgatcccggggcttttccagcccacgggcgcctgacgcaggctggggcaagtggtgcgtggggcctggtccccaaggggcggctgagaggccgccactgagcatctctatctgtcattcctttagctatttagggaccaaaggaccaaactttttattgcagatgtgtagctctatgtcaaatagagggggaatggaggaccccctccttcctgcctcatggctgttcttgaaacagcttagagcgattctatgaaaaaatgtaataaaaaattaaaaaaaaaacaaaaaacaaaaaaaacaacaaaaaaaggaaaaataacgcttcaatgcttttaaaacagcaagataatagttctttgatactttgagaggcgctttgatgaccctcatccaagtctatgacactttcctatggttttctgtattctatgtctggatggagctgttaaaagatgaacaaattggtggatatttggggaaagcaacacaaatcttaaaactcacccgtgaagtgtgagaaaacaaggaggggaacaaatgggacttaccaagcaaggtcattgttgtgaaaagtctgtaaatgcttctaactcttccccctcttaaaatcataatagttgtacagaattttaaaaaggaaaagtttaaaatacctatataatagaagaaaaattagaggaaagcaaaaaataaaaaaaaaaaataaaaaaggaaaaaaaaaacctatagaagttagcattactgctaaaatcccagatgttgtaggactgtacttttgtagagtttagacagagcatcaatcccttctccccgcgagtgcagtcggatgccgttgtccccaagggccaggccgaactcgccccacacctgcgggcgcctggctgccgacgccggtggaggccacgccgtcggtcgggaacggtcgcgtcgcccgggtcgccgccgccgccgccgccgtcatcctcgcctctcgcttccctctgggagctgcgcgcgcttcactcaccttccgcttcactcgccttccacgcttgctccagagactttccgggcaagggagaactgggaactttcatcttaaaacaactagacaacacacacacacacaaaaccttaaaaaagagagagaaaaataaacaatctttgaagaatttctgaaactgtttacaaggaattttgaaaaacagggatgtttaaatgatgccggctctgtttttctgtaaataaatttgcatattttgtaggacttttaattgtaatgatagagaaaaaaacaaggaaaactatttaatgaaagcacgatatttatctttggtaaatgactttagagcagttaaagacattgcttaaaaaactcagaatcagaaaaaacactgaattatttaagaacacatatattttaaagtataacatatttattataatttatttgcacccttgggaagattgctttggcattctgccttgattccttctcattgatgtccaggtcatctggaggccgggggttctcagacctaccagtttccctttagaagaacaaatttccagttcctctagggcctcctgcctttcctttctttctgtcaattttgttgttgttgttgtttttcattttctttttttctcttgactcctccttttaggatgtccagatgtaaaaaaaaaaaaaaaaaaaagaaaaaaagaaaaaaaaaagaaaacagctgcagttcagtacaactgctcttttcacactcaactccctaaaactccttgtaaccttctgtaactattggatgacgctttctccagcttagccctaaataaagcacagttt

SEQ ID NO: 7089 - DNA, 4052 bp, Homo sapiens
  source 1..4052: mol_type = unassigned DNA
gtccagcctgtttaaacggaaaggacagagatcctgtctgttcaatgtaaaaaaaaaaaaaaaaaaaaaaaaaagaaaaaaagaaaaaaaaaatcagatcagaccgagagagagaggagagagggagagagagagggagagagagagggagagagagaggagagggagggagggagagagagaggggggagagcagagagagagcgcgagcgcgagcgagcgagagaagaggagaaagagagagagcagagagcgagcggagagcgaggtgtagagaaaccgagggggagagaacccgagtgtgtgtatgcgtgtgcgtgtgtgagcgcgagcgagcgagagagaggagcgagagagtgtgagcgagaaagaataaaaggaaagaagattttctctatgtatataaagatggccacgttagcaaacggacaggctgacaacgcaagcctcagtaccaacgggctcggcagcagcccgggcagtgccgggcacatgaacggattaagccacagcccggggaacccgtcgaccattcccatgaaggaccacgatgccatcaagctgttcattgggcagatcccccgcaacctggatgagaaggacctcaagcccctcttcgaggagtttggcaaaatctacgagcttacggttctgaaggacaggttcacaggcatgcacaaaggctgcgccttcctcacctactgcgagcgtgagtcagcgctgaaggcccagagcgcgctgcacgagcagaagactctgcccgggatgaaccggccgatccaggtgaagcctgcggacagcgagagccgaggaggtagtagctgcctgcgccagcccccttcacaagatagaaaactcttcgtgggcatgctcaacaagcaacagtccgaggacgacgtgcgccgccttttcgaggcctttgggaacatcgaggagtgcaccatcctgcgcgggcccgacggcaacagcaaggggtgcgcctttgtgaagtactcctcccacgccgaggcgcaggccgccatcaacgcgctacacggcagccagaccatgccgggagcctcgtccagtctggtggtcaagttcgccgacaccgacaaggagcgcacgatgcggcgaatgcagcagatggctggccagatgggcatgttcaaccccatggccatccctttcggggcctacggcgcctacgctcaggcactgatgcagcagcaagcggccctgatggcatcagtcgcgcagggcggctacctgaaccccatggctgccttcgctgccgcccagatgcagcagatggcggccctcaacatgaatggcctggcggccgcacctatgaccccaacctcaggtggcagcacccctccgggcatcactgcaccagccgtgcctagcatcccatcccccattggggtgaatggcttcaccggcctccccccacaggccaatgggcaacctgctgcggaagctgtgttcgccaatggcatccacccctacccagcacagagccccaccgccgcggaccccctgcagcaggcctacgccggagtgcagcagtatgcaggtccagctgcctaccctgctgcctatggtcagataagccaggcctttcctcagccgcctccaatgatcccccagcagcagagagaagggcccgagggctgtaacctgttcatctaccatctgccccaggagtttggggacgctgagctgatgcagatgttcctccctttcggcttcgtgagcttcgacaacccggccagcgcgcagaccgccatccaggccatgaacggcttccagatcggcatgaagaggctcaaggtgcagctgaagcggcccaaagacgccaatcgcccgtactgagcgccggcgggagcgtcccccgggggagaccaggactcgcacagggcaggatgctgaacgggctacattaaaaaacaaacctctctctatatatatttataaatgagaactgttggatgacacctttgacatatcagccaatatcaatcaagctgaagactccagacactgtctgtgtgactgtaacatttcttcaaggaaagtatagcgtctatggagttcagagggcacgtgtttgggggaaaatatatatgacatgaagaagaagatgaagaaaaatgagaaaaaaacacacaaaaggcaactttaaaacaaaatatcacgagcagacggggaggctgaagggctgggagctgggaggagacgctgcttaccgatcccggggcttttccagcccacgggcgcctgacgcaggctggggcaagtggtgcgtggggcctggtccccaaggggcggctgagaggccgccactgagcatctctatctgtcattcctttagctatttagggaccaaaggaccaaactttttattgcagatgtgtagctctatgtcaaatagagggggaatggaggaccccctccttcctgcctcatggctgttcttgaaacagcttagagcgattctatgaaaaaatgtaataaaaaattaaaaaaaaaacaaaaaacaaaaaaaacaacaaaaaaaggaaaaataacgcttcaatgcttttaaaacagcaagataatagttctttgatactttgagaggcgctttgatgaccctcatccaagtctatgacactttcctatggttttctgtattctatgtctggatggagctgttaaaagatgaacaaattggtggatatttggggaaagcaacacaaatcttaaaactcacccgtgaagtgtgagaaaacaaggaggggaacaaatgggacttaccaagcaaggtcattgttgtgaaaagtctgtaaatgcttctaactcttccccctcttaaaatcataatagttgtacagaattttaaaaaggaaaagtttaaaatacctatataatagaagaaaaattagaggaaagcaaaaaataaaaaaaaaaaataaaaaaggaaaaaaaaaacctatagaagttagcattactgctaaaatcccagatgttgtaggactgtacttttgtagagtttagacagagcatcaatcccttctccccgcgagtgcagtcggatgccgttgtccccaagggccaggccgaactcgccccacacctgcgggcgcctggctgccgacgccggtggaggccacgccgtcggtcgggaacggtcgcgtcgcccgggtcgccgccgccgccgccgccgtcatcctcgcctctcgcttccctctgggagctgcgcgcgcttcactcaccttccgcttcactcgccttccacgcttgctccagagactttccgggcaagggagaactgggaactttcatcttaaaacaactagacaacacacacacacacaaaaccttaaaaaagagagagaaaaataaacaatctttgaagaatttctgaaactgtttacaaggaattttgaaaaacagggatgtttaaatgatgccggctctgtttttctgtaaataaatttgcatattttgtaggacttttaattgtaatgatagagaaaaaaacaaggaaaactatttaatgaaagcacgatatttatctttggtaaatgactttagagcagttaaagacattgcttaaaaaactcagaatcagaaaaaacactgaattatttaagaacacatatattttaaagtataacatatttattataatttatttgcacccttgggaagattgctttggcattctgccttgattccttctcattgatgtccaggtcatctggaggccgggggttctcagacctaccagtttccctttagaagaacaaatttccagttcctctagggcctcctgcctttcctttctttctgtcaattttgttgttgttgttgtttttcattttctttttttctcttgactcctccttttaggatgtccagatgtaaaaaaaaaaaaaaaaaaaagaaaaaaagaaaaaaaaaagaaaacagctgcagttcagtacaactgctcttttcacactcaactccctaaaactccttgtaaccttctgtaactattggatgacgctttctccagcttagccctaaataaagcacagttt

SEQ ID NO: 7090 - DNA, 4049 bp, Homo sapiens
  source 1..4049: mol_type = unassigned DNA
gtccagcctgtttaaacggaaaggacagagatcctgtctgttcaatgtaaaaaaaaaaaaaaaaaaaaaaaaaagaaaaaaagaaaaaaaaaatcagatcagaccgagagagagaggagagagggagagagagagggagagagagagggagagagagaggagagggagggagggagagagagaggggggagagcagagagagagcgcgagcgcgagcgagcgagagaagaggagaaagagagagagcagagagcgagcggagagcgaggtgtagagaaaccgagggggagagaacccgagtgtgtgtatgcgtgtgcgtgtgtgagcgcgagcgagcgagagagaggagcgagagagtgtgagcgagaaagaataaaaggaaagaagattttctctatgtatataaagatggccacgttagcaaacggacaggctgacaacgcaagcctcagtaccaacgggctcggcagcagcccgggcagtgccgggcacatgaacggattaagccacagcccggggaacccgtcgaccattcccatgaaggaccacgatgccatcaagctgttcattgggcagatcccccgcaacctggatgagaaggacctcaagcccctcttcgaggagtttggcaaaatctacgagcttacggttctgaaggacaggttcacaggcatgcacaaaggctgcgccttcctcacctactgcgagcgtgagtcagcgctgaaggcccagagcgcgctgcacgagcagaagactctgcccgggatgaaccggccgatccaggtgaagcctgcggacagcgagagccgaggaggtagtagctgcctgcgccagcccccttcacaagatagaaaactcttcgtgggcatgctcaacaagcaacagtccgaggacgacgtgcgccgccttttcgaggcctttgggaacatcgaggagtgcaccatcctgcgcgggcccgacggcaacagcaaggggtgcgcctttgtgaagtactcctcccacgccgaggcgcaggccgccatcaacgcgctacacggcagccagaccatgccgggagcctcgtccagtctggtggtcaagttcgccgacaccgacaaggagcgcacgatgcggcgaatgcagcagatggctggccagatgggcatgttcaaccccatggccatccctttcggggcctacggcgcctacgctcaggcaatgcagcagcaagcggccctgatggcatcagtcgcgcagggcggctacctgaaccccatggctgccttcgctgccgcccagatgcagcagatggcggccctcaacatgaatggcctggcggccgcacctatgaccccaacctcaggtggcagcacccctccgggcatcactgcaccagccgtgcctagcatcccatcccccattggggtgaatggcttcaccggcctccccccacaggccaatgggcaacctgctgcggaagctgtgttcgccaatggcatccacccctacccagcacagagccccaccgccgcggaccccctgcagcaggcctacgccggagtgcagcagtatgcaggtccagctgcctaccctgctgcctatggtcagataagccaggcctttcctcagccgcctccaatgatcccccagcagcagagagaagggcccgagggctgtaacctgttcatctaccatctgccccaggagtttggggacgctgagctgatgcagatgttcctccctttcggcttcgtgagcttcgacaacccggccagcgcgcagaccgccatccaggccatgaacggcttccagatcggcatgaagaggctcaaggtgcagctgaagcggcccaaagacgccaatcgcccgtactgagcgccggcgggagcgtcccccgggggagaccaggactcgcacagggcaggatgctgaacgggctacattaaaaaacaaacctctctctatatatatttataaatgagaactgttggatgacacctttgacatatcagccaatatcaatcaagctgaagactccagacactgtctgtgtgactgtaacatttcttcaaggaaagtatagcgtctatggagttcagagggcacgtgtttgggggaaaatatatatgacatgaagaagaagatgaagaaaaatgagaaaaaaacacacaaaaggcaactttaaaacaaaatatcacgagcagacggggaggctgaagggctgggagctgggaggagacgctgcttaccgatcccggggcttttccagcccacgggcgcctgacgcaggctggggcaagtggtgcgtggggcctggtccccaaggggcggctgagaggccgccactgagcatctctatctgtcattcctttagctatttagggaccaaaggaccaaactttttattgcagatgtgtagctctatgtcaaatagagggggaatggaggaccccctccttcctgcctcatggctgttcttgaaacagcttagagcgattctatgaaaaaatgtaataaaaaattaaaaaaaaaacaaaaaacaaaaaaaacaacaaaaaaaggaaaaataacgcttcaatgcttttaaaacagcaagataatagttctttgatactttgagaggcgctttgatgaccctcatccaagtctatgacactttcctatggttttctgtattctatgtctggatggagctgttaaaagatgaacaaattggtggatatttggggaaagcaacacaaatcttaaaactcacccgtgaagtgtgagaaaacaaggaggggaacaaatgggacttaccaagcaaggtcattgttgtgaaaagtctgtaaatgcttctaactcttccccctcttaaaatcataatagttgtacagaattttaaaaaggaaaagtttaaaatacctatataatagaagaaaaattagaggaaagcaaaaaataaaaaaaaaaaataaaaaaggaaaaaaaaaacctatagaagttagcattactgctaaaatcccagatgttgtaggactgtacttttgtagagtttagacagagcatcaatcccttctccccgcgagtgcagtcggatgccgttgtccccaagggccaggccgaactcgccccacacctgcgggcgcctggctgccgacgccggtggaggccacgccgtcggtcgggaacggtcgcgtcgcccgggtcgccgccgccgccgccgccgtcatcctcgcctctcgcttccctctgggagctgcgcgcgcttcactcaccttccgcttcactcgccttccacgcttgctccagagactttccgggcaagggagaactgggaactttcatcttaaaacaactagacaacacacacacacacaaaaccttaaaaaagagagagaaaaataaacaatctttgaagaatttctgaaactgtttacaaggaattttgaaaaacagggatgtttaaatgatgccggctctgtttttctgtaaataaatttgcatattttgtaggacttttaattgtaatgatagagaaaaaaacaaggaaaactatttaatgaaagcacgatatttatctttggtaaatgactttagagcagttaaagacattgcttaaaaaactcagaatcagaaaaaacactgaattatttaagaacacatatattttaaagtataacatatttattataatttatttgcacccttgggaagattgctttggcattctgccttgattccttctcattgatgtccaggtcatctggaggccgggggttctcagacctaccagtttccctttagaagaacaaatttccagttcctctagggcctcctgcctttcctttctttctgtcaattttgttgttgttgttgtttttcattttctttttttctcttgactcctccttttaggatgtccagatgtaaaaaaaaaaaaaaaaaaaagaaaaaaagaaaaaaaaaagaaaacagctgcagttcagtacaactgctcttttcacactcaactccctaaaactccttgtaaccttctgtaactattggatgacgctttctccagcttagccctaaataaagcacagttt

SEQ ID NO: 7091 - DNA, 4046 bp, Homo sapiens
  source 1..4046: mol_type = unassigned DNA
gtccagcctgtttaaacggaaaggacagagatcctgtctgttcaatgtaaaaaaaaaaaaaaaaaaaaaaaaaagaaaaaaagaaaaaaaaaatcagatcagaccgagagagagaggagagagggagagagagagggagagagagagggagagagagaggagagggagggagggagagagagaggggggagagcagagagagagcgcgagcgcgagcgagcgagagaagaggagaaagagagagagcagagagcgagcggagagcgaggtgtagagaaaccgagggggagagaacccgagtgtgtgtatgcgtgtgcgtgtgtgagcgcgagcgagcgagagagaggagcgagagagtgtgagcgagaaagaataaaaggaaagaagattttctctatgtatataaagatggccacgttagcaaacggacaggctgacaacgcaagcctcagtaccaacgggctcggcagcagcccgggcagtgccgggcacatgaacggattaagccacagcccggggaacccgtcgaccattcccatgaaggaccacgatgccatcaagctgttcattgggcagatcccccgcaacctggatgagaaggacctcaagcccctcttcgaggagtttggcaaaatctacgagcttacggttctgaaggacaggttcacaggcatgcacaaaggctgcgccttcctcacctactgcgagcgtgagtcagcgctgaaggcccagagcgcgctgcacgagcagaagactctgcccgggatgaaccggccgatccaggtgaagcctgcggacagcgagagccgaggaggtagtagctgcctgcgccagcccccttcacatagaaaactcttcgtgggcatgctcaacaagcaacagtccgaggacgacgtgcgccgccttttcgaggcctttgggaacatcgaggagtgcaccatcctgcgcgggcccgacggcaacagcaaggggtgcgcctttgtgaagtactcctcccacgccgaggcgcaggccgccatcaacgcgctacacggcagccagaccatgccgggagcctcgtccagtctggtggtcaagttcgccgacaccgacaaggagcgcacgatgcggcgaatgcagcagatggctggccagatgggcatgttcaaccccatggccatccctttcggggcctacggcgcctacgctcaggcaatgcagcagcaagcggccctgatggcatcagtcgcgcagggcggctacctgaaccccatggctgccttcgctgccgcccagatgcagcagatggcggccctcaacatgaatggcctggcggccgcacctatgaccccaacctcaggtggcagcacccctccgggcatcactgcaccagccgtgcctagcatcccatcccccattggggtgaatggcttcaccggcctccccccacaggccaatgggcaacctgctgcggaagctgtgttcgccaatggcatccacccctacccagcacagagccccaccgccgcggaccccctgcagcaggcctacgccggagtgcagcagtatgcaggtccagctgcctaccctgctgcctatggtcagataagccaggcctttcctcagccgcctccaatgatcccccagcagcagagagaagggcccgagggctgtaacctgttcatctaccatctgccccaggagtttggggacgctgagctgatgcagatgttcctccctttcggcttcgtgagcttcgacaacccggccagcgcgcagaccgccatccaggccatgaacggcttccagatcggcatgaagaggctcaaggtgcagctgaagcggcccaaagacgccaatcgcccgtactgagcgccggcgggagcgtcccccgggggagaccaggactcgcacagggcaggatgctgaacgggctacattaaaaaacaaacctctctctatatatatttataaatgagaactgttggatgacacctttgacatatcagccaatatcaatcaagctgaagactccagacactgtctgtgtgactgtaacatttcttcaaggaaagtatagcgtctatggagttcagagggcacgtgtttgggggaaaatatatatgacatgaagaagaagatgaagaaaaatgagaaaaaaacacacaaaaggcaactttaaaacaaaatatcacgagcagacggggaggctgaagggctgggagctgggaggagacgctgcttaccgatcccggggcttttccagcccacgggcgcctgacgcaggctggggcaagtggtgcgtggggcctggtccccaaggggcggctgagaggccgccactgagcatctctatctgtcattcctttagctatttagggaccaaaggaccaaactttttattgcagatgtgtagctctatgtcaaatagagggggaatggaggaccccctccttcctgcctcatggctgttcttgaaacagcttagagcgattctatgaaaaaatgtaataaaaaattaaaaaaaaaacaaaaaacaaaaaaaacaacaaaaaaaggaaaaataacgcttcaatgcttttaaaacagcaagataatagttctttgatactttgagaggcgctttgatgaccctcatccaagtctatgacactttcctatggttttctgtattctatgtctggatggagctgttaaaagatgaacaaattggtggatatttggggaaagcaacacaaatcttaaaactcacccgtgaagtgtgagaaaacaaggaggggaacaaatgggacttaccaagcaaggtcattgttgtgaaaagtctgtaaatgcttctaactcttccccctcttaaaatcataatagttgtacagaattttaaaaaggaaaagtttaaaatacctatataatagaagaaaaattagaggaaagcaaaaaataaaaaaaaaaaataaaaaaggaaaaaaaaaacctatagaagttagcattactgctaaaatcccagatgttgtaggactgtacttttgtagagtttagacagagcatcaatcccttctccccgcgagtgcagtcggatgccgttgtccccaagggccaggccgaactcgccccacacctgcgggcgcctggctgccgacgccggtggaggccacgccgtcggtcgggaacggtcgcgtcgcccgggtcgccgccgccgccgccgccgtcatcctcgcctctcgcttccctctgggagctgcgcgcgcttcactcaccttccgcttcactcgccttccacgcttgctccagagactttccgggcaagggagaactgggaactttcatcttaaaacaactagacaacacacacacacacaaaaccttaaaaaagagagagaaaaataaacaatctttgaagaatttctgaaactgtttacaaggaattttgaaaaacagggatgtttaaatgatgccggctctgtttttctgtaaataaatttgcatattttgtaggacttttaattgtaatgatagagaaaaaaacaaggaaaactatttaatgaaagcacgatatttatctttggtaaatgactttagagcagttaaagacattgcttaaaaaactcagaatcagaaaaaacactgaattatttaagaacacatatattttaaagtataacatatttattataatttatttgcacccttgggaagattgctttggcattctgccttgattccttctcattgatgtccaggtcatctggaggccgggggttctcagacctaccagtttccctttagaagaacaaatttccagttcctctagggcctcctgcctttcctttctttctgtcaattttgttgttgttgttgtttttcattttctttttttctcttgactcctccttttaggatgtccagatgtaaaaaaaaaaaaaaaaaaaagaaaaaaagaaaaaaaaaagaaaacagctgcagttcagtacaactgctcttttcacactcaactccctaaaactccttgtaaccttctgtaactattggatgacgctttctccagcttagccctaaataaagcacagttt

SEQ ID NO: 7092 - DNA, 1851 bp, Homo sapiens
  source 1..1851: mol_type = unassigned DNA
ccgccgccgccgccgccggctcggtcccgcgcccgccatggcccgcctgacggagagcgaggcgcgccggcagcagcagcagctcctgcagccgcggccctcgcccgtgggcagcagcgggcccgagccccccggggggcagcccgacggcatgaaggacctggacgccatcaaactcttcgtgggccagatcccgcggcacctggacgagaaggacctcaagccgctcttcgagcagttcggccgcatctacgagctcacggtgctcaaagacccctacacggggatgcacaaaggctgtgccttcctcacctactgtgccagggattccgccatcaaagctcagactgccctgcacgagcagaagaccttgcccggaatggcgcggccaatccaggtgaagcctgcggacagtgaaagccgcggaggtagggaccggaagctgttcgtggggatgctgaacaagcagcagtcggaggaggacgtgctgcggctgttccagcccttcggggtcattgacgagtgcaccgtgctccgggggcctgacggcagcagcaaaggctgtgctttcgtgaagttctcctcccacacggaggcgcaggcggccatccacgccttgcatgggagccagaccatgccgggagcctcctccagcctggtggtcaagttcgccgacacggacaaggagcggacgctccggcgcatgcagcagatggtgggccagctgggcatcctgacgccgtccctcacattgcccttcagcccctacagtgcctacgcccaggctctcatgcaacagcagacaacagtcctgtccacctcgggcagctacctgagtcccggcgtggccttctcaccctgtcacatccagcagataggcgccgtcagcctcaacgggctgcctgccacacccatcgctcctgcctctgggctgcactcacccccgctgctgggcaccaccgctgtgcctggcctcgtggctcccatcaccaatggctttgcaggtgtcgtgccctttccaggtgggcaccctgccctggaaaccgtctatgccaatggccttgtgccctacccagctcagagcccgactgtggccgagacactgcatcctgccttctccggagtccagcagtacacagccatgtaccccaccgcggccatcacgcccatcgcgcacagcgtcccccagccgccgcccctcctgcagcagcagcagcgagaaggtcccgagggctgtaacctgtttatctaccacctcccccaggagtttggagacacggagctgacgcagatgttcctacccttcggcaatatcatttcctccaaggtgtttatggatcgagctaccaaccagagcaagtgtttcggcttcgtgagctttgataacccggccagcgcccaggcagccatccaggccatgaacggcttccagatcggcatgaagaggctcaaagtccagctgaagcggcccaaagacccgggacacccctactgaccgcgcccacagccgccctgaggctgtaggcatggcccagacctgcgtgatttgtacaatgtactttatttctgctacgagtaatttcatgaagtttcaacttgcaaactgacttttgggacaaaccaacacacacacagaagagaaagcaaagaacttggaactttgggttgactcggtttgagttttgtgtcaaagaagatttcccgcggctgaagaggttggtgttcctgttacgtgtttcaggtgagaagcagcaaagcgtcttaatgttcaaaacgcctctctttggtctggagaaaaaaaaaaaaaaaaaaaaacaactaaaaatttatttaataaaagttttacttgct

SEQ ID NO: 7093 - DNA, 1591 bp, Homo sapiens
  source 1..1591: mol_type = unassigned DNA
attcagcctccccaggccccgtcggggaagtttgcacctgcggactccattgctttggttattttcacaaagccaggccggcggggcaggtccggccgcgggggacacggatgcccaggaccccaggctaatcggctgtgccttcctcacctactgtgccagggattccgccatcaaagctcagactgccctgcacgagcagaagaccttgcccggaatggcgcggccaatccaggtgaagcctgcggacagtgaaagccgcggaggtagggaccggaagctgttcgtggggatgctgaacaagcagcagtcggaggaggacgtgctgcggctgttccagcccttcggggtcattgacgagtgcaccgtgctccgggggcctgacggcagcagcaaaggctgtgctttcgtgaagttctcctcccacacggaggcgcaggcggccatccacgccttgcatgggagccagaccatgccgggagcctcctccagcctggtggtcaagttcgccgacacggacaaggagcggacgctccggcgcatgcagcagatggtgggccagctgggcatcctgacgccgtccctcacattgcccttcagcccctacagtgcctacgcccaggctctcatgcaacagcagacaacagtcctgtccacctcgggcagctacctgagtcccggcgtggccttctcaccctgtcacatccagcagataggcgccgtcagcctcaacgggctgcctgccacacccatcgctcctgcctctgggctgcactcacccccgctgctgggcaccaccgctgtgcctggcctcgtggctcccatcaccaatggctttgcaggtgtcgtgccctttccaggtgggcaccctgccctggaaaccgtctatgccaatggccttgtgccctacccagctcagagcccgactgtggccgagacactgcatcctgccttctccggagtccagcagtacacagccatgtaccccaccgcggccatcacgcccatcgcgcacagcgtcccccagccgccgcccctcctgcagcagcagcagcgagaaggagtttggagacacggagctgacgcagatgttcctacccttcggcaatatcatttcctccaaggtgtttatggatcgagctaccaaccagagcaagtgtttcggcttcgtgagctttgataacccggccagcgcccaggcagccatccaggccatgaacggcttccagatcggcatgaagaggctcaaagtccagctgaagcggcccaaagacccgggacacccctactgaccgcgcccacagccgccctgaggctgtaggcatggcccagacctgcgtgatttgtacaatgtactttatttctgctacgagtaatttcatgaagtttcaacttgcaaactgacttttgggacaaaccaacacacacacagaagagaaagcaaagaacttggaactttgggttgactcggtttgagttttgtgtcaaagaagatttcccgcggctgaagaggttggtgttcctgttacgtgtttcaggtgagaagcagcaaagcgtcttaatgttcaaaacgcctctctttggtctggag

SEQ ID NO: 7094 - DNA, 5008 bp, Homo sapiens
  source 1..5008: mol_type = unassigned DNA
cgccgccgccgccgccggctcggtcccgcgcccgccatggcccgcctgacggagagcgaggcgcgccggcagcagcagcagctcctgcagccgcggccctcgcccgtgggcagcagcgggcccgagccccccggggggcagcccgacggcatgaaggacctggacgccatcaaactcttcgtgggccagatcccgcggcacctggacgagaaggacctcaagccgctcttcgagcagttcggccgcatctacgagctcacggtgctcaaagacccctacacggggatgcacaaaggctgtgccttcctcacctactgtgccagggattccgccatcaaagctcagactgccctgcacgagcagaagaccttgcccggaatggcgcggccaatccaggtgaagcctgcggacagtgaaagccgcggaggtagggaccggaagctgttcgtggggatgctgaacaagcagcagtcggaggaggacgtgctgcggctgttccagcccttcggggtcattgacgagtgcaccgtgctccgggggcctgacggcagcagcaaaggctgtgctttcgtgaagttctcctcccacacggaggcgcaggcggccatccacgccttgcatgggagccagaccatgccgggagcctcctccagcctggtggtcaagttcgccgacacggacaaggagcggacgctccggcgcatgcagcagatggtgggccagctgggcatcctgacgccgtccctcacattgcccttcagcccctacagtgcctacgcccaggctctcatgcaacagcagacaacagtcctgtccacctcgggcagctacctgagtcccggcgtggccttctcaccctgtcacatccagcagataggcgccgtcagcctcaacgggctgcctgccacacccatcgctcctgcctctggtgtcgtgccctttccaggtgggcaccctgccctggaaaccgtctatgccaatggccttgtgccctacccagctcagagcccgactgtggccgagacactgcatcctgccttctccggagtccagcagtacacagccatgtaccccaccgcggccatcacgcccatcgcgcacagcgtcccccagccgccgcccctcctgcagcagcagcagcgagaaggagtttggagacacggagctgacgcagatgttcctacccttcggcaatatcatttcctccaaggtgtttatggatcgagctaccaaccagagcaagtgtttcggcttcgtgagctttgataacccggccagcgcccaggcagccatccaggccatgaacggcttccagatcggcatgaagaggctcaaagtccagctgaagcggcccaaagacccgggacacccctactgaccgcgcccacagccgccctgaggctgtaggcatggcccaggtgagccgccaggcggccccacccccgcccaagccccccgtcttgtctgaaaccccctcccgcggcccacttcatgctccaaaccctccccaggtggggtgatgcttcaagaggctacaagaaacctccgggttgggttggcggggacagagctggatgtagacacccccgatccccctgtggttggggctggagcagagggtgggaatggggtagggactgaggtgagccagggcccagtgaggtcggttagggaatccttcccggagaaggctttgagggctgaatagaagttcacctgagaggccaggtttgctctgggggtgggggtgcggtggggagggggttctgtcctgtcctatgagtctgttttccctgctgaaaacccaacaccagacggaaatgccaagtgcccaccccagaccccaaaccctaaggttggaccccaactcggaaccaggagtggagcgtggaaggtggggacagtgctcagggcccagtccagttggcactgacagcttccagtgtccccgctccatttccactagttcccctgggacaagcggcccctcactgggtgtcattcctacccaatgagttgatggaaaagtgggattcgtgccccacccaccatcatgcaagaaaaacaagcaaaacgaaacccagactgtagtttgccatcagggcaaaccactttctcaacatttttttgtggggggatgaacagtaaaccttgtggggccactgtggaaacttaaccgtgggtctcaaaccttgatgagcctcatctgtaaaatgggttcaagaaagtcatctccccagagacggcggaaacggtccacctagggaacagagtggggcatcttttcgcagccgagcccagaacccatcacctaaagagttctggatgattcgttttgattttttttttttttaaatcaccatcgctgtcgtcatcagagtctcgcctagggcctggcacagagtagacgctcagttagaagctgtctggccttttcaccttctcccgggtcagcacacacagatttgggagtatttacctgcacagaacgcaccttcaggaactgccaaccagaagcaaaatccaaagctgctctctgcgatcccttcacttttaactctcagtctgcactttttttttttaactgagcatctattatgtgctaggcactgttccagtgctcggggacgcagctgtgaatgaacagaaacgggggatggaggacaggggagaaacccccttcacgggccttagatggcagggggtagggaaggagagacagaaaataaacagaaatatctgtccccagctgccagaggaggaggaaatgggcttggtgatggtgacattaagttctttgaaagctgggtttgttggcctctgaactctggcctttgtgggatctgttcttttggaaaagatgggagcccctgtgttcctagatcccagcctggccgggtggagtagggtggggaggtggtgtccacctgtgtggccccgttctcactccctaacgcccgtcccttctcccccaggtgaggggccttcccatcccaggagggttttctgcttccaaccgatccaggacttacccataaattccaaccgttctttggacaccagccctttcctcccctcttctccccttgccctgcccctctactggaggccacctggagtggcgaggggcctttggggtctgtcctggggcaggggcgggggtgggggaggctcctgaatcgtgggcagaagtgttcacacgccccccctgctttgggaaacgctctcgcttcttccccacaaaacttggtgacttccccaaactaaatcacaccttttcctatatatatatatatgcatatatatatagatctatagacagtatatatatattttgagtacggatcatgggaccaaacttttccgacttccttccatccgagtagagtgaccctgggccggtcactcagcgggggacacaggaagggctgaggttggcgggaccccgcgcaacacataccaggtgccccacccccacccccaccacctcctggctggcacatcccaccaggaacccgccaacacaacatacctccaggacttttggcaccccccaccaccaattctccagggccgttgggctctgccagcttcagtgtccctggtcccagctgcagcctccagaccccacctcgccccttcgtcccagagccctgccctccgggatggatataggtacaacagagacgctctggcctgcctcagcccttctctgctcccctgcccgagtcatagccttactcatgtgaccaatagcccttagctttccgtcggagggggggggcggacagggttggggggagcccccctgcccctcaccaccccctcccaaggccaggcagccattgtccctgccttcgaatcaccagcctcgaatttaaggtcttgtaaccaggattgccaagcgtagcggaagaccctacccggaccggccaagcacccctttaactggagacgaacttgataatgaccttcatacctctacagagatttttttttttttccggtctttctgagcaggtacaaagaagaaaagagaagaaaaagatggggggaaaaaatcaaaccacaatggatttttgtttcctagttgggagtggggtggggtggggtgtctttgtgagggtgcctctgtacagctgcccaatccgcgacacccacgtcaaagcacagcatcaagttcgtttggacatccggcaaggcctcttaccaaatgaggcgccagataacttaataagctcaaaagaaaaaaacatttaaaaagaaagaaaaaaaaaaaaaaaaaaaccaagcatttccttttctttctaccaaaatgtgttgactgacccggagggggggcggtagggtgggggaaaccacacagaaaaaaaaaaaaaaaaaaaaaagaaaagaaaaaagaaaaaaaaatagaaaagaaaaaaaaaaatcttctgaaccaacttgtttcgatattccagagtttgataattgtttcgagactctcctctagcgtgcctgtgttccgtgtgtccccgtgtgcaagcgtgtgccatgccaatctgcctcgagggggcctcacccgtgtccgcggcgcccgccgaggcccccgagggcctgcttgggagtgtgtgccggtgtgcagttgtacgtgtctttctggtccatgtttactggctgtaaataccatttttatactccacatcgcagacctgcgtgatttgtacaatgtactttatttctgctacgagtaatttcatgaagtttcaacttgcaaactgacttttgggacaaaccaacacacacacagaagagaaagcaaagaacttggaactttgggttgactcggtttgagttttgtgtcaaagaagatttcccgcggctgaagaggttggtgttcctgttacgtgtttcaggtgagaagcagcaaagcgtcttaatgttcaaaacgcctctctttggtctggagaaaaaaaaaaaaaaaaaaaaacaactaaaaatttatttaataaaagttttacttgctaaa

SEQ ID NO: 7095 - DNA, 3345 bp, Homo sapiens
  source 1..3345: mol_type = unassigned DNA
gcacggggacctcaagccagaccccagcgttcagccgccacctcggcccgggcccgccccgccccggccccgcccctttcctgcccgccccaccccctctacgcccctccacccggaccccgccccctgggcagccccccgccctctccgcccgggctccgccccctccccctggccctcgccaccggtccagggaggggacggcgggacaggcgggaccagtgggaccggcgggagggctgacagggcggggacatggccgcggcgccgggagggtcagcgcagcccgctggccccggcccgcgcctgggtttcagcaccgcggacagcggcgtcggcatgagcgggctaaaccccggtcccgccgtacccatgaaggaccacgacgccatcaagctcttcgtggggcagatcccgcggggcttggacgagcaggacctcaagccgctgttcgaggagttcggccgcatctacgagctgacggtgctgaaggaccggctcaccggcctccacaaaggctgtgccttcctcacctactgcgcccgggactctgctctcaaggcccagagtgcactgcacgagcagaagaccctgccagggatgaatcgtccgatccaagtgaagccagctgccagtgagggccgaggagaggaccgaaagctgtttgtggggatgctgggcaagcagcagggtgaggaggacgtcagacgcctgttccagccctttggccacatcgaggagtgcacggtcctgcggagtcctgacggcaccagtaaaggctgtgcctttgtgaagttcgggagtcaaggggaagctcaggcggccatccggggtctgcacggcagccggaccatggcgggcgcctcgtccagcctcgtggtcaagctggcggacaccgaccgggagcgcgcgctgcggcggatgcagcagatggccggccacctgggcgccttccaccccgcgccactgccgctaggggcctgcggcgcctacaccacggcgatcctgcagcaccaggcggccctgctggcggcggcacagggcccaggcctaggcccggtggcggcagtggcggcccagatgcaacacgtggcggcctttagcctggtagctgcgcctctgttgcccgcggcagcagccaactccccgcctggcagcggccctggcaccctcccaggtcttccggcgcccatcggggtcaatggattcggccctctgaccccccagaccaatggccagccgggctccgacacgctctacaataacgggctctccccttatccagcccagagccccggcgtggctgaccccctgcagcaggcctacgctgggatgcaccactacgcagcagcctatccgtcggcctatgccccagtgagcacagcttttccccagcagccttcagccctgccccagcagcagagagaaggccccgaaggctgtaacctcttcatctatcacctgcctcaggagtttggtgatgcggaactcatacagacattcctgccctttggagccgttgtctctgctaaagtctttgtggatcgagccaccaaccagagcaagtgttttgggtttgttagttttgacaatccaactagtgcccagactgctattcaggcgatgaatggctttcaaattggcatgaagaggctcaaggtccagctaaagcggcccaaggatgccaaccggccttactgacctgctttcactgaccagccacagaaagaaacagaagagtgagaagaaaggagaggaaaagcacagaaacgcttgagcagcccttcccgaaggagcagctgcggacggaggtggatcggacccaaggctggtgcctggggctaaggccactctaaggattgtttttatcaagtgggttgttctgtgcctgcagcatagagcgcaggctggcagagcaaatagggctggtgaggagtgactgtccaggggaaccagcagagggcgttgggggtgccaagggcttctccgcaagggaagcccagatttacttctttcaaaatcatatcattccttagagtttagggaccaaaggactattgcttttttaagaatatatatatctatataaattaaaacaaagaaacaaacaaacaaaaaacaagacaaacaactacaaaaaaagacagtatagagtctcataaaagctgcctttaaatatccctaggagacagggtgaaggagacccttgacagccccagcctaggcagatgggggctgtggaaagattgttctgtgtctcattccctcttaagccactcccccaccctgcccttttaaaaataattaaggatttgaggtctaggctcacatgcaggtaatgagaacgttatggaagcagtgaacccacaatccacaatccccaaactcagagtgcatcccagaagaggccccaggcagagctcaggttggccctggcctttgccatcccgggaggccccctagccagcaagagtgggattgcctttcctgtggaaccactgcttccccaggcgggaagaaagagggagttctggccacctgagcctttcccttgccaatccaggtagacagaggccctgcctttggctgagctgagacacctcctgtttcccttccccttgaaccagtcccagtgtccccttgctccaggctaccttctgtctcttagtctaagtttgcccacctgtaaagtagattcaggatatctgtagagggctgtgacaacagacttggaaggtttgctactgtatatactgccattgagaaggggaaatttttcaatatgtagaagcttcagaattagaggtccctctttaccccagacctgggagggaagtagatgttttgccaaaatacttcttcattcctttaaaaactacatctttcctatgcaagagtgtctcacatgtgcttaaccgaggtgcttctagttggtgagcagtgttgagcttagaagtggtgtgtgctctgtctgtctgtctttgtctgtctgttgtatacagtgggtgccatataaagctgatcaatggtggtgcttcctgcctgcttctgtgagatgggcaaaagattcagcttagaacaccatgactcaccttgccttggtcagcctttcctgggcctgtagggccttgcacatatttttcccaggaggatttcccctccaccccacaggcatggatcagcttggtctgaggccccagctgtgtggggtccctctaatccccagatgttgctgaggctgaaggcctctgatctgataacatgtcagatagtaaaagatgtgggggtgggggtggagggctcctccttcataacagtttctaagaaaacttgttcccacctgtt

SEQ ID NO: 7096 - DNA, 2751 bp, Homo sapiens
  source 1..2751: mol_type = unassigned DNA
atgatctcagatcccccctcaaacaacagctggaactctgttctctatcttctagaggaccgaaagctgtttgtggggatgctgggcaagcagcagggtgaggaggacgtcagacgcctgttccagccctttggccacatcgaggagtgcacggtcctgcggagtcctgacggcaccagtaaaggctgtgcctttgtgaagttcgggagtcaaggggaagctcaggcggccatccggggtctgcacggcagccggaccatggcgggcgcctcgtccagcctcgtggtcaagctggcggacaccgaccgggagcgcgcgctgcggcggatgcagcagatggccggccacctgggcgccttccaccccgcgccactgccgctaggggcctgcggcgcctacaccacggcgatcctgcagcaccaggcggccctgctggcggcggcacagggcccaggcctaggcccggtggcggcagtggcggcccagatgcaacacgtggcggcctttagcctggtagctgcgcctctgttgcccgcggcagcagccaactccccgcctggcagcggccctggcaccctcccaggtcttccggcgcccatcggggtcaatggattcggccctctgaccccccagaccaatggccagccgggctccgacacgctctacaataacgggctctccccttatccagcccagagccccggcgtggctgaccccctgcagcaggcctacgctgggatgcaccactacgcagcagcctatccgtcggcctatgccccagtgagcacagcttttccccagcagccttcagccctgccccagcagcagagagaaggccccgaaggctgtaacctcttcatctatcacctgcctcaggagtttggtgatgcggaactcatacagacattcctgccctttggagccgttgtctctgctaaagtctttgtggatcgagccaccaaccagagcaagtgttttgggtttgttagttttgacaatccaactagtgcccagactgctattcaggcgatgaatggctttcaaattggcatgaagaggctcaaggtccagctaaagcggcccaaggatgccaaccggccttactgacctgctttcactgaccagccacagaaagaaacagaagagtgagaagaaaggagaggaaaagcacagaaacgcttgagcagcccttcccgaaggagcagctgcggacggaggtggatcggacccaaggctggtgcctggggctaaggccactctaaggattgtttttatcaagtgggttgttctgtgcctgcagcatagagcgcaggctggcagagcaaatagggctggtgaggagtgactgtccaggggaaccagcagagggcgttgggggtgccaagggcttctccgcaagggaagcccagatttacttctttcaaaatcatatcattccttagagtttagggaccaaaggactattgcttttttaagaatatatatatctatataaattaaaacaaagaaacaaacaaacaaaaaacaagacaaacaactacaaaaaaagacagtatagagtctcataaaagctgcctttaaatatccctaggagacagggtgaaggagacccttgacagccccagcctaggcagatgggggctgtggaaagattgttctgtgtctcattccctcttaagccactcccccaccctgcccttttaaaaataattaaggatttgaggtctaggctcacatgcaggtaatgagaacgttatggaagcagtgaacccacaatccacaatccccaaactcagagtgcatcccagaagaggccccaggcagagctcaggttggccctggcctttgccatcccgggaggccccctagccagcaagagtgggattgcctttcctgtggaaccactgcttccccaggcgggaagaaagagggagttctggccacctgagcctttcccttgccaatccaggtagacagaggccctgcctttggctgagctgagacacctcctgtttcccttccccttgaaccagtcccagtgtccccttgctccaggctaccttctgtctcttagtctaagtttgcccacctgtaaagtagattcaggatatctgtagagggctgtgacaacagacttggaaggtttgctactgtatatactgccattgagaaggggaaatttttcaatatgtagaagcttcagaattagaggtccctctttaccccagacctgggagggaagtagatgttttgccaaaatacttcttcattcctttaaaaactacatctttcctatgcaagagtgtctcacatgtgcttaaccgaggtgcttctagttggtgagcagtgttgagcttagaagtggtgtgtgctctgtctgtctgtctttgtctgtctgttgtatacagtgggtgccatataaagctgatcaatggtggtgcttcctgcctgcttctgtgagatgggcaaaagattcagcttagaacaccatgactcaccttgccttggtcagcctttcctgggcctgtagggccttgcacatatttttcccaggaggatttcccctccaccccacaggcatggatcagcttggtctgaggccccagctgtgtggggtccctctaatccccagatgttgctgaggctgaaggcctctgatctgataacatgtcagatagtaaaagatgtgggggtgggggtggagggctcctccttcataacagtttctaagaaaacttgttcccacctgtt

SEQ ID NO: 7097 - DNA, 3081 bp, Homo sapiens
  source 1..3081: mol_type = unassigned DNA
accggtccagggaggggacggcgggacaggcgggaccagtgggaccggcgggagggctgacagggcggggacatggccgcggcgccgggagggtcagcgcagcccgctggccccggcccgcgcctgggtttcagcaccgcggacagcggcgtcggcatgagcgggctaaaccccggtcccgccgtacccatgaaggaccacgacgccatcaagctcttcgtggggcagatcccgcggggcttggacgagcaggacctcaagccgctgttcgaggagttcggccgcatctacgagctgacggtgctgaaggaccggctcaccggcctccacaaaggctgtgccttcctcacctactgcgcccgggactctgctctcaaggcccagagtgcactgcacgagcagaagaccctgccagggatgaatcgtccgatccaagtgaagccagctgccagtgagggccgaggagaggaccgaaagctgtttgtggggatgctgggcaagcagcagggtgaggaggacgtcagacgcctgttccagccctttggccacatcgaggagtgcacggtcctgcggagtcctgacggcaccagtaaaggctgtgcctttgtgaagttcgggagtcaaggggaagctcaggcggccatccggggtctgcacggcagccggaccatggcgggcgcctcgtccagcctcgtggtcaagctggcggacaccgaccgggagcgcgcgctgcggcggatgcagcagatggccggccacctgggcgccttccaccccgcgccactgccgctaggggcctgcggcgcctacaccacggcgatcctgcagcaccaggcggccctgctggcggcggcacagggcccaggcctaggcccggtggcggcagtggcggcccagatgcaacacgtggcggcctttagcctggtagctgcgcctctgttgcccgcggcagcagccaactccccgcctggcagcggccctggcaccctcccaggtcttccggcgcccatcggggtcaatggattcggccctctgaccccccagaccaatggccagccgggctccgacacgctctacaataacgggctctccccttatccagcccagagccccggcgtggctgaccccctgcagcaggcctacgctgggatgcaccactacgcaggccccgaaggctgtaacctcttcatctatcacctgcctcaggagtttggtgatgcggaactcatacagacattcctgccctttggagccgttgtctctgctaaagtctttgtggatcgagccaccaaccagagcaagtgttttgggtttgttagttttgacaatccaactagtgcccagactgctattcaggcgatgaatggctttcaaattggcatgaagaggctcaaggtccagctaaagcggcccaaggatgccaaccggccttactgacctgctttcactgaccagccacagaaagaaacagaagagtgagaagaaaggagaggaaaagcacagaaacgcttgagcagcccttcccgaaggagcagctgcggacggaggtggatcggacccaaggctggtgcctggggctaaggccactctaaggattgtttttatcaagtgggttgttctgtgcctgcagcatagagcgcaggctggcagagcaaatagggctggtgaggagtgactgtccaggggaaccagcagagggcgttgggggtgccaagggcttctccgcaagggaagcccagatttacttctttcaaaatcatatcattccttagagtttagggaccaaaggactattgcttttttaagaatatatatatctatataaattaaaacaaagaaacaaacaaacaaaaaacaagacaaacaactacaaaaaaagacagtatagagtctcataaaagctgcctttaaatatccctaggagacagggtgaaggagacccttgacagccccagcctaggcagatgggggctgtggaaagattgttctgtgtctcattccctcttaagccactcccccaccctgcccttttaaaaataattaaggatttgaggtctaggctcacatgcaggtaatgagaacgttatggaagcagtgaacccacaatccacaatccccaaactcagagtgcatcccagaagaggccccaggcagagctcaggttggccctggcctttgccatcccgggaggccccctagccagcaagagtgggattgcctttcctgtggaaccactgcttccccaggcgggaagaaagagggagttctggccacctgagcctttcccttgccaatccaggtagacagaggccctgcctttggctgagctgagacacctcctgtttcccttccccttgaaccagtcccagtgtccccttgctccaggctaccttctgtctcttagtctaagtttgcccacctgtaaagtagattcaggatatctgtagagggctgtgacaacagacttggaaggtttgctactgtatatactgccattgagaaggggaaatttttcaatatgtagaagcttcagaattagaggtccctctttaccccagacctgggagggaagtagatgttttgccaaaatacttcttcattcctttaaaaactacatctttcctatgcaagagtgtctcacatgtgcttaaccgaggtgcttctagttggtgagcagtgttgagcttagaagtggtgtgtgctctgtctgtctgtctttgtctgtctgttgtatacagtgggtgccatataaagctgatcaatggtggtgcttcctgcctgcttctgtgagatgggcaaaagattcagcttagaacaccatgactcaccttgccttggtcagcctttcctgggcctgtagggccttgcacatatttttcccaggaggatttcccctccaccccacaggcatggatcagcttggtctgaggccccagctgtgtggggtccctctaatccccagatgttgctgaggctgaaggcctctgatctgataacatgtcagatagtaaaagatgtgggggtgggggtggagggctcctccttcataacagtttctaagaaaacttgttcccacctgtt

SEQ ID NO: 7098 - DNA, 2497 bp, Homo sapiens
  source 1..2497: mol_type = unassigned DNA
agcgggctaaaccccggtcccgccgtacccatgaaggaccacgacgccatcaagctcttcgtggggcagatcccgcggggcttggacgagcaggacctcaagccgctgttcgaggagttcggccgcatctacgagctgacggtgctgaaggaccggctcaccggcctccacaaaggctgtgccttcctcacctactgcgcccgggactctgctctcaaggcccagagtgcactgcacgagcagaagaccctgccagggaggaccgaaagctgtttgtggggatgctgggcaagcagcagggtgaggaggacgtcagacgcctgttccagccctttggccacatcgaggagtgcacggtcctgcggagtcctgacggcaccagtaaaggctgtgcctttgtgaagttcgggagtcaaggggaagctcaggcggccatccggggtctgcacggcagccggaccatggcgggcgcctcgtccagcctcgtggtcaagctggcggacaccgaccgggagcgcgcgctgcggcggatgcagcagatggccggccacctgggcgccttccaccccgcgccactgccgctaggggcctgcggcgcctacaccacggcgatcctgcagcaccaggcggccctgctggcggcggcacagggcccaggcctaggcccggtggcggcagtggcggcccagatgcaacacgtggcggcctttagcctggtagctgcgcctctgttgcccgcggcagcagccaactccccgcctggcagcggccctggcaccctcccaggtcttccggcgcccatcggggtcaatggattcggccctctgaccccccagaccaatggccagccgggctccgacacgctctacaataacgggctctccccttatccagcccagagccccggcgtggctgaccccctgcagcaggcctacgctgggatgcaccactacgcagcagcctatccgtcggcctatgccccagtgagcacagcttttccccagcagccttcagccctgccccagcagcagagagaaggccccgaaggctgtaacctcttcatctatcacctgcctcaggagtttggtgatgcggaactcatacagacattcctgccctttggagccgttgtctctgctaaagtctttgtggatcgagccaccaaccagagcaagtgttttgggtttgttagttttgacaatccaactagtgcccagactgctattcaggcgatgaatggctttcaaattggcatgaagaggctcaaggtccagctaaagcggcccaaggatgccaaccggccttactgacctgctttcactgaccagccacagaaagaaacagaagagtgagaagaaaggagaggaaaagcacagaaacgcttgagcagcccttcccgaaggagcagctgcggacggaggtggatcggacccaaggctggtgcctggggctaaggccactctaaggattgtttttatcaagtgggttgttctgtgcctgcagcatagagcgcaggctggcagagcaaatagggctggtgaggagtgactgtccaggggaaccagcagagggcgttgggggtgccaagggcttctccgcaagggaagcccagatttacttctttcaaaatcatatcattccttagagtttagggaccaaaggactattgcttttttaagaatatatatatctatataaattaaaacaaagaaacaaacaaacaaaaaacaagacaaacaactacaaaaaaagacagtatagagtctcataaaagctgcctttaaatatccctaggagacagggtgaaggagacccttgacagccccagcctaggcagatgggggctgtggaaagattgttctgtgtctcattccctcttaagccactcccccaccctgcccttttaaaaataattaaggatttgaggtctaggctcacatgcaggtaatgagaacgttatggaagcagtgaacccacaatccacaatccccaaactcagagtgcatcccagaagaggccccaggcagagctcaggttggccctggcctttgccatcccgggaggccccctagccagcaagagtgggattgcctttcctgtggaaccactgcttccccaggcgggaagaaagagggagttctggccacctgagcctttcccttgccaatccaggtagacagaggccctgcctttggctgagctgagacacctcctgtttcccttccccttgaaccagtcccagtgtccccttgctccaggctaccttctgtctcttagtctaagtttgcccacctgtaaagtagattcaggatatctgtagagggctgtgacaacagacttggaaggtttgctactgtatatactgccattgagaaggggaaatttttcaatatgtagaagcttcagaattagaggtccctctttaccccagacctgggagggaagtagatgttttgccaaaatacttcttcattcctttaaaaactacatctttcct

SEQ ID NO: 7099 - DNA, 2854 bp, Homo sapiens
  source 1..2854: mol_type = unassigned DNA
atcagtaccccttcctccatgaacgggaaggccgctgtttttccctcctggcactcagctgcctgccccccaacaataattcctcacctcccacgcacccagctcttggcagtttacaaagaccttttgcgtccccattacctcatgtgatccccacaacacccatgagaggaagatgaatcgtccgatccaagtgaagccagctgccagtgagggccgaggagaggaccgaaagctgtttgtggggatgctgggcaagcagcagggtgaggaggacgtcagacgcctgttccagccctttggccacatcgaggagtgcacggtcctgcggagtcctgacggcaccagtaaaggctgtgcctttgtgaagttcgggagtcaaggggaagctcaggcggccatccggggtctgcacggcagccggaccatggcgggcgcctcgtccagcctcgtggtcaagctggcggacaccgaccgggagcgcgcgctgcggcggatgcagcagatggccggccacctgggcgccttccaccccgcgccactgccgctaggggcctgcggcgcctacaccacggcgatcctgcagcaccaggcggccctgctggcggcggcacagggcccaggcctaggcccggtggcggcagtggcggcccagatgcaacacgtggcggcctttagcctggtagctgcgcctctgttgcccgcggcagccaactccccgcctggcagcggccctggcaccctcccaggtcttccggcgcccatcggggtcaatggattcggccctctgaccccccagaccaatggccagccgggctccgacacgctctacaataacgggctctccccttatccagcagcctatccgtcggcctatgccccagtgagcacagcttttccccagcagccttcagccctgccccagcagcagagagaaggccccgaaggctgtaacctcttcatctatcacctgcctcaggagtttggtgatgcggaactcatacagacattcctgccctttggagccgttgtctctgctaaagtctttgtggatcgagccaccaaccagagcaagtgttttgggtttgttagttttgacaatccaactagtgcccagactgctattcaggcgatgaatggctttcaaattggcatgaagaggctcaaggtccagctaaagcggcccaaggatgccaaccggccttactgacctgctttcactgaccagccacagaaagaaacagaagagtgagaagaaaggagaggaaaagcacagaaacgcttgagcagcccttcccgaaggagcagctgcggacggaggtggatcggacccaaggctggtgcctggggctaaggccactctaaggattgtttttatcaagtgggttgttctgtgcctgcagcatagagcgcaggctggcagagcaaatagggctggtgaggagtgactgtccaggggaaccagcagagggcgttgggggtgccaagggcttctccgcaagggaagcccagatttacttctttcaaaatcatatcattccttagagtttagggaccaaaggactattgcttttttaagaatatatatatctatataaattaaaacaaagaaacaaacaaacaaaaaacaagacaaacaactacaaaaaaagacagtatagagtctcataaaagctgcctttaaatatccctaggagacagggtgaaggagacccttgacagccccagcctaggcagatgggggctgtggaaagattgttctgtgtctcattccctcttaagccactcccccaccctgcccttttaaaaataattaaggatttgaggtctaggctcacatgcaggtaatgagaacgttatggaagcagtgaacccacaatccacaatccccaaactcagagtgcatcccagaagaggccccaggcagagctcaggttggccctggcctttgccatcccgggaggccccctagccagcaagagtgggattgcctttcctgtggaaccactgcttccccaggcgggaagaaagagggagttctggccacctgagcctttcccttgccaatccaggtagacagaggccctgcctttggctgagctgagacacctcctgtttcccttccccttgaaccagtcccagtgtccccttgctccaggctaccttctgtctcttagtctaagtttgcccacctgtaaagtagattcaggatatctgtagagggctgtgacaacagacttggaaggtttgctactgtatatactgccattgagaaggggaaatttttcaatatgtagaagcttcagaattagaggtccctctttaccccagacctgggagggaagtagatgttttgccaaaatacttcttcattcctttaaaaactacatctttcctatgcaagagtgtctcacatgtgcttaaccgaggtgcttctagttggtgagcagtgttgagcttagaagtggtgtgtgctctgtctgtctgtctttgtctgtctgttgtatacagtgggtgccatataaagctgatcaatggtggtgcttcctgcctgcttctgtgagatgggcaaaagattcagcttagaacaccatgactcaccttgccttggtcagcctttcctgggcctgtagggccttgcacatatttttcccaggaggatttcccctccaccccacaggcatggatcagcttggtctgaggccccagctgtgtggggtccctctaatccccagatgttgctgaggctgaaggcctctgatctgataacatgtcagatagtaaaagatgtgggggtgggggtggagggctcctccttcataacagtttctaagaaaacttgttcccacctgtt

SEQ ID NO: 7100 - DNA, 3643 bp, Homo sapiens
  source 1..3643: mol_type = unassigned DNA
gtcctctcagccgggacgccagcggctctgattacagacctcggctgcccgacaactacacgcaggacacgtggcggaagctgcacgaggcggtgcgggccgtgcagagcagcacctccatcaggctgtggaaaatctctgttctcacaaagtctccccaatgctctacaagcaactgcgtcaggcctgtgaagaccacgtccaggcacagatccttccgtttagagaagactcactagatagtgttttatttttaaagaagattaacacgtgctggcaggaccactgcagacaaatgatcatgatcagaagcatcttcctgttcttggaccgcacctatgtgctgcagaactccacgctgccctccatctgggatatgggattagaactgtttagaacccatattattagtgataaaatggttcagagtaaaaccattgatggaatcctactgctgatcgagcgcgagaggagcggcgaggccgtggaccggagcctgttgcggagcctcctgggcatgctgtctgacctgcaggtgtataaagattcatttgaactgaaatttttggaagagactaattgcttatatgctgccgaaggccaaaggttaatgcaggaaagagaggttccagaatatcttaaccatgtaagtaaacgcttagaggaagagggagacagagtaatcacttacttggaccacagcacacagaaaccactgattgcttgtgtggagaaacagctattaggagaacatttaacagcaattctgcagaaagggctcgaccacttactggatgagaacagagtgccggacctcgcacagatgtaccagctgttcagccgggtgaggggcgggcagcaggcgctgctgcagcactggagcgagtacatcaagacttttggaacagcgatcgtaatcaatcctgagaaagacaaagacatggtccaagacctgttggacttcaaggacaaggtggaccacgtgatcgaggtctgcttccagaagaatgagcggttcgtcaacctgatgaaggagtcctttgagacgttcatcaacaagagacccaacaagcctgcagaactgatcgcaaagcatgtggattcaaagttaagagcaggcaacaaagaagccacagacgaggagctggagcggacgttggacaagatcatgatcctgttcaggtttatccacggtaaagatgtctttgaagcattttataaaaaagatttggcaaaaagactccttgttgggaaaagtgcctcagtcgatgctgaaaagtctatgttgtcaaagctcaagcatgagtgcggtgcagccttcaccagcaagctggaaggcatgttcaaggacatggagctttcgaaggacatcatggttcatttcaagcagcatatgcagaatcagagtgactcaggccctatagacctcacagtgaacatactcacaatgggctactggccaacatacacgcccatggaagtgcacttaaccccagaaatgattaaacttcaggaagtatttaaggcattttatcttggaaagcacagtggtcgaaaacttcagtggcaaactactttgggacatgctgttttaaaagcggagtttaaagaagggaagaaggaattccaggtgtccctcttccagacactggtgctcctcatgttcaacgagggagatggcttcagctttgaggagataaaaatggccacggggatagaggatagtgaattgcgcagaacgctgcagtccctggcctgtggcaaagcacgtgtgctgattaaaagtcccaaaggaaaggaagtggaagatggagacaagttcatttttaatggagagttcaagcacaagttgtttagaataaagatcaatcaaattcagatgaaggaaactgttgaggaacaggttagcaccactgagagagtgtttcaggatagacaatatcagattgatgctgctatcgtcagaataatgaagatgagaaagactcttggtcataatcttctagtttctgaattatataatcagctgaaatttccagtaaagcctggagatttgaaaaagagaattgaatctctgatagacagagactatatggagagagacaaagacaatccgaatcagtaccactacgtggcctgacgcatctgcagacggttccccttcatgaaacactagaatgtaccctcagagcaggaagcacacctgtgccatttctgggactctgattgatccagctgtggacattggaaggcgaaggaagggaggtggctcctgggtcatctttcacaaggctcaagacttcaacctgcagatgtatctttttccctccagtttttcctctagttcttttaggcatttaaattgtttctgttactctgtgcaaaataactttgagattggacaagaagatgttactaaagagaagttcctttaaaaggtcttgttcttgtgtcaaaaagctgcaagtttggtttgttctcgtgtgtgatcatgagtgcacaatgaagaagaccctagatgctgcattttttagctctgaagattccttaggtatccctgaagacagctcgctcagatgatcagcatttagagtgaaaacaagggcccttcatgggtgaacattagaaagagccagggttcaaagctggcgaatggatgacgcaccctagccactggcccctctctgtttcatgtatttccaaaagttgtaaactttgatggctgatttttcgtaagtcaggtttctaagtgagctccctgaggtgccaaggccatggtgtccgccctgctgcgtctgttcgtcagctgagttccttgtgaatctctgttttagggtttggggctagtgtgtttgtgtttccattctaagattgagtctggcagtccctgtttttttgcattggggtaactgctctttgattttttttaattgcagtatttgtgtgattgcaataataaagtttggtttggtttttacagtcatgcgcagggacgatccttgttctctgctgtaaactgtaaaaagtttatggagacttaaagtcttgatgttgtgaagcagaggttattttgtggaaagattaaaaggattttgttggtacctggttttgtgttgtgtatatatacatgaggttgaacagtgaaaggaaagttcagtagtgatgttagaagggtaactatgacaaagatacttttgagataacatttaaaagtactttatattttacataatagcatgtttcattttgattaaaagctaccaaaggaattttgatcatggcataagtgtttaaagcaatattttctggaatataccaagtttatataatttgattttgtgctaaattattaagagtctctttttgaaacatgcgggtttgaaatatgacaccttgtgggtttccatattaaaatcctcactctttaattgtcatttctatctttgaaaattttcatttatgagttccatgatatgtggtctaagaaagaccaaacagatttctattttttttttcttataagttcgttgtgtctagagattgttaatattgtaatttaatgtagacttactttgaataaaattagtttaattggccttaaaattacattaataaaactttgtgatatgcaaatgacacattc

SEQ ID NO: 7101 - DNA, 2364 bp, Homo sapiens
  source 1..2364: mol_type = unassigned DNA
ggaggccgcgcggaccggggcgggcggagcggagctcggcgggcggcggcgctcggggcggggcgcggcggttccggcccagccatggcggacgaggccccgcggaagggcagcttctcggcgctcgtgggccgcaccaacggcctcaccaagcccgcggccctggccgccgcgcccgccaagccggggggcgcgggcggctccaagaagctggtcatcaagaacttccgagacagacctcggctgcccgacaactacacgcaggacacgtggcggaagctgcacgaggcggtgcgggccgtgcagagcagcacctccatcaggtacaacctcgaggagctctaccaggctgtggaaaatctctgttctcacaaagtctccccaatgctctacaagcaactgcgtcaggcctgtgaagaccacgtccaggcacagatccttccgtttagagaagactcactagatagtgttttatttttaaagaagattaacacgtgctggcaggaccactgcagacaaatgatcatgatcagaagcatcttcctgttcttggaccgcacctatgtgctgcagaactccacgctgccctccatctgggatatgggattagaactgtttagaacccatattattagtgataaaatggttcagagtaaaaccattgatggaatcctactgctgatcgagcgcgagaggagcggcgaggccgtggaccggagcctgttgcggagcctcctgggcatgctgtctgacctgcaggtgtataaagattcatttgaactgaaatttttggaagagactaattgcttatatgctgccgaaggccaaaggttaatgcaggaaagagaggttccagaatatcttaaccatgtaagtaaacgcttagaggaagagggagacagagtaatcacttacttggaccacagcacacagaaaccactgattgcttgtgtggagaaacagctattaggagaacatttaacagcaattctgcagaaagggctcgaccacttactggatgagaacagagtgccggacctcgcacagatgtaccagctgttcagccgggtgaggggcgggcagcaggcgctgctgcagcactggagcgagtacatcaagacttttggaacagcgatcgtaatcaatcctgagaaagacaaagacatggtccaagacctgttggacttcaaggacaaggtggaccacgtgatcgaggtctgcttccagaagaatgagcggttcgtcaacctgatgaaggagtcctttgagacgttcatcaacaagagacccaacaagcctgcagaactgatcgcaaagcatgtggattcaaagttaagagcaggcaacaaagaagccacagacgaggagctggagcggacgttggacaagatcatgatcctgttcaggtttatccacggtaaagatgtctttgaagcattttataaaaaagatttggcaaaaagactccttgttgggaaaagtgcctcagtcgatgctgaaaagtctatgttgtcaaagctcaagcatgagtgcggtgcagccttcaccagcaagctggaaggcatgttcaaggacatggagctttcgaaggacatcatggttcatttcaagcagcatatgcagaatcagagtgactcaggccctatagacctcacagtgaacatactcacaatgggctactggccaacatacacgcccatggaagtgcacttaaccccagaaatgattaaacttcaggaagtatttaaggcattttatcttggaaagcacagtggtcgaaaacttcagtggcaaactactttgggacatgctgttttaaaagcggagtttaaagaagggaagaaggaattccaggtgtccctcttccagacactggtgctcctcatgttcaacgagggagatggcttcagctttgaggagataaaaatggccacggggatagaggatagtgaattgcgcagaacgctgcagtccctggcctgtggcaaagcacgtgtgctgattaaaagtcccaaaggaaaggaagtggaagatggagacaagttcatttttaatggagagttcaagcacaagttgtttagaataaagatcaatcaaattcagatgaaggaaactgttgaggaacaggttagcaccactgagagagtgtttcaggatagacaatatcagattgatgctgctatcgtcagaataatgaagatgagaaagactcttggtcataatcttctagtttctgaattatataatcagctgaaatttccagtaaagcctggagatttgaaaaagagaattgaatctctgatagacagagactatatggagagagacaaagacaatccgaatcagtaccactacgtggcctga

SEQ ID NO: 7102 - DNA, 2502 bp, Homo sapiens
  source 1..2502: mol_type = unassigned DNA
accgcccacagcgggccctcggcgtggcccgcaggcccttcggaccgcctgggagcgcggccacacgtgccagcaagtgagggcagcgacctgggaccgccgcgtctacttacaccgcgacgactccgcgatccacggacaccgcccggcccccacggcggccctgcaggggagaactcgggccgccttcccgagtcccggccgccgctgttcggctcgcgcggctgcccgccggggacccgaacggaagaagggtggcgaggcgggaaaggaaaaggcctgagggtccaaggcaggaggggacacacggaacacgccgagggccaaccacgccgccgcgcgctccccggctaggacccacctgctgcagacagacctcggctgcccgacaactacacgcaggacacgtggcggaagctgcacgaggcggtgcgggccgtgcagagcagcacctccatcaggtacaacctcgaggagctctaccaggctgtggaaaatctctgttctcacaaagtctccccaatgctctacaagcaactgcgtcaggcctgtgaagaccacgtccaggcacagatccttccgtttagagaagactcactagatagtgttttatttttaaagaagattaacacgtgctggcaggaccactgcagacaaatgatcatgatcagaagcatcttcctgttcttggaccgcacctatgtgctgcagaactccacgctgccctccatctgggatatgggattagaactgtttagaacccatattattagtgataaaatggttcagagtaaaaccattgatggaatcctactgctgatcgagcgcgagaggagcggcgaggccgtggaccggagcctgttgcggagcctcctgggcatgctgtctgacctgcaggtgtataaagattcatttgaactgaaatttttggaagagactaattgcttatatgctgccgaaggccaaaggttaatgcaggaaagagaggttccagaatatcttaaccatgtaagtaaacgcttagaggaagagggagacagagtaatcacttacttggaccacagcacacagaaaccactgattgcttgtgtggagaaacagctattaggagaacatttaacagcaattctgcagaaagggctcgaccacttactggatgagaacagagtgccggacctcgcacagatgtaccagctgttcagccgggtgaggggcgggcagcaggcgctgctgcagcactggagcgagtacatcaagacttttggaacagcgatcgtaatcaatcctgagaaagacaaagacatggtccaagacctgttggacttcaaggacaaggtggaccacgtgatcgaggtctgcttccagaagaatgagcggttcgtcaacctgatgaaggagtcctttgagacgttcatcaacaagagacccaacaagcctgcagaactgatcgcaaagcatgtggattcaaagttaagagcaggcaacaaagaagccacagacgaggagctggagcggacgttggacaagatcatgatcctgttcaggtttatccacggtaaagatgtctttgaagcattttataaaaaagatttggcaaaaagactccttgttgggaaaagtgcctcagtcgatgctgaaaagtctatgttgtcaaagctcaagcatgagtgcggtgcagccttcaccagcaagctggaaggcatgttcaaggacatggagctttcgaaggacatcatggttcatttcaagcagcatatgcagaatcagagtgactcaggccctatagacctcacagtgaacatactcacaatgggctactggccaacatacacgcccatggaagtgcacttaaccccagaaatgattaaacttcaggaagtatttaaggcattttatcttggaaagcacagtggtcgaaaacttcagtggcaaactactttgggacatgctgttttaaaagcggagtttaaagaagggaagaaggaattccaggtgtccctcttccagacactggtgctcctcatgttcaacgagggagatggcttcagctttgaggagataaaaatggccacggggatagaggatagtgaattgcgcagaacgctgcagtccctggcctgtggcaaagcacgtgtgctgattaaaagtcccaaaggaaaggaagtggaagatggagacaagttcatttttaatggagagttcaagcacaagttgtttagaataaagatcaatcaaattcagatgaaggaaactgttgaggaacaggttagcaccactgagagagtgtttcaggatagacaatatcagattgatgctgctatcgtcagaataatgaagatgagaaagactcttggtcataatcttctagtttctgaattatataatcagctgaaatttccagtaaagcctggagatttgaaaaagagaattgaatctctgatagacagagactatatggagagagacaaagacaatccgaatcagtaccactacgtggcctga

SEQ ID NO: 7103 - DNA, 3724 bp, Homo sapiens
  source 1..3724: mol_type = unassigned DNA
cctggggaccggctcggcgacgcgctcgggctgagggggcccggggtctttctgccggggccccgtcctctcagccgggacgccagcggctctgattacagacctcggctgcccgacaactacacgcaggacacgtggcggaagctgcacgaggcggtgcgggccgtgcagagcagcacctccatcaggtacaacctcgaggagctctaccaggctgtggaaaatctctgttctcacaaagtctccccaatgctctacaagcaactgcgtcaggcctgtgaagaccacgtccaggcacagatccttccgtttagagaagactcactagatagtgttttatttttaaagaagattaacacgtgctggcaggaccactgcagacaaatgatcatgatcagaagcatcttcctgttcttggaccgcacctatgtgctgcagaactccacgctgccctccatctgggatatgggattagaactgtttagaacccatattattagtgataaaatggttcagagtaaaaccattgatggaatcctactgctgatcgagcgcgagaggagcggcgaggccgtggaccggagcctgttgcggagcctcctgggcatgctgtctgacctgcaggtgtataaagattcatttgaactgaaatttttggaagagactaattgcttatatgctgccgaaggccaaaggttaatgcaggaaagagaggttccagaatatcttaaccatgtaagtaaacgcttagaggaagagggagacagagtaatcacttacttggaccacagcacacagaaaccactgattgcttgtgtggagaaacagctattaggagaacatttaacagcaattctgcagaaagggctcgaccacttactggatgagaacagagtgccggacctcgcacagatgtaccagctgttcagccgggtgaggggcgggcagcaggcgctgctgcagcactggagcgagtacatcaagacttttggaacagcgatcgtaatcaatcctgagaaagacaaagacatggtccaagacctgttggacttcaaggacaaggtggaccacgtgatcgaggtctgcttccagaagaatgagcggttcgtcaacctgatgaaggagtcctttgagacgttcatcaacaagagacccaacaagcctgcagaactgatcgcaaagcatgtggattcaaagttaagagcaggcaacaaagaagccacagacgaggagctggagcggacgttggacaagatcatgatcctgttcaggtttatccacggtaaagatgtctttgaagcattttataaaaaagatttggcaaaaagactccttgttgggaaaagtgcctcagtcgatgctgaaaagtctatgttgtcaaagctcaagcatgagtgcggtgcagccttcaccagcaagctggaaggcatgttcaaggacatggagctttcgaaggacatcatggttcatttcaagcagcatatgcagaatcagagtgactcaggccctatagacctcacagtgaacatactcacaatgggctactggccaacatacacgcccatggaagtgcacttaaccccagaaatgattaaacttcaggaagtatttaaggcattttatcttggaaagcacagtggtcgaaaacttcagtggcaaactactttgggacatgctgttttaaaagcggagtttaaagaagggaagaaggaattccaggtgtccctcttccagacactggtgctcctcatgttcaacgagggagatggcttcagctttgaggagataaaaatggccacggggatagaggatagtgaattgcgcagaacgctgcagtccctggcctgtggcaaagcacgtgtgctgattaaaagtcccaaaggaaaggaagtggaagatggagacaagttcatttttaatggagagttcaagcacaagttgtttagaataaagatcaatcaaattcagatgaaggaaactgttgaggaacaggttagcaccactgagagagtgtttcaggatagacaatatcagattgatgctgctatcgtcagaataatgaagatgagaaagactcttggtcataatcttctagtttctgaattatataatcagctgaaatttccagtaaagcctggagatttgaaaaagagaattgaatctctgatagacagagactatatggagagagacaaagacaatccgaatcagtaccactacgtggcctgacgcatctgcagacggttccccttcatgaaacactagaatgtaccctcagagcaggaagcacacctgtgccatttctgggactctgattgatccagctgtggacattggaaggcgaaggaagggaggtggctcctgggtcatctttcacaaggctcaagacttcaacctgcagatgtatctttttccctccagtttttcctctagttcttttaggcatttaaattgtttctgttactctgtgcaaaataactttgagattggacaagaagatgttactaaagagaagttcctttaaaaggtcttgttcttgtgtcaaaaagctgcaagtttggtttgttctcgtgtgtgatcatgagtgcacaatgaagaagaccctagatgctgcattttttagctctgaagattccttaggtatccctgaagacagctcgctcagatgatcagcatttagagtgaaaacaagggcccttcatgggtgaacattagaaagagccagggttcaaagctggcgaatggatgacgcaccctagccactggcccctctctgtttcatgtatttccaaaagttgtaaactttgatggctgatttttcgtaagtcaggtttctaagtgagctccctgaggtgccaaggccatggtgtccgccctgctgcgtctgttcgtcagctgagttccttgtgaatctctgttttagggtttggggctagtgtgtttgtgtttccattctaagattgagtctggcagtccctgtttttttgcattggggtaactgctctttgattttttttaattgcagtatttgtgtgattgcaataataaagtttggtttggtttttacagtcatgcgcagggacgatccttgttctctgctgtaaactgtaaaaagtttatggagacttaaagtcttgatgttgtgaagcagaggttattttgtggaaagattaaaaggattttgttggtacctggttttgtgttgtgtatatatacatgaggttgaacagtgaaaggaaagttcagtagtgatgttagaagggtaactatgacaaagatacttttgagataacatttaaaagtactttatattttacataatagcatgtttcattttgattaaaagctaccaaaggaattttgatcatggcataagtgtttaaagcaatattttctggaatataccaagtttatataatttgattttgtgctaaattattaagagtctctttttgaaacatgcgggtttgaaatatgacaccttgtgggtttccatattaaaatcctcactctttaattgtcatttctatctttgaaaattttcatttatgagttccatgatatgtggtctaagaaagaccaaacagatttctattttttttttcttataagttcgttgtgtctagagattgttaatattgtaatttaatgtagacttactttgaataaaattagtttaattggccttaaaattacattaataaaactttgtgatatgcaaatg

SEQ ID NO: 7104 - DNA, 3109 bp, Homo sapiens
  source 1..3109: mol_type = unassigned DNA
ctcaagtcctgcggacctgggggcttcgggatctgggcgctatgaaaagtgtctgcccagtcacttccggtttttcttcccccagtccctcagctgctgctgctgctcaggaggtcagatctgccactgatggtaataccagcaccactccgcccacctctgccaagaagagaaagttaaacagcagcagcagtagcagcagtaacagtagtaacgagagagaagactttgattccacctcttcctcctcttccactcctcctttacaacccagggattcggcatccccttcaacctcgtccttctgcctgggggtttcagtggctgcttccagccacgtaccgatacagaagaagctgcgttttgaagacaccctggagtttgtagggtttgatgcgaagatggctgaggaatcctcctcctcctcctcctcatcttcaccaactgctgcaacatctcagcagcagcaacttaaaaataagagtatattaatctcttctgtggcttcggtgcatcatgcaaacggcctagccaaatcttctaccaccgtctctagctttgctaacagcaaacctggctctgctaagaagttagtgatcaagaactttaaagataagcctaaattaccagaaaactacacagatgaaacctggcaaaaactgaaagaagcagtggaagctattcagaatagtacttcaattaagtacaatttagaagaactctaccaggctgtagaaaatctctgttcttacaagatttctgcaaacttgtacaaacagctgagacagatctgcgaagatcacatcaaagcacagattcatcaattcagagaggattcattggatagcgttctttttttaaagaagattgatagatgctggcaaaaccattgcagacaaatgatcatgatcaggagcatttttttgtttctggatagaacttacgttcttcagaattcaatgctaccctccatttgggacatgggactggagttatttagggctcatattataagtgatcagaaagtgcagaataagacaattgatggcattcttctcttgattgagagggaaaggaatggtgaagcaattgatagaagtttacttcgaagccttttaagcatgctgtctgatttgcaaatttatcaagattcttttgaacaacgatttttggaagaaactaaccggctctatgcagctgaaggccaaaaattaatgcaagaaagagaggttcctgaatatctacatcatgttaacaaacgtctagaagaagaagcagacagacttattacttacttagatcagaccacccagaagtcattaattgctactgtagaaaaacaacttctaggtgaacacttaacagcaattcttcagaaaggtttaaataacctccttgatgaaaaccgaattcaagatttgtctcttctgtatcagctcttcagtagagttcgaggtggagttcaggttcttttgcagcagtggatcgaatatatcaaggcatttggcagcactattgtaattaatcctgaaaaagataaaaccatggttcaagaattgctggattttaaagataaggttgaccatataattgatatctgctttctgaagaatgagaaatttatcaatgccatgaaagaagcatttgaaacgttcattaacaaaagaccaaataaaccagctgaacttatagctaagtatgtagattcaaaacttcgtgcaggcaacaaagaagctacagatgaagaacttgagaaaatgttggataaaattatgatcatatttagatttatctatggcaaggatgtttttgaggccttctataagaaagatttagccaagcgcctgttagtcggaaagagtgcatctgtagatgctgaaaaatcaatgctgtccaaacttaaacatgaatgcggagctgctttcaccagcaaacttgaaggaatgtttaaagacatggaactttctaaagacatcatgattcagttcaaacagtatatgcagaatcagaatgttccgggaaatattgagttaactgtgaatatcctgacaatgggctattggccgacatatgtgcctatggaagttcatttaccaccagagatggtaaaacttcaggagattttcaagacattttacctaggcaaacatagtggcaggaaacttcagtggcagtcaaccctaggacactgtgtgttaaaagcagaatttaaagagggtaaaaaggaactccaggtctctctttttcaaacactggtgctgctaatgtttaatgagggagaggagttcagtttagaagagatcaagcaggcaactggaatagaggatggagagttaaggagaacactgcagtcattagcctgtggcaaagctagagttctggcgaaaaatccaaagggcaaagacattgaagatggtgacaagttcatttgtaatgatgatttcaaacataaacttttcaggataaagatcaatcaaatccagatgaaagaaacggttgaagaacaagcaagcactacagaaagagtatttcaagacagacagtatcaaattgatgctgcaattgttcgaattatgaagatgagaaagacacttagccacaatctccttgtttcagaagtgtacaaccagttgaaatttccagtaaagcctgctgatcttaagaagagaatagaatctttaattgaccgggactacatggaaagagataaagaaaatccaaaccagtacaactatattgcatagaatgttggccttgcagcatttggtgtcatatgcagtagccagtggataaactaacctgttgattcaatattatttgactccttttttactaccgatgaccaaatgaagcagtgtaattaatggaaatagttgagtggactttttctcagtggttaacatgcccattttaaagagtaatacttacctttaagaagaatgttgttgaactctttgcatgttatttagtatgatgtgcagaaaacacttaagaacgtacctggtcttcatgaattcctctttggaactgggaaagagatccctgtggctattaaaaaggggggagggttcttacacaccattaattatgaagcaaaaggtttatttgc

SEQ ID NO: 7105 - DNA, 4902 bp, Homo sapiens
  source 1..4902: mol_type = unassigned DNA
cgcacgcaggcatataaacgtaggtttttgatgctcctctgcctgttgaccccgctattttcatgtttccaacaggtttttcttcccccagtccctcagctgctgctgctgctcaggaggtcagatctgccactgatggtaataccagcaccactccgcccacctctgccaagaagagaaagttaaacagcagcagcagtagcagcagtaacagtagtaacgagagagaagactttgattccacctcttcctcctcttccactcctcctttacaacccagggattcggcatccccttcaacctcgtccttctgcctgggggtttcagtggctgcttccagccacgtaccgatacagaagaagctgcgttttgaagacaccctggagtttgtagggtttgatgcgaagatggctgaggaatcctcctcctcctcctcctcatcttcaccaactgctgcaacatctcagcagcagcaacttaaaaataagagtatattaatctcttctgtggcttcggtgcatcatgcaaacggcctagccaaatcttctaccaccgtctctagctttgctaacagcaaacctggctctgctaagaagttagtgatcaagaactttaaagataagcctaaattaccagaaaactacacagatgaaacctggcaaaaactgaaagaagcagtggaagctattcagaatagtacttcaattaagtacaatttagaagaactctaccaggctgtagaaaatctctgttcttacaagatttctgcaaacttgtacaaacagctgagacagatctgcgaagatcacatcaaagcacagattcatcaattcagagaggattcattggatagcgttctttttttaaagaagattgatagatgctggcaaaaccattgcagacaaatgatcatgatcaggagcatttttttgtttctggatagaacttacgttcttcagaattcaatgctaccctccatttgggacatgggactggagttatttagggctcatattataagtgatcagaaagtgcagaataagacaattgatggcattcttctcttgattgagagggaaaggaatggtgaagcaattgatagaagtttacttcgaagccttttaagcatgctgtctgatttgcaaatttatcaagattcttttgaacaacgatttttggaagaaactaaccggctctatgcagctgaaggccaaaaattaatgcaagaaagagaggttcctgaatatctacatcatgttaacaaacgtctagaagaagaagcagacagacttattacttacttagatcagaccacccagaagtcattaattgctactgtagaaaaacaacttctaggtgaacacttaacagcaattcttcagaaaggtttaaataacctccttgatgaaaaccgaattcaagatttgtctcttctgtatcagctcttcagtagagttcgaggtggagttcaggttcttttgcagcagtggatcgaatatatcaaggcatttggcagcactattgtaattaatcctgaaaaagataaaaccatggttcaagaattgctggattttaaagataaggttgaccatataattgatatctgctttctgaagaatgagaaatttatcaatgccatgaaagaagcatttgaaacgttcattaacaaaagaccaaataaaccagctgaacttatagctaagtatgtagattcaaaacttcgtgcaggcaacaaagaagctacagatgaagaacttgagaaaatgttggataaaattatgatcatatttagatttatctatggcaaggatgtttttgaggccttctataagaaagatttagccaagcgcctgttagtcggaaagagtgcatctgtagatgctgaaaaatcaatgctgtccaaacttaaacatgaatgcggagctgctttcaccagcaaacttgaaggaatgtttaaagacatggaactttctaaagacatcatgattcagttcaaacagtatatgcagaatcagaatgttccgggaaatattgagttaactgtgaatatcctgacaatgggctattggccgacatatgtgcctatggaagttcatttaccaccagagatggtaaaacttcaggagattttcaagacattttacctaggcaaacatagtggcaggaaacttcagtggcagtcaaccctaggacactgtgtgttaaaagcagaatttaaagagggtaaaaaggaactccaggtctctctttttcaaacactggtgctgctaatgtttaatgagggagaggagttcagtttagaagagatcaagcaggcaactggaatagaggatggagagttaaggagaacactgcagtcattagcctgtggcaaagctagagttctggcgaaaaatccaaagggcaaagacattgaagatggtgacaagttcatttgtaatgatgatttcaaacataaacttttcaggataaagatcaatcaaatccagatgaaagaaacggttgaagaacaagcaagcactacagaaagagtatttcaagacagacagtatcaaattgatgctgcaattgttcgaattatgaagatgagaaagacacttagccacaatctccttgtttcagaagtgtacaaccagttgaaatttccagtaaagcctgctgatcttaagaagagaatagaatctttaattgaccgggactacatggaaagagataaagaaaatccaaaccagtacaactatattgcatagaatgttggccttgcagcatttggtgtcatatgcagtagccagtggataaactaacctgttgattcaatattatttgactccttttttactaccgatgaccaaatgaagcagtgtaattaatggaaatagttgagtggactttttctcagtggttaacatgcccattttaaagagtaatacttacctttaagaagaatgttgttgaactctttgcatgttatttagtatgatgtgcagaaaacacttaagaacgtacctggtcttcatgaattcctctttggaactgggaaagagatccctgtggctattaaaaaggggggagggttcttacacaccattaattatgaagcaaaaggtttatttgcttaaaatgtcatttaaagatacttaaactgcatgcaaactttatttactgtacagagttctggatgtatttatcaaatagaaaaaccacccttgacttggttgttcacccgttttgtgatttcccttgaaaagagaaatgaattgtcatagctattgatattttactaggtgatgttctgttacactgaaagggatgttttttaaaaaaaattatttggaaacaagttttcaagtagggggacagttgcttacataatatcttgtatattcacatcctaaaaattttcatttatgagtatgggatgtgtgtatatggcttagccccaagttaactgtgctgattaacaagtacttataaaaatagctaaagtagaaaattaatgatcagttgtactagaggaacatcatagaagagaaaaatccaactctttatattaaaaatgaatacaataagaaaattgcaaaagagaccaaaatgaacgtgttttgtaaattgttacaggagcaaaaactttgcaactagttttcaacatactttagactttaaatgttgtttggacagttttgtcttcaacttggaccaattgtagattgttacaggcttcctaggatttagcattcctattttctctaccaaagttttttttagaagcatcccaactcttctctttgttgataaataagcctttcctgtcatcttcattttaacttgctaaaaccctagatacaaaggtcctccctcatttttcccacagagcccctgtttgggaatttgagattctgtgtcatgctggttttcctttcagaattgcttgaaatcgagttctcttagccactggacacctagttttcaggagaatgtcccaagattgtttatatatacaaaatggcaaaagtactgtttttcgaattgataattcaagcaaaggcttctctttactgtcactgatttttttttgtttttattttgtttccttgtttctatttccttgaagctttgaagggaggagaagcagaaaattttgtttatgtttgttaaaaatcagaactacttaatgctttttgccacagcatatttccttgcctgttggagccgttaggaagattacctatgtcctaatcttcaacctgagaagatttttgactcttgtgtctactgttgattgtttgcttgagttctcaaagacctgtggccaggtattttaaaaagtcgtctatttctttctagttgcatcaacttgcacactggtgtctaactatatgtggtattcggaacttgtaattcttattgagcagccattgcctatattttctcagctcctcactgatttctttatatgagctcagctgacaagcaaatgcagctattttgtttaccctctcttcataccggaccatcaacaacagtgttctaactcatccctgatggtctgtgagatgtagactattacacaagattcaagttactcgtaagcaacttttagatagagttggtcctgttaggaggagactcttgatgtcaccttcagtatcttgaaagcgggtcccctccccgaggctcttaattctttgaaaacttgatgctgtttcagctgaaaaattagcaagactgttaaaaaaaaaaagttgaggggagctgtttaagaaactgaaaagtaattgcaaactacattggataattgtgactttcagttgttgttctgtatcagttgaatttttgtgctcttttccctgtgtacgtggtggttctatttttctccaataaaacttttatttaaaaaaagtt

SEQ ID NO: 7106 - DNA, 846 bp, Homo sapiens
  source 1..846: mol_type = unassigned DNA
cttttttggtggagggttcattttccgggggtggttaggatccttgtgctgaagcatacaccgggtgtttctgtgcagtattttgaggtctttttcaacctattgtatttaatctgttattccttataacactgacaatcggtatgattgatccggattttgcagataagcctaaattaccagaaaactacacagatgaaacctggcaaaaactgaaagaagcagtggaagctattcagaatagtacttcaattaagtacaatttagaagaactctaccaggctgtagaaaatctctgttcttacaagatttctgcaaacttgtacaaacagctgagacagatctgcgaagatcacatcaaagcacagattcatcaattcagagaggattcattggatagcgttctttttttaaagaagattgatagatgctggcaaaaccattgcagacaaatgatcatgatcaggagcatttttttgtttctggatagaacttacgttcttcagaattcaatgctaccctccatttgggacatgggactggagttatttagggctcatattataagtgatcagaaagtgcagaataagacaattgatggcattcttctcttgattgagagggaaaggaatggtgaagcaattgatagaagtttacttcgaagccttttaagcatgctgtctgatttgcaaatttatcaagattcttttgaacaacgatttttggaagaaactaaccggctctatgcagctgaaggccaaaaattaatgcaagaaagagaggttcctgaatatctacatcatgttaacaaacgtctagaagaagaagcagacagacttattactt

SEQ ID NO: 7107 - DNA, 3264 bp, Homo sapiens
  source 1..3264: mol_type = unassigned DNA
agttcagtttagaaactgccagtcttggtatagaacaacctaggcttatctgtttaagtcccataggtagtattattagagaataacccaggctttgggaactgtataactctgagatcgtttgaaattttcgttttgtttttcttttggctccaaccaggcctctgttgttagactaatggggtttcccctgcagagattggtcagccctgcagtctatcatcccggaaggtgttaaatacacatgaaagccagcctcggcgggcagaacctagcccgccgaaagggcgggcattgctaaagtgttttcaaaaggtcttcccaatcctctgctttagacagctcggaccttagatagaagaacacaacggatcctccagtgactgacgacccaaaggacggatgatgtcacagtcatctggatcaggagatgggaatgatgatgaggctactacctctaaagacggtggtttttcttcccccagtccctcagctgctgctgctgctcaggaggtcagatctgccactgatggtaataccagcaccactccgcccacctctgccaagaagagaaagttaaacagcagcagcagtagcagcagtaacagtagtaacgagagagaagactttgattccacctcttcctcctcttccactcctcctttacaacccagggattcggcatccccttcaacctcgtccttctgcctgggggtttcagtggctgcttccagccacgtaccgatacagaagaagctgcgttttgaagacaccctggagtttgtagggtttgatgcgaagatggctgaggaatcctcctcctcctcctcctcatcttcaccaactgctgcaacatctcagcagcagcaacttaaaaataagagtatattaatctcttctgtggcttcggtgcatcatgcaaacggcctagccaaatcttctaccaccgtctctagctttgctaacagcaaacctggctctgctaagaagttagtgatcaagaactttaaagataagcctaaattaccagaaaactacacagatgaaacctggcaaaaactgaaagaagcagtggaagctattcagaatagtacttcaattaagtacaatttagaagaactctaccaggctgtagaaaatctctgttcttacaagatttctgcaaacttgtacaaacagctgagacagatctgcgaagatcacatcaaagcacagattcatcaattcagagaggattcattggatagcgttctttttttaaagaagattgatagatgctggcaaaaccattgcagacaaatgatcatgatcaggagcatttttttgtttctggatagaacttacgttcttcagaattcaatgctaccctccatttgggacatgggactggagttatttagggctcatattataagtgatcagaaagtgcagaataagacaattgatggcattcttctcttgattgagagggaaaggaatggtgaagcaattgatagaagtttacttcgaagccttttaagcatgctgtctgatttgcaaatttatcaagattcttttgaacaacgatttttggaagaaactaaccggctctatgcagctgaaggccaaaaattaatgcaagaaagagaggttcctgaatatctacatcatgttaacaaacgtctagaagaagaagcagacagacttattacttacttagatcagaccacccagaagtcattaattgctactgtagaaaaacaacttctaggtgaacacttaacagcaattcttcagaaaggtttaaataacctccttgatgaaaaccgaattcaagatttgtctcttctgtatcagctcttcagtagagttcgaggtggagttcaggttcttttgcagcagtggatcgaatatatcaaggcatttggcagcactattgtaattaatcctgaaaaagataaaaccatggttcaagaattgctggattttaaagataaggttgaccatataattgatatctgctttctgaagaatgagaaatttatcaatgccatgaaagaagcatttgaaacgttcattaacaaaagaccaaataaaccagctgaacttatagctaagtatgtagattcaaaacttcgtgcaggcaacaaagaagctacagatgaagaacttgagaaaatgttggataaaattatgatcatatttagatttatctatggcaaggatgtttttgaggccttctataagaaagatttagccaagcgcctgttagtcggaaagagtgcatctgtagatgctgaaaaatcaatgctgtccaaacttaaacatgaatgcggagctgctttcaccagcaaacttgaaggaatgtttaaagacatggaactttctaaagacatcatgattcagttcaaacagtatatgcagaatcagaatgttccgggaaatattgagttaactgtgaatatcctgacaatgggctattggccgacatatgtgcctatggaagttcatttaccaccagagatggtaaaacttcaggagattttcaagacattttacctaggcaaacatagtggcaggaaacttcagtggcagtcaaccctaggacactgtgtgttaaaagcagaatttaaagagggtaaaaaggaactccaggtctctctttttcaaacactggtgctgctaatgtttaatgagggagaggagttcagtttagaagagatcaagcaggcaactggaatagaggatggagagttaaggagaacactgcagtcattagcctgtggcaaagctagagttctggcgaaaaatccaaagggcaaagacattgaagatggtgacaagttcatttgtaatgatgatttcaaacataaacttttcaggataaagatcaatcaaatccagatgaaagaaacggttgaagaacaagcaagcactacagaaagagtatttcaagacagacagtatcaaattgatgctgcaattgttcgaattatgaagatgagaaagacacttagccacaatctccttgtttcagaagtgtacaaccagttgaaatttccagtaaagcctgctgatcttaagaagagaatagaatctttaattgaccgggactacatggaaagagataaagaaaatccaaaccagtacaactatattgcatagaatgttggccttgcagcatttggtgtcatatgcagtagccagtggataaactaacctgttgattcaatattatttgactccttttttactaccgatgaccaaatgaagcagtgtaattaa

SEQ ID NO: 7108 - DNA, 6351 bp, Homo sapiens
  source 1..6351: mol_type = unassigned DNA
agctgttgtaagcatttcaggacaatgcacctcccttaacaccgagtccgggatttggggcggggtgccggaaaacgccaggtcccgccagcagagggcacggtcccggcctcgctgcagcctcgggacccaccgaggcttccaggctcccacgctcgctcccgagcgcgtccccgccctcgcgtcacgtgacgtggccgcggaacctgagctgcggggcctaagccgagctaaattcgttgcaggtggccgcggcgggtgcaaccacaaaggctaatccgaaggagtcggggaggctcgtggagtcgatgcttcctcttccaagtcaggtcggctcccgttaccttctcagcattcgccgttccggtcttcctgagcgcgtgcatgaggtctttcgcgtggggaagctccggtgaccatgtaggggagaagagtgaggaagctcctggtgcttgggacgaggtcagcgctgtcggcgcgctgctccagcgcccaccacaccctggtgcgggccgacgggccctgggccctggtgggagctccggcctccggtcaaggcctggccgggagcgccacgaattctcgcgtcgtctcgcgagagtccaagttaaagaacatggcgacgtctaatctgttaaagaataaaggttctcttcagtttgaagacaaatgggattttatgcgcccgattgttttgaagcttttacgccaggaatctgttacaaaacagcagtggtttgatctgttttcggatgtgcatgcagtctgtctttgggatgataaaggcccagcaaaaattcatcaggctttaaaagaagatattcttgagtttattaagcaagcacaggcacgagtactgagccatcaagatgatacggctttgctaaaagcatatattgttgaatggcgaaagttctttacacaatgtgatattttaccaaaacctttttgtcaactagagattactttaatgggtaaacagggcagcaataaaaaatcaaatgtggaagacagtattgttcgaaagcttatgcttgatacatggaatgagtcaatcttttcaaacataaaaaacagactccaagatagtgcaatgaagctggtacatgctgagagattgggagaagcttttgattctcagctggttattggagtaagagaatcctatgttaacctttgttctaatcctgaggataaacttcaaatttatagggacaattttgagaaggcatacttggattcaacagagagattttatagaacacaagcaccctcgtatttacaacaaaatggtgtacagaattatatgaaatatgcagatgctaaattaaaagaagaagaaaaacgagcactacgttatttagaaacaagacgagaatgtaactccgttgaagcactcatggaatgctgtgtaaatgccctggtgacatcatttaaagagactatcttagctgagtgccaaggcatgatcaagagaaatgaaactgaaaaattacatttaatgttttcattgatggacaaagttcctaatggtatagagccaatgttgaaagacttggaggaacatatcattagtgctggcctggcagatatggtagcagctgctgaaactattactactgactctgagaaatacgttgagcagttacttacactatttaatagatttagtaaactcgtcaaagaagcttttcaagatgatccacgatttcttactgcaagagataaggcgtataaagcagttgttaatgatgctaccatatttaaacttgaattacctttgaagcagaagggggtgggattaaaaactcagcctgaatcaaaatgccctgagctgcttgccaattactgtgacatgttgctaagaaaaacaccattaagcaaaaaactaacctctgaagagattgaagcaaagcttaaagaagtgctcttggtacttaagtatgtacagaacaaagatgtttttatgaggtatcataaagctcatttgacacgacgtcttatattagacatctctgccgatagtgaaattgaagaaaacatggtagagtggctaagagaagttggtatgccagcggattatgtaaacaagcttgctagaatgtttcaggacataaaagtatctgaagatttgaaccaagcttttaaggaaatgcacaaaaataataaattggcattaccagctgattcagttaatataaaaattctgaatgctggcgcctggtcaagaagttctgagaaagtctttgtctcacttcctactgaactggaggacttgataccggaagtagaagaattctacaaaaaaaatcatagtggtagaaaattacattggcatcatctcatgtcaaatggaattataacatttaagaatgaagttggtcaatatgatttggaggtaaccacgtttcagctcgctgtattgtttgcatggaaccaaagacccagagagaaaatcagctttgaaaatcttaagcttgcaactgaactccctgatgctgaacttaggaggactttatggtctttagtagctttcccaaaactcaaacggcaagttttgttgtatgaacctcaagtcaactcacccaaagactttacagaaggtaccctcttctcagtgaaccaggagttcagtttaataaaaaatgcaaaggttcagaaaaggggtaaaatcaacttgattggacgtttgcagctcactacagaaaggatgagagaagaagagaatgaaggaatagttcaactacgaatactaagaacccaggaagctatcatacaaataatgaaaatgagaaagaaaattagtaatgctcagctgcagactgaattagtagaaattttgaaaaacatgttcttgccacaaaagaaaatgataaaagagcaaatagagtggctaatagagcacaaatacatcagaagagatgaatctgatatcaacactttcatatatatggcataattttgaatatcatggacaatatttagaacccaaattttggagtgcttgggcagaaagttgtaaagtttgtgctggagaaaggtttatttggactttgattacataaatattaaaatctctgccttaccttacaaaaacaactatattttgccaatcacattagttagcatgatggcattcccttcatgttgcacactctttgacagcatgctgttttgtggagaaacttgcattcatgaagagcccattatcaacttttaaaagtgaatttgatttgtacccaccaggagaaatacagttgggaagggtgagggtggggttcttgttgcttttttctcttttttcctctcttaaaaaatgtacttgcacaaggaaggatcttcagatattcatgcactgaaaaatgctgttatcttttgtttttaaaaaatgcaattaaaactagaaatagcactcttggtttcttttgatgaaaagagtgagctggtcaatgcaacattgggaaacggcagatgtaggtgagaagttaagtatttaatagtatcaaattgttcaaacattgctcagtataataactggattttaatggtgacctaaaaatggtattaaatattttcaactttcaaatgttggttttctttaagcaggagactgctattttagttgttgttaaatgatgaggagtttttttttttttaaatatggctggaaagcttgttttgaaaaatgaagcttatattaattgttgcttcaatagtttaaaaaatttatggagataggtaggtcattatgattgcagagccaaaatagcaaaacaaacatattaagtgtgtttactaaacatattgtgtgtttactaacacacttaatgtttatatacctaatatttattatgccatatctgaatttattaaaaacaacacagaaatctcctgctctgatatagttatgtaactgatctcttaatctgtagcatagaagtattttggtattttaaggtctcatgattagggatttgtagcctcaggtttgaatcagtcacctaggggtaagagaaaaaccacaacataagacctgaaaaacagaagcaaaattgttgcactcttaatacgagcagtaaacttgccaaatatatgtacatatatatttatatattttaaaaataaacattttttaaatcgtcagaaggcaacatttaccatgttcctttcagtctatccaaagtagcaacttaactagttgctggcaactgaatacccagagtagtggaaattttaggacttgaggacgtgaacaacttgaaagagaaaattgattccccttgaggaaagaatggctcaacgtggatttttattcattgtggtgcacgtttcaaattttcttgcaaattattttatatcttatttgatgttaagtaatatttttaaagtatggtttttgaagatagtaggaaatggagtacagaaaggcatacagtattatgttacagtggagtgctttcaagagcatttcgtaggatctgtccccatccgaagaggctttgtgaactgcctgctgaatggaaggaaagcaactttaaaacatttagagttttgctgagtatagccaaatgcctgttctgaaacttataggaaattggaattttgtttaaaattttacactttaaggtagcaaatgtcaattattagaccgagcatattgtgaagaattaaactaaaattaatacgtacagttttctctaattaggtgactgttcataatgggtatatttggaatttagaagaaataattttgtagtaattgtggcccttatgtttaacagataattcagcattggcgtatttgcttgtcccaatacaagaatgccaaaggaggaaacaggaaaaattgccgtccattttaaaaatttaggtttgttgttttaaaccataattgttctcagaacttttttggaacttctaattttgggtcatttaatttaagaatgagagtcatgatgttttgatttatgaaggtgaatttaatgcaaaagtgggtaacactacattcatagcaaagttttttattaaattttataaatttttaatagccaattatgtcctaattgtattttggggaatgaacagcagcaaatactgtaaatgtacagttttcttttttttttttttttggttatgtatacaaaagttttaactactttttggtgtttatgaaaatcatttagttgacaaggtgcctatgccattgttaaattttctttaagtaatttaacaacagatttgctaatttaaaaaaaaatgaaaaaaaaaatcttaccagcagtttgtaaaggtctggaatcacagttggcatcctttattcaggtctcttctctccagcgtacacttaaaattggtgccgagcagggatataacctgcagttaagtgaaaagaaaatccagcctccccctccaaaaaaaaaaaaaaaatttaatttttaaaaattagtggtatggcaataagacacttcagaggctatcttaacctctgaatacccatcttctagtttaaagacagagacatcccatctggaaaatgttaacttgtgttgccatctcgttgccggagtaagtagacataagacagagtttaagaagtaaaaatatagaaaaattttgatggtcacaatgagataaatattagaatattactattccaatgattaaatgaggatcttgaaataaattctgaagtcttccaatttttacatttattggaggggtccctgagttctgtcaacttttttatttaagtctcttgctcttattttgtgcataaatgttaaaccttccaaaaatgaaatgttagctttctttcttttactttttattaaatttaatagaaaatatgacctgagtagttaaaaagtattttgcattatttgcagtaagatgtctctagcactgctcaaagggcaaattttaaaacttcagtctgggtgaaagatttgctagttttacagaaagatttgctatcttaaactcaagctggtttttctgttctcatgtaagtgactgggatgctgtcttatgaattcttccaaggtcatgtttgtgaaataaacattacatgagagctttcctgtcatctacactatatgttgtctggagtgttgaacaaatttattttagtttctaagttgtaatctatcctcatatggtctatacgattttgaatgtgtgccactacatactgagatgataatgctgtacaattttaagtggtagcagtttctgtatgcagtaggctgaaatattttgatgaactgcttaatttttggattttattttttaagttgtataatttattttcttgcaaaataaaaatgtaatataaaagcttttacctatcca

SEQ ID NO: 7109 - DNA, 3596 bp, Homo sapiens
  source 1..3596: mol_type = unassigned DNA
ccctggtgggagctccggcctccggtcaaggcctggccgggagcgccacgaattctcgcgtcgtctcgcgagagtccaagttaaagaacatggcgacgtctaatctgttaaagaataaaggttctcttcagtttgaagacaaatgggattttatgcgcccgattgttttgaagcttttacgccaggaatctgttacaaaacagcagtggtttgatctgttttcggatgtgcatgcagtctgtctttgggatgataaaggcccagcaaaaattcatcaggctttaaaagaagatattcttgagtttattaagcaagcacaggcacgagtactgagccatcaagatgatacggctttgctaaaagcatatattgttgaatggcgaaagttctttacacaatgtgatattttaccaaaacctttttgtcaactagagattactttaatgggtaaacagggcagcaataaaaaatcaaatgtggaagacagtattgttcgaaagcttatgcttgatacatggaatgagtcaatcttttcaaacataaaaaacagactccaagatagtgcaatgaagctggtacatgctgagagattgggagaagcttttgattctcagctggttattggagtaagagaatcctatgttaacctttgttctaatcctgaggataaacttcaaatttatagggacaattttgagaaggcatacttggattcaacagagagattttatagaacacaagcaccctcgtatttacaacaaaatggtgtacagaattatatgaaatatgcagatgctaaattaaaagaagaagaaaaacgagcactacgttatttagaaacaagacgagaatgtaactccgttgaagcactcatggaatgctgtgtaaatgccctggtgacatcatttaaagagactatcttagctgagtgccaaggcatgatcaagagaaatgaaactgaaaaattacatttaatgttttcattgatggacaaagttcctaatggtatagagccaatgttgaaagacttggaggaacatatcattagtgctggcctggcagatatggtagcagctgctgaaactattactactgactctgagaaatacgttgagcagttacttacactatttaatagatttagtaaactcgtcaaagaagcttttcaagatgatccacgatttcttactgcaagagataaggcgtataaagcagttgttaatgatgctaccatatttaaacttgaattacctttgaagcagaagggggtgggattaaaaactcagcctgaatcaaaatgccctgagctgcttgccaattactgtgacatgttgctaagaaaaacaccattaagcaaaaaactaacctctgaagagattgaagcaaagcttaaagaagtgctcttggtacttaagtatgtacagaacaaagatgtttttatgaggtatcataaagctcatttgacacgacgtcttatattagacatctctgccgatagtgaaattgaagaaaacatggtagagtggctaagagaagttggtatgccagcggattatgtaaacaagcttgctagaatgtttcaggacataaaagtatctgaagatttgaaccaagcttttaaggaaatgcacaaaaataataaattggcattaccagctgattcagttaatataaaaattctgaatgctggcgcctggtcaagaagttctgagaaagtctttgtctcacttcctactgaactggaggacttgataccggaagtagaagaattctacaaaaaaaatcatagtggtagaaaattacattggcatcatctcatgtcaaatggaattataacatttaagaatgaagttggtcaatatgatttggaggtaaccacgtttcagctcgctgtattgtttgcatggaaccaaagacccagagagaaaatcagctttgaaaatcttaagcttgcaactgaactccctgatgctgaacttaggaggactttatggtctttagtagctttcccaaaactcaaacggcaagttttgttgtatgaacctcaagtcaactcacccaaagactttacagaaggtaccctcttctcagtgaaccaggagttcagtttaataaaaaatgcaaaggttcagaaaaggggtaaaatcaacttgattggacgtttgcagctcactacagaaaggatgagagaagaagagaatgaaggaatagttcaactacgaatactaagaacccaggaagctatcatacaaataatgaaaatgagaaagaaaattagtaatgctcagctgcagactgaattagtagaaattttgaaaaacatgttcttgccacaaaagaaaatgataaaagagcaaatagagtggctaatagagcacaaatacatcagaagagatgaatctgatatcaacactttcatatatatggcataattttgaatatcatggacaatatttagaacccaaattttggagtgcttgggcagaaagttgtaaagtttgtgctggagaaaggtttatttggactttgattacataaatattaaaatctctgccttaccttacaaaaacaactatattttgccaatcacattagttagcatgatggcattcccttcatgttgcacactctttgacagcatgctgttttgtggagaaacttgcattcatgaagagcccattatcaacttttaaaagtgaatttgatttgtacccaccaggagaaatacagttgggaagggtgagggtggggttcttgttgcttttttctcttttttcctctcttaaaaaatgtacttgcacaaggaaggatcttcagatattcatgcactgaaaaatgctgttatcttttgtttttaaaaaatgcaattaaaactagaaatagcactcttggtttcttttgatgaaaagagtgagctggtcaatgcaacattgggaaacggcagatgtagataattcagcattggcgtatttgcttgtcccaatacaagaatgccaaaggaggaaacaggaaaaattgccgtccattttaaaaatttaggtttgttgttttaaaccataattgttctcagaacttttttggaacttctaattttgggtcatttaatttaagaatgagagtcatgatgttttgatttatgaaggtgaatttaatgcaaaagtgggtaacactacattcatagcaaagttttttattaaattttataaatttttaatagccaattatgtcctaattgtattttggggaatgaacagcagcaaatactgtaaatgtacagttttcttttttttttttttttggttatgtatacaaaagttttaactactttttggtgtttatgaaaatcatttagttgacaaggtgcctatgccattgttaaattttctttaagtaatttaacaacagatttgctaatttaaaaaaaaatgaaaaaaaaaatcttaccagcagtttgtaaaggtctggaatcacagttggcatcctttattcaggtctcttctctccagcgtacacttaaaattggtgccgagcagggatataacctgcagttaagtgaaaagaaaatccagcctccccctccaaaaaaaaaaaaaaaa

SEQ ID NO: 7110 - DNA, 5254 bp, Homo sapiens
  source 1..5254: mol_type = unassigned DNA
gtcgccgccagcgtctgtgccgcgtcccttgctctgtgaaggacaggcctcgcgccaggaccccggtggacttctgaggtgccaggatggtgggagaactccgctacagggaattcagggtgcccctggggcccggcttacatgcctatcctgatgagctgatccgccagcgcgtgggccatgatgggcatcctgagtaccagatccgttggctcatcctgcggcgtggcgatgagggggacgggggctctggccaagtggactgcaaggctgagcacatcctgctgtggatgtccaaggatgagatctatgccaactgccacaagatgctgggcgaggatggccaggtcatcgggccctcccaggagtctgcaggggaggttggggccctggacaaatctgtgctggaggagatggaaaccgacgtgaagtccctcattcagagagcccttcggcagctggaggagtgtgtgggcactatccctcctgctcctctacttcacactgtccacgtgctcagcgcctatgccagcattgagcccctcactggagtattcaaggacccaagggtcctggacttgctcatgcacatgttgagtagtcctgattatcagattcgctggagtgcaggccggatgatacaagccctgtcctcccatgacgctgggacccggactcagatccttctgtcactgagccaacaagaagccattgagaaacacctggattttgacagccgctgtgctctgctagcactgtttgcacaggccacgctctctgaacaccccatgtctttcgagggcattcagctaccacaggtcccaggaagggtgctcttctccctggtgaagcggtatttgcatgtcacctcgctcctggatcagctgaacgacagtgctgcggagccaggagcccagaacacctctgctcctgaggagttgagtggggagaggggtcaactggagctggagttcagtatggccatgggcaccctgatctcggagctggtgcaagccatgcgctgggaccaggcctcagacagaccaaggagctcagcacggtcccccggttccatcttccagcctcagctggcagatgtgagcccagggctccccgctgcccaggctcagccctccttcaggaggtcaagacgttttcgccctcgttctgagttcgcaagtggcaatacctatgctttgtatgtgcgggacacactgcagccggggatgcgagtgcggatgctggatgattatgaggagatcagtgccggggatgagggcgagtttcggcagagcaacaacggtgtgcctcctgtgcaggtattttgggagtcaacaggccgcacctattgggtgcactggcacatgctggagatcttgggctttgaggaagacattgaggacatggttgaggctgatgagtaccaaggggcagtggccagtagagtcctgggtagagccctgcctgcctggcgctggaggcccatgacagaactctatgctgtgccttatgtgctgcctgaggatgaggacactgaggagtgtgaacacctgaccctggctgagtggtgggaactcctcttcttcatcaagaagctggatggacctgaccatcaggaggttctccagatcctccaggagaacctagatggggagattctggatgatgagatcctagctgaactggccgtgcccatagaattggcccaggacttgctgctgactctgccacagcgactcaatgacagtgccctcagggacctgatcaactgccatgtctacaagaagtatgggcctgaagccctagcagggaaccaagcctacccatcccttctagaagcccaagaagatgtcctcctgctagacgcgcaggcccaggctaaggactcagaagatgcagccaaagtggaagcaaaagaacccccatctcagagtcccaacactcccctgcagcgtctggtggagggttatggtccagctgggaaaatcctcctggatctagagcaagccctcagctcagaggggacccaggagaacaaggtcaagccactcctgctgcagctgcagcggcagccgcagcccttcctggcactgatgcagagcctggacactccggagactaacaggaccctgcacctgactgtgctgagaatcctgaagcagctggtggacttccccgaggcactgctgctcccctggcacgaggccgtggatgcctgcatggcctgcctgcggtccccaaacactgatcgagaggtgctccaggaactgattttcttcctgcaccgcctgacctcagtgagcagggactatgccgtggtgctgaatcagctgggagcaagagacgctatctccaaggccctggaaaagcacctgggaaagctggagctggctcaggagctgcgggacatggtgttcaagtgtgagaagcatgcccacctctaccgcaaactcatcaccaacatcctgggaggctgcatccagatggtgctgggccagatcgaagaccacagacgaacccaccaacccatcaacatccctttctttgatgtgttcctcagatacctgtgccagggctccagtgtggaagtgaaggaggacaagtgctgggagaaggtggaggtgtcctccaacccgcaccgggccagcaagctgacggaccacaaccccaagacctattgggagtccaacggcagcgccggctcccactacatcaccctgcacatgcgccggggcatcctcatcaggcaactgactctgcttgtggctagtgaggactcgagttacatgccggcccgagtggtggtgtgcgggggtgatagcactagctctcttcacacggaactcaactcggtgaatgtgatgccctctgccagccgggtgatcctcctggagaacctgacccgcttctggcccatcatccagatccgcataaagcgctgccagcagggtggcattgatacgcgcattcgggggttagagatcctaggccccaagcccacgttctggccagtgttccgggagcagctctgtcgtcacacacgcctcttctacatggttcgggcacaggcctggagccaggacatggcagaggaccgcaggagcctcctgcacctgagttctagactcaacggtgctctgcgccaggagcagaattttgctgaccgcttcctccctgatgacgaggctgcccaagctctgggcaagacctgctgggaggccctggtcagccccgtggtgcagaacatcacctcccctgatgaggatggcattagccccctgggttggctgctggaccagtacctggagtgtcaggaagctgtcttcaacccccagagccgcggcccagctttcttctcgcgggtgcgccgtctcactcacctgctggtgcatgtcgagccctgtgaggcaccccctcctgtggtggccactcctcggcccaaaggcagaaacagaagccacgactggagctccttggctacccggggccttccaagcagcatcatgagaaacctgacgcgctgttggcgggccgtggtggagaagcaggtgaacaattttctgacctcatcctggcgggatgatgactttgtgccacgctactgtgagcactttaatattctgcagaactcaagctctgaactgtttgggcctcgggcagccttcttgctggcgctgcaaaatggctgtgcgggagccttgctgaagctcccttttctcaaagctgcccacgtgagtgagcagttcgcccggcacattgaccagcagatccagggcagccggatcggtggagcccaggaaatggagaggctggcacagctgcagcaatgcctgcaagctgtcctgattttctccggcttggagatagccaccacttttgagcattattaccagcactacatggcggaccgtctcctgggcgtggtctcgagctggctggagggggccgtgctggagcagatcggtccctgcttccccaaccgcctcccccagcagatgttgcagagcctgagcacctctaaggagctgcagcgccagttccacgtctaccagctccagcagctggatcaggaactcctgaagctggaggatacagagaagaaaatacaggtgggccttggggccagtggcaaggagcacaagagcgagaaggaagaggaagctggggcagcagcagtggtggatgtggcggagggagaggaggaagaggaggagaatgaggacctctactatgaaggggcaatgccagaagtgtctgtgcttgtcctgtcccgacactcctggcctgttgcctcaatctgccacacactgaaccccagaacctgcctgccctcctacctgaggggcactttgaacagatactccaacttctacaacaagagtcagagccaccctgcccttgagcgaggctcacagaggcgactgcagtggacgtggctgggctgggctgagctgcagtttgggaaccagaccctgcatgtgtccaccgtgcagatgtggctactgctgtatctcaacgacctgaaggcggtctctgtggagagtctgctggcgttctcagggctctccgcagacatgctcaatcaggcgattgggcccctcacctcttcaagaggccccctggaccttcacgagcaaaaggatataccaggaggggtcctcaagattcgagatggcagcaaggaacccaggtcgagatgggacattgtgcggctcatcccacctcagacgtacctgcaagctgagggtgaagacggccagaacttggagaagagacggaatcttctgaactgcctcatcgtccgaatcctcaaggcccatggagatgaggggctgcacattgaccagcttgtctgtctggtgctggaggcttggcagaagggcccgtgtcctcccaggggtttggtcagcagccttggtaaggggtctgcatgcagcagcactgacgtcctctcctgcatcctacacctcctgggcaagggcacgctgagacgccatgacgaccggccccaggtgctgtcctatgcagtccctgtgactgtcatggagcctcacactgagtccctgaacccaggctcctcaggccccaacccacccctcaccttccataccctacagattcgctcccggggtgtgccctatgcctcctgcactgccacccagagcttctctaccttccggtagccctagacttggggtcaggggaaggtagagctggagcttttacagaaataaaacccaagagtttgattata

SEQ ID NO: 7111 - DNA, 5504 bp, Homo sapiens
  source 1..5504: mol_type = unassigned DNA
aggaggtgctgcgtcgccaaggtggcatcctcggctccgccccggcgctctcccagggcccctagctttccgctgggtcgggcggaaatgagccgtggcttttggctggcggagccgctggcagggaccgggccccaccctgccccagtggctgccgactcacgcgggtgcagctctgttccgcggaggcacgccccctcccgtctctccgtctcgaccccctcgcggggcccaggtgccaggatggtgggagaactccgctacagggaattcagggtgcccctggggcccggcttacatgcctatcctgatgagctgatccgccagcgcgtgggccatgatgggcatcctgagtaccagatccgttggctcatcctgcggcgtggcgatgagggggacgggggctctggccaagtggactgcaaggctgagcacatcctgctgtggatgtccaaggatgagatctatgccaactgccacaagatgctgggcgaggatggccaggtcatcgggccctcccaggagtctgcaggggaggttggggccctggacaaatctgtgctggaggagatggaaaccgacgtgaagtccctcattcagagagcccttcggcagctggaggagtgtgtgggcactatccctcctgctcctctacttcacactgtccacgtgctcagcgcctatgccagcattgagcccctcactggagtattcaaggacccaagggtcctggacttgctcatgcacatgttgagtagtcctgattatcagattcgctggagtgcaggccggatgatacaagccctgtcctcccatgacgctggtgaggggcagtgtggggaggaagggaaagcaggagaagggctgggtcggctcagggactcacaggacactgtggcaggagcctctgatctcatcaggacccggactcagatccttctgtcactgagccaacaagaagccattgagaaacacctggattttgacagccgctgtgctctgctagcactgtttgcacaggccacgctctctgaacaccccatgtctttcgagggcattcagctaccacaggtcccaggaagggtgctcttctccctggtgaagcggtatttgcatgtcacctcgctcctggatcagctgaacgacagtgctgcggagccaggagcccagaacacctctgctcctgaggagttgagtggggagaggggtcaactggagctggagttcagtatggccatgggcaccctgatctcggagctggtgcaagccatgcgctgggaccaggcctcagacagaccaaggagctcagcacggtcccccggttccatcttccagcctcagctggcagatgtgagcccagggctccccgctgcccaggctcagccctccttcaggaggtcaagacgttttcgccctcgttctgagttcgcaagtggcaatacctatgctttgtatgtgcgggacacactgcagccggggatgcgagtgcggatgctggatgattatgaggagatcagtgccggggatgagggcgagtttcggcagagcaacaacggtgtgcctcctgtgcaggtattttgggagtcaacaggccgcacctattgggtgcactggcacatgctggagatcttgggctttgaggaagacattgaggacatggttgaggctgatgagtaccaaggggcagtggccagtagagtcctgggtagagccctgcctgcctggcgctggaggcccatgacagaactctatgctgtgccttatgtgctgcctgaggatgaggacactgaggagtgtgaacacctgaccctggctgagtggtgggaactcctcttcttcatcaagaagctggatggacctgaccatcaggaggttctccagatcctccaggagaacctagatggggagattctggatgatgagatcctagctgaactggccgtgcccatagaattggcccaggacttgctgctgactctgccacagcgactcaatgacagtgccctcagggacctgatcaactgccatgtctacaagaagtatgggcctgaagccctagcagggaaccaagcctacccatcccttctagaagcccaagaagatgtcctcctgctagacgcgcaggcccaggctaaggactcagaagatgcagccaaagtggaagcaaaagaacccccatctcagagtcccaacactcccctgcagcgtctggtggagggttatggtccagctgggaaaatcctcctggatctagagcaagccctcagctcagaggggacccaggagaacaaggtcaagccactcctgctgcagctgcagcggcagccgcagcccttcctggcactgatgcagagcctggacactccggagactaacaggaccctgcacctgactgtgctgagaatcctgaagcagctggtggacttccccgaggcactgctgctcccctggcacgaggccgtggatgcctgcatggcctgcctgcggtccccaaacactgatcgagaggtgctccaggaactgattttcttcctgcaccgcctgacctcagtgagcagggactatgccgtggtgctgaatcagctgggagcaagagacgctatctccaaggccctggaaaagcacctgggaaagctggagctggctcaggagctgcgggacatggtgttcaagtgtgagaagcatgcccacctctaccgcaaactcatcaccaacatcctgggaggctgcatccagatggtgctgggccagatcgaagaccacagacgaacccaccaacccatcaacatccctttctttgatgtgttcctcagatacctgtgccagggctccagtgtggaagtgaaggaggacaagtgctgggagaaggtggaggtgtcctccaacccgcaccgggccagcaagctgacggaccacaaccccaagacctattgggagtccaacggcagcgccggctcccactacatcaccctgcacatgcgccggggcatcctcatcaggcaactgactctgcttgtggctagtgaggactcgagttacatgccggcccgagtggtggtgtgcgggggtgatagcactagctctcttcacacggaactcaactcggtgaatgtgatgccctctgccagccgggtgatcctcctggagaacctgacccgcttctggcccatcatccagatccgcataaagcgctgccagcagggtggcattgatacgcgcattcgggggttagagatcctaggccccaagcccacgttctggccagtgttccgggagcagctctgtcgtcacacacgcctcttctacatggttcgggcacaggcctggagccaggacatggcagaggaccgcaggagcctcctgcacctgagttctagactcaacggtgctctgcgccaggagcagaattttgctgaccgcttcctccctgatgacgaggctgcccaagctctgggcaagacctgctgggaggccctggtcagccccgtggtgcagaacatcacctcccctgatgaggatggcattagccccctgggttggctgctggaccagtacctggagtgtcaggaagctgtcttcaacccccagagccgcggcccagctttcttctcgcgggtgcgccgtctcactcacctgctggtgcatgtcgagccctgtgaggcaccccctcctgtggtggccactcctcggcccaaaggcagaaacagaagccacgactggagctccttggctacccggggccttccaagcagcatcatgagaaacctgacgcgctgttggcgggccgtggtggagaagcaggtgaacaattttctgacctcatcctggcgggatgatgactttgtgccacgctactgtgagcactttaatattctgcagaactcaagctctgaactgtttgggcctcgggcagccttcttgctggcgctgcaaaatggctgtgcgggagccttgctgaagctcccttttctcaaagctgcccacgtgagtgagcagttcgcccggcacattgaccagcagatccagggcagccggatcggtggagcccaggaaatggagaggctggcacagctgcagcaatgcctgcaagctgtcctgattttctccggcttggagatagccaccacttttgagcattattaccagcactacatggcggaccgtctcctgggcgtggtctcgagctggctggagggggccgtgctggagcagatcggtccctgcttccccaaccgcctcccccagcagatgttgcagagcctgagcacctctaaggagctgcagcgccagttccacgtctaccagctccagcagctggatcaggaactcctgaagctggaggatacagagaagaaaatacaggtgggccttggggccagtggcaaggagcacaagagcgagaaggaagaggaagctggggcagcagcagtggtggatgtggcggagggagaggaggaagaggaggagaatgaggacctctactatgaaggggcaatgccagaagtgtctgtgcttgtcctgtcccgacactcctggcctgttgcctcaatctgccacacactgaaccccagaacctgcctgccctcctacctgaggggcactttgaacagatactccaacttctacaacaagagtcagagccaccctgcccttgagcgaggctcacagaggcgactgcagtggacgtggctgggctgggctgagctgcagtttgggaaccagaccctgcatgtgtccaccgtgcagatgtggctactgctgtatctcaacgacctgaaggcggtctctgtggagagtctgctggcgttctcagggctctccgcagacatgctcaatcaggcgattgggcccctcacctcttcaagaggccccctggaccttcacgagcaaaaggatataccaggaggggtcctcaagattcgagatggcagcaaggaacccaggtcgagatgggacattgtgcggctcatcccacctcagacgtacctgcaagctgagggtgaagacggccagaacttggagaagagacggaatcttctgaactgcctcatcgtccgaatcctcaaggcccatggagatgaggggctgcacattgaccagcttgtctgtctggtgctggaggcttggcagaagggcccgtgtcctcccaggggtttggtcagcagccttggtaaggggtctgcatgcagcagcactgacgtcctctcctgcatcctacacctcctgggcaagggcacgctgagacgccatgacgaccggccccaggtgctgtcctatgcagtccctgtgactgtcatggagcctcacactgagtccctgaacccaggctcctcaggccccaacccacccctcaccttccataccctacagattcgctcccggggtgtgccctatgcctcctgcactgccacccagagcttctctaccttccggtagccctagacttggggtcaggggaaggtagagctggagcttttacagaaataaaacccaagagtttgatt

SEQ ID NO: 7112 - DNA, 727 bp, Homo sapiens
  source 1..727: mol_type = unassigned DNA
gtccgggaaggccggtgcggaaggtggcgggggaggggacggtcggccgaaggctccccggggcgggccggcgggagtcgtagtcagtggtgatttcttctggagtcgtttcctcagctccttccagccccttgggcggcaccttctatctttgaggcgttaaaggagcagcaaatggatttctcatggaagtttgtgttgattcagtggaatcagctgtgaatgcagaaagaggaggtgctgatcggattgaattatgttctggtttatcagaggggggaactacacccagcatgggtgtccttcaagtagtgaagcagagtgttcagatcccagtttttgtgatgattcggccacggggaggtgattttttgtattcagatcgtgaaattgaggtgatgaaggctgacattcgtcttgccaagctttatggtgctgatggtttggtttttggggcattgactgaagatggacacattgacaaagagctgtgtatgtcccttatggctatttgccgccctctgccagtcactttccaccgagcctttgacatggttcatgatccaatggcagctctggagaccctcttaaccttgggatttgaacgcgtgttgaccagtggatgtgacagttcagcattagaagggctacccctaataaagcgactcattgagcaggcaaaaggcaggattgtggtaatgccaggaggtggtataacagacagaaa

SEQ ID NO: 7113 - DNA, 1346 bp, Homo sapiens
  source 1..1346: mol_type = unassigned DNA
gctggggcgtaggtgtcggggacgcgcgcacgggcgcgcgcagctgttgacgcgcttcttagctggtgcgcgccggagcccaaattccaagtggaaactgcaggcgcacgagggaggaacgcgtggagcatgaaaaggcagggggcctcctctgagcgaaaacgagcgcggataccgtccgggaaggccggagcagcaaatggatttctcatggaagtttgtgttgattcagtggaatcagctgtgaatgcagaaagaggaggtgctgatcggattgaattatgttctggtttatcagaggggggaactacacccagcatgggtgtccttcaagtagtgaagcagagtgttcagatcccagtttttgtgatgattcggccacggggaggtgattttttgtattcagatcgtgaaattgaggtgatgaaggctgacattcgtcttgccaagctttatggtgctgatggtttggtttttggggcattgactgaagatggacacattgacaaagagctgtgtatgtcccttatggctatttgccgccctctgccagtcactttccaccgagcctttgacatggttcatgatccaatggcagctctggagaccctcttaaccttgggatttgaacgcgtgttgaccagtggatgtgacagttcagcattagaagggctacccctaataaagcgactcattgagcaggcaaaaggcaggattgtggtaatgccaggaggtggtataacagacagaaatctacaaaggatccttgagggttcaggtgctacagaattccactgttctgctcggtctactagagactcgggaatgaagtttcgaaattcatctgttgccatgggagcctcactttcttgctcagaatattccctaaaggtaacagatgtgaccaaagtaaggactttgaatgctatcgcaaagaacatcctggtgtagccagacctctctgagagacatggatatcacaggatgaaggtagaactataatctgcaattctctatgacacagctttaaccttcttctctggccaggacagtcgcaatctttgttttaagtttcacatggccatggagaatgtgcccaagaagaaaaagaatttgaaacagagatacagtcacttcctttgcttagtcttaccagtgattgtcatcatggttaaagctggtctgtgcttcttccatagacagaagcttagtctgttttcagtggaattaattgatgaactgggaaaattttaactgcatggtatgaattcagagtgtgacttaagggtcaattcaaagcagtattttgacttttcatttgtaaaataaaaatttccactattaca

SEQ ID NO: 7114 - DNA, 2610 bp, Homo sapiens
  source 1..2610: mol_type = unassigned DNA
agctgaattttttttttccctctctctttcttcactcctttttctttccaaacagggaaaagtgttccacgaagcggtagcgccttttcgcctcgcgttttcctccctgaccctggtcccggctcccgtccgggcgccagctggtggggcgagcgccgggagcccatctgcccccaggggcacggggcgcggggccggctcccgcccggcacatggctgcagccacctcgcgcgcaccccgaggcgccgcgcccagctcgcccgaggtccgtcggaggcgcccggccgccccggagccaagcagcagctgagcggggaagcgcccgcgtccggggatcgggatgtccctcctccttctcctcttgctagtttcctactatgttggaaccttggggactcacactgagatcaagagagtggcagaggaaaaggtcactttgccctgccaccatcaactggggcttccagaaaaagacactctggatattgaatggctgctcaccgataatgaagggaaccaaaaagtggtgatcacttactccagtcgtcatgtctacaataacttgactgaggaacagaagggccgagtggcctttgcttccaatttcctggcaggagatgcctccttgcagattgaacctctgaagcccagtgatgagggccggtacacctgtaaggttaagaattcagggcgctacgtgtggagccatgtcatcttaaaagtcttagtgagaccatccaagcccaagtgtgagttggaaggagagctgacagaaggaagtgacctgactttgcagtgtgagtcatcctctggcacagagcccattgtgtattactggcagcgaatccgagagaaagagggagaggatgaacgtctgcctcccaaatctaggattgactacaaccaccctggacgagttctgctgcagaatcttaccatgtcctactctggactgtaccagtgcacagcaggcaacgaagctgggaaggaaagctgtgtggtgcgagtaactgtacagtatgtacaaagcatcggcatggttgcaggagcagtgacaggcatagtggctggagccctgctgattttcctcttggtgtggctgctaatccgaaggaaagacaaagaaagatatgaggaagaagagagacctaatgaaattcgagaagatgctgaagctccaaaagcccgtcttgtgaaacccagctcctcttcctcaggctctcggagctcacgctctggttcttcctccactcgctccacagcaaatagtgcctcacgcagccagcggacactgtcaactgacgcagcaccccagccagggctggccacccaggcatacagcctagtggggccagaggtgagaggttctgaaccaaagaaagtccaccatgctaatctgaccaaagcagaaaccacacccagcatgatccccagccagagcagagccttccaaacggtctgaattacaatggacttgactcccacgctttcctaggagtcagggtctttggactcttctcgtcattggagctcaagtcaccagccacacaaccagatgagaggtcatctaagtagcagtgagcattgcacggaacagattcagatgagcattttccttatacaataccaaacaagcaaaaggatgtaagctgattcatctgtaaaaaggcatcttattgtgcctttagaccagagtaagggaaagcaggagtccaaatctatttgttgaccaggacctgtggtgagaaggttggggaaaggtgaggtgaatatacctaaaacttttaatgtgggatattttgtatcagtgctttgattcacaattttcaagaggaaatgggatgctgtttgtaaattttctatgcatttctgcaaacttattggattattagttattcagacagtcaagcagaacccacagccttattacacctgtctacaccatgtactgagctaaccacttctaagaaactccaaaaaaggaaacatgtgtcttctattctgacttaacttcatttgtcataaggtttggatattaatttcaaggggagttgaaatagtgggagatggagaagagtgaatgagtttctcccactctatactaatctcactatttgtattgagcccaaaataactatgaaaggagacaaaaatttgtgacaaaggattgtgaagagctttccatcttcatgatgttatgaggattgttgacaaacattagaaatatataatggagcaattgtggatttcccctcaaatcagatgcctctaaggactttcctgctagatatttctggaaggagaaaatacaacatgtcatttatcaacgtccttagaaagaattcttctagagaaaaagggatctaggaatgctgaaagattacccaacataccattatagtctcttctttctgagaaaatgtgaaaccagaattgcaagactgggtggactagaaagggagattagatcagttttctcttaatatgtcaaggaaggtagccgggcatggtgccaggcacctgtaggaaaatccagcaggtggaggttgcagtgagccaagattatgccattgcactccagcctgggtgacaaagcaagactccatctc

SEQ ID NO: 7115 - DNA, 5565 bp, Homo sapiens
  source 1..5565: mol_type = unassigned DNA
gcacacagcgactggagacggacggagagcaacgcgctgggagaggagagaccaccgacaacagacccgcgctctcacacatacactcacactcgactctttcctctccccccacctcctcctccttccacccccaccactaacaccatctcctcctccttctctctgcaacaagaaaaaaaagccatttacagttgtaacagttggaggataatgcaaaggaagacgctgcctgggaattcaccgtctgtggaaatgagccccagagaggaataaagcagccctcaccttgctctccccacccgaacccactttccccacccgcctcggcccccaccccaacaccaccatcactcccttccctcccccccacctttcccccttttccacccaggtgtcggaccaggcggtccccacttccaccctgcaccccttcttccccccctgcaccatgaacaccaatgtctgcgtggagcccgggccgagcccggaggccccgggcttgcccaaggaaagccacttgcccgagggggctctgaacagccttgtggattacaactcggaaatggagcgctaccgctcctttgccacctccttctacaagaccaacgggggcgccttcccacaggcggccaagatcgcgcgcatcaccacccccatcttccccagcagcgccgccgccgccgcggccgccgcgcgcatcggcatgtccccctggaactgcgacaacgcggccaccgccgccgccgccaccgccatgctctggggcagcggcgggggcgggggcggcggcggggggggtggcggcggcggcggcggcggcggaggcgggggcgggggtggtgggggcggcaggaaatcctcctccgccgccgcctcctcctccgcctcctcctcctcggcgatcctccccgccggcggtggcggcggcggcggcggcggcggcagcaggaccagcatgcaccaccgaaacgactcccagaggctggggaaagctggctgcccgccagagccgtcgttgcaaatggcaaatactaatttcctctccaccttatcccctgaacactgcagacctttggcgggggaatgcatgaacaagctcaaatgcggcgctgctgaagcagagataatgaatctccccgagcgcgtggggactttttccgctatcccggctttagggggcatctcattacctccaggggtcatcgtcatgacagcccttcactcccccgcagcagcctcagcagccgtcacagacagtgcgtttcaaattgccaatctggcagactgcccgcagaatcattcctcctcctcctcgtcctcctcagggggagctggcggagccaacccagccaagaagaagaggaaaaggtgtggggtctgcgtgccctgcaagaggctcatcaactgtggcgtctgcagcagttgcaggaaccgcaaaacgggacaccagatctgcaaatttagaaaatgtgaagagctaaagaaaaaacctggcacttcactagagagaacacctgttcccagcgctgaagcattccgatggttcttttaaagcagtagtatatcttattttcaaggcatttggaaatgaagggcaaactaatgtcttgttttaagaaactgcttagtccaccactgaagaaaatatccagaaattattttcattttatgtatagggctttcttcaaaaaaaaaaaaaaagaggaaaagaaaagaaaaagacataaaaataatgtgagagcttggagaattggccagtctatttactttcaatacgctgattctttctttgatgtaatttagctatagtagtgaagttgttgtctattttgaaagtggctgtaaaaaataagtttgggtaaacccctgctgtaaaatcatgtatctttgcaaagtacatatctatacttcattttcaaatatatgtgtttcagtactgtaaactgtacagatagcagcttgtattttgtgtgtttagacacaaggagacaatcatgtctgagcatctatggagattaacagtttgtacacaacagtatggttctgcaagttaaatctggagcaataaattttagctttaactattttttgccagtggtttagaagcagcaacagcactggcaccattttgccatgcatctttccatagagacttgatgccaagttttacaagactaaaagattatgatgcatccaccaattaccttcagttttattgttataagaggggaagatgttatgaaagtttcaattaatcttttgagcactatattagagtagtggttatgcacttgcattgcttacaaacgagctgtacagaagggtatacctcccaaatacttagtgtagttgacttgtcttgggttgcactgtaaggcagagtactcagagtagttggaaaatgcagaatcagttgtataatttttttttataaaaacggtgttttttaggctaaagaataaagtatcatatcttaggaggggaaaatttataactgacattttttccccagcccaatatgggctgtatacgttttattgtttcttaatttttttcttattttttctgtaggaaaaaatcttaataaaaactaccccaatgttttaacttcatgtatgatattaaatgggtagttttaacacttgaatatgttgagggcttctgccttgaggcagggcttgatatatttttaatttacaaagaattaaacatattcataaaagtgaggcattttatctctttttattttcttttctcatagccacccagttggactagtggtcttcccctggtccttcagtaaaatgctccattgctgccatttccattgttgttacttgatgctttcattcctgagaaggcagggctacagtctctggaatttcataaatgcatgacatacccctccccccacaacctacacacaaaggatctaatgcttcatagaacctgtgctaccttttcatgttggagttggttttcttatcacagtcagggttcttaaggccgtcccatcaggacaaatatttaccttccattttatttctgtttgtcccaattataaagactattttcagtttcaggagtagaacagggtttagcaaaaatatgtagagtatcaaagttacctactgcaactttttgttctttgtccactagccaggtgatttaacccactaaatccattagcttgctgaaaaatgttagcaaagtaaatcacgagaagaaagataatttgagaagagaaatggtatggtacaatgaaagaagctgtaaagattaggaaagactagtaagtgaatatttttaaaaatttagttgtagatttcaatgggatacgataggacagaaaagattttttaaaaagcagaaagagtgtttcatggtgaaagtactgggggagggtggacaaagcatgcacacatgccaatttgaaaatcaagtgtgacttacctcacgtagagtatgaatacatggtccacagttatggtcaacaagcgttttcaagaaaaactcatgatgtgttacacccatccatatttagagatgagaattaaatgattacaagctaaaatgtgctgtatactgtattaattttgagatagctttctacttgatgtatatttctttgagggtttctatctagttagaatttcagcttctgctgtgggaccaatgagagctgtatgagtttttttttttttttccttttccattattttattttttgttttttgtttaccaatttgctaattaattacaagtaagtgaaaacttactttcacacttgaatgataagcttgccttgctctttggaaaatgatgattgttattacagaagtgaaacaaacttctattcaggctacagtaggcatacaataacctaaagatctcatagaagtatactgagagtctaaaatacattctagtagtgcatgtcttggtgtgcttttgtttgtttgctttctaaaagaactaatgaatctgtatattgtaaactgtggtgttttacatgtcaattcatttttttaatgaaagaaaatttgttgattactgaaatgagaaagtgtagcttttcattaattctcttatgttttttattcttgatattgttcttttataccacccactttttaatgtttttggttaaactccatttatataatgtaggatgcatataaagttctcattggtgatgttgaagaaagagatgactcttctggcctttctctagttttcttcctcatatgtccctgtactgagaacttctaaagcttatcattataaacctaaggcagtgatttgaaagtttacatttttcatgattttcaaataccaatgaaatgtaacttttaaatattcctcactgtgtgttttatattcactgtcaagaaaattcagaatgtagattgtgtggacagctatacacaacttaataattatatatcagataaactgaataaaaaactttgtaagagtggtctacgcacacaggatcttgtcctccctaggcgtggatagagagatgccataatctgccagcatttggggagatcatggtaaatacttgaggcgttgatacatagtgcagtgagccaatttccttttcagttgtcactcagcaccataacatcacgaagaacatcattaatgcaaacctctcactaagccttcagaccaaagtggctttctgatggactctgcctgtctgtctacaagtggagtcagattcaaagtagaaatgtatccatccttgggaaagaaaataggaagtcttcccccactgtaggagtatataaaaatgtctcctggttgcttaattcccaacactcaatttccttcttctaaacacatttataaggagcaagagatggtgcacttattatgaattaatattaagcaatcactaaaagaaaggaatattctcttcctttcaatcagaaaccctgatatgtaagttgtgcaattaatgctaaagcatataaagtctttaagctgataagtatctgtaatcaaataatgaaaaaaggaaagcagttaaatgaacacactattcagggtcaaatatgttcagcaaaaagccgtagcgggtctttgatcatggttagattcacagtgatatcaaacagttggttctcatgtaacagctaaatgtttcagtttttttttttttattaaatttggcatttcacactgagatctgtattcctagtgaataaaagacagctactatattaggagggattccattttcacaattgcaaaacagatatttcaggaacatgggccacaaaatgtactcctttcacagtgttctcctcttctgaactgtgcagttatctattaaattttctaatagatatttgtgtaaggtgtatgtatgcttgtgcaattatttaaaaaacggttttggaaaacagtgtatttattaaagaaaattacttatggggcatgtacaaaactgtaaaaaaaaaaaaaaagtaaaaaaaatcacattcaatttgcccagtaaagttgtttttgtgaaatttctgtgttgttgaataaaggactttagtactc

SEQ ID NO: 7116 - DNA, 746 bp, Homo sapiens
  source 1..746: mol_type = unassigned DNA
ggcagcaggaccagcatgcaccaccgaaacgactcccagaggctggggaaagctggctgcccgccagagccgtcgttgcaaatggcaaatactaatttcctctccaccttatcccctgaacactgcagacctttggcgggggaatgcatgaacaagctcaaatgcggcgctgctgaagcagagataatgaatctccccgagcgcgtggggactttttccgctatcccggctttagggggcatctcattacctccaggggtcatcgtcatgacagcccttcactcccccgcagcagcctcagcagccgtcacagacagtgcgtttcaaattgccaatctggcagactgcccgcagaatcattcctcctcctcctcgtcctcctcagggggagctggcggagccaacccagccaagaagaagaggaaaaggtgtggggtctgcgtgccctgcaagaggctcatcaactgtggcgtctgcagcagttgcaggaaccgcaaaacgggacaccagatctgcaaatttagaaaatgtgaagagctaaagaaaaaacctggcacttcactagagagaacacctgttcccagcgctgaagcattccgatggttcttttaaagcagtagtatatcttattttcaaggcatttggaaatgaagggcaaactaatgtcttgttttaagaaactgcttagtccaccactgaagaaaatatccagaaattattttcattttatgtatagggctttcttc

SEQ ID NO: 7117 - DNA, 2658 bp, Homo sapiens
  source 1..2658: mol_type = unassigned DNA
gttttgccggcagcccccgggcagcgttcatagctcctgcccgggcgggcgcgcggcggcggcggcagaggcggctgagcctgagcggggatgtagaggcggcggcagcagaggcggcactggcggcaagagcagacgcccgagccgagcgagaagagcggcagagccttatcccctgaagccgggccccgcgtcccagccctgcccagcccgcgcccagccatgcgcgccgcctgctgagtccgggcgccgcacgctgagccctccgcccgcgagccgcgctcagctcgggggtgattagttgctttttgttgttttttaatttgggccgcggggagggggaggaggggcaggtgctgcaggctcccccccctccccgcctcgggccagccgcggcggcgcgactcgggctccggacccgggcactgctggcggctggagcggagcgcaccgcggcggtggtgcccagagcggagcgcagctccctgccccgcccctccccctcggcctcgcggcgacggcggcggtggcggcttggacgactcggagagccgagtgaagacatttccacctggacacctgaccatgtgcctgccctgagcagcgaggcccaccaggcatctctgttgtgggcagcagggccaggtcctggtctgtggaccctcggcagttggcaggctccctctgcagtggggtctgggcctcggccccaccatgtcgagcctcggcggtggctcccaggatgccggcggcagtagcagcagcagcaccaatggcagcggtggcagtggcagcagtggcccaaaggcaggagcagcagacaagagtgcagtggtggctgccgccgcaccagcctcagtggcagatgacacaccaccccccgagcgtcggaacaagagcggtatcatcagtgagcccctcaacaagagcctgcgccgctcccgcccgctctcccactactcttcttttggcagcagtggtggtagtggcggtggcagcatgatgggcggagagtctgctgacaaggccactgcggctgcagccgctgcctccctgttggccaatgggcatgacctggcggcggccatggcggtggacaaaagcaaccctacctcaaagcacaaaagtggtgctgtggccagcctgctgagcaaggcagagcgggccacggagctggcagccgagggacagctgacgctgcagcagtttgcgcagtccacagagatgctgaagcgcgtggtgcaggagcatctcccgctgatgagcgaggcgggtgctggcctgcctgacatggaggctgtggcaggtgccgaagccctcaatggccagtccgacttcccctacctgggcgctttccccatcaacccaggcctcttcattatgaccccggcaggtgtgttcctggccgagagcgcgctgcacatggcgggcctggctgagtaccccatgcagggagagctggcctctgccatcagctccggcaagaagaagcggaaacgctgcggcatgtgcgcgccctgccggcggcgcatcaactgcgagcagtgcagcagttgtaggaatcgaaagactggccatcagatttgcaaattcagaaaatgtgaggaactcaaaaagaagccttccgctgctctggagaaggtgatgcttccgacgggagccgccttccggtggtttcagtgacggcggcggaacccaaagctgccctctccgtgcaatgtcactgctcgtgtggtctccagcaagggattcgggcgaagacaaacggatgcacccgtctttagaaccaaaaatattctctcacagatttcattcctgtttttatatatatattttttgttgtcgttttaacatctccacgtccctagcataaaaagaaaaagaaaaaaatttaaactgctttttcggaagaacaacaacaaaaaagaggtaaagacgaatctataaagtaccgagacttcctgggcaaagaatggacaatcagtttccttcctgtgtcgatgtcgatgttgtctgtgcaggagatgcagtttttgtgtagagaatgtaaattttctgtaaccttttgaaatctagttactaataagcactactgtaatttagcacagtttaactccaccctcatttaaacttcctttgattctttccgaccatgaaatagtgcatagtttgcctggagaatccactcacgttcataaagagaatgttgatggcgccgtgtagaagccgctctgtatccatccacgcgtgcagagctgccagcagggagctcacagaaggggagggagcaccaggccagctgagctgcacccacagtcccgagactgggatcccccaccccaacagtgattttggaaaaaaaaatgaaagttctgttcgtttatccattgcgatctggggagccccatctcgatatttccaatcctggctacttttcttagagaaaataagtcctttttttctggccttgctaatggcaacagaagaaagggcttctttgcgtggtcccctgctggtgggggtgggtccccagggggccccctgcggcctgggcccccctgcccacggccagcttcctgctgatgaacatgctgtttgtattgttttaggaaaccaggctgttttgtgaataaaacgaatgcatgtttgtgtcacgaa

SEQ ID NO: 7118 - DNA, 503 bp, Homo sapiens
  source 1..503: mol_type = unassigned DNA
actgcgttttcttcgcctcgcagaggaaggtcggccttgcacaaatccgcccccacgaatcccaaagaattggagaaaacttccactttgggattatatgcagttgggattatatgagcccggggcttgcaccatggagtgaagacatttccacctggacacctgaccatgtgcctgccctgagcagcgaggcccaccaggcatctctgttgtgggcagcagggccaggtcctggtctgtggaccctcggcagttggcaggctccctctgcagtggggtctgggcctcggccccaccatgtcgagcctcggcggtggctcccaggatgccggcggcagtagcagcagcagcaccaatggcagcggtggcagtggcagcagtggcccaaaggcaggagcagcagacaagagtgcagtggtggctgccgccgcaccagcctcagtggcagatgacacaccaccccccgagcgtcggaacaagagcggtatcatcagtgagcccct

SEQ ID NO: 7119 - DNA, 581 bp, Homo sapiens
  source 1..581: mol_type = unassigned DNA
cccccggggttcggtgcgcggccggggccggagttcgctgcaagtcggcggaaagtttggctgcgcgggttcccccgaagttcagagatagagtttcaccatgttgtccagggtggtctcaaaactcctgagctcaagcgatctgcctgcctctgcttcccaaagtgctgagattacagagtgaagacatttccacctggacacctgaccatgtgcctgccctgagcagcgaggcccaccaggcatctctgttgtgggcagcagggccaggtcctggtctgtggaccctcggcagttggcaggctccctctgcagtggggtctgggcctcggccccaccatgtcgagcctcggcggtggctcccaggatgccggcggcagtagcagcagcagcaccaatggcagcggtggcagtggcagcagtggcccaaaggcaggagcagcagacaagagtgcagtggtggctgccgccgcaccagcctcagtggcagatgacacaccaccccccgagcgtcggaacaagagcggtatcatcagtgagcccctcaacaagagcctgcgccgctcccgcccgctctccca

SEQ ID NO: 7120 - DNA, 900 bp, Homo sapiens
  source 1..900: mol_type = unassigned DNA
gcttagcattccaggccctgggcatctccaagtgccccaggtgggggcactctcctggggtctgtgacagcttgcccccaaccacggagaggtgacaggcacgagatagagtttcaccatgttgtccagggtggtctcaaaactcctgagctcaagcgatctgcctgcctctgcttcccaaagtgctgagattacagagtgaagacatttccacctggacacctgaccatgtgcctgccctgagcagcgaggcccaccaggcatctctgttgtgggcagcagggccaggtcctggtctgtggaccctcggcagttggcaggctccctctgcagtggggtctgggcctcggccccaccatgtcgagcctcggcggtggctcccaggatgccggcggcagtagcagcagcagcaccaatggcagcggtggcagtggcagcagtggcccaaaggcaggagcagcagacaagagtgcagtggtggctgccgccgcaccagcctcagtggcagatgacacaccaccccccgagcgtcggaacaagagcggtatcatcagtgagcccctcaacaagagcctgcgccgctcccgcccgctctcccactactcttcttttggcagcagtggtggtagtggcggtggcagcatgatgggcggagagtctgctgacaaggccactgcggctgcagccgctgcctccctgttggccaatgggcatgacctggcggcggccatggcggtggacaaaagcaaccctacctcaaagcacaaaagtggtgctgtggccagcctgctgagcaaggcagagcgggccacggagctggcagccgagggacagctgacgctgcagcagtttgcgcagtccacagagatgctgaagcgcgtggtgcaggagcatctcccg

SEQ ID NO: 7121 - DNA, 506 bp, Homo sapiens
  source 1..506: mol_type = unassigned DNA
attccaggccctgggcatctccaagtgccccaggtgggggcactctcctggggtctgtgacagcttgcccccaaccacggagaggtgacaggcacgagtgaagacatttccacctggacacctgaccatgtgcctgccctgagcagcgaggcccaccaggcatctctgttgtgggcagcagggccaggtcctggtctgtggaccctcggcagttggcaggctccctctgcagtggggtctgggcctcggccccaccatgtcgagcctcggcggtggctcccaggatgccggcggcagtagcagcagcagcaccaatggcagcggtggcagtggcagcagtggcccaaaggcaggagcagcagacaagagtgcagtggtggctgccgccgcaccagcctcagtggcagatgacacaccaccccccgagcgtcggaacaagagcggtatcatcagtgagcccctcaacaagagcctgcgccgctcccgcccgctctcccactactctt

SEQ ID NO: 7122 - DNA, 777 bp, Homo sapiens
  source 1..777: mol_type = unassigned DNA
gggcactgctggcggctggagcggagcgcaccgcggcggtggtgcccagagcggagcgcagctccctgccccgcccctccccctcggcctcgcggcgacggcggcggtggcggcttggacgactcggagagccgagtgaagacatttccacctggacacctgaccatgtgcctgccctgagcagcgaggcccaccaggcatctctgttgtgggcagcagggccaggtcctggtctgtggaccctcggcagttggcaggctccctctgcagtggggtctgggcctcggccccaccatgtcgagcctcggcggtggctcccaggatgccggcggcagtagcagcagcagcaccaatggcagcggtggcagtggcagcagtggcccaaaggcaggagcagcagacaagagtgcagtggtggctgccgccgcaccagcctcagtggcagatgacacaccaccccccgagcgtcggaacaagagcggtatcatcagtgagcccctcaacaagagcctgcgccgctcccgcccgctctcccactactcttcttttggcagcagtggtggtagtggcggtggcagcatgatgggcggagagtctgctgacaaggccactgcggctgcagccgctgcctccctgttggccaatgggcatgacctggcggcggccatggcggtggacaaaagcaaccctacctcaaagcacaaaagtggtgctgtggccagcctgctgagcaaggcagagcgggccacggagctggcagccgagggacagctgacg

SEQ ID NO: 7123 - DNA, 568 bp, Homo sapiens
  source 1..568: mol_type = unassigned DNA
gcgcacctgagctggggggcgcggccaaattctccctcccggtcctcgaagcttctggccccgctctagagggggcagaaagatagcagatttccccggagagtgaagacatttccacctggacacctgaccatgtgcctgccctgagcagcgaggcccaccaggcatctctgttgtgggcagcagggccaggtcctggtctgtggaccctcggcagttggcaggctccctctgcagtggggtctgggcctcggccccaccatgtcgagcctcggcggtggctcccaggatgccggcggcagtagcagcagcagcaccaatggcagcggtggcagtggcagcagtggcccaaaggcaggagcagcagacaagagtgcagtggtggctgccgccgcaccagcctcagtggcagatgacacaccaccccccgagcgtcggaacaagagcggtatcatcagtgagcccctcaacaagagcctgcgccgctcccgcccgctctcccactactcttcttttggcagcagtggtggtagtggcggtggcagcatgatgggcggagagtctgctg

SEQ ID NO: 7124 - DNA, 472 bp, Homo sapiens
  source 1..472: mol_type = unassigned DNA
cccctccccgcctcgggccagccgcggcggcgcgactcgggctccggacccgggcactgctggcggctggagcggagcgcaccgcggcggtggtgcccagagcggagcgcagctccctgccccgcccctccccctcggcctcgcggcgacggcggcggtggcggcttggacgactcggagagccgagatagagtttcaccatgttgtccagggtggtctcaaaactcctgagctcaagcgatctgcctgcctctgcttcccaaagtgctgagattacagagtgaagacatttccacctggacacctgaccatgtgcctgccctgagcagcgaggcccaccaggcatctctgttgtgggcagcagggccaggtcctggtctgtggaccctcggcagttggcaggctccctctgcagtggggtctgggcctcggccccaccatgtcgagcctcggcggtggctcccaggatgcc

SEQ ID NO: 7125 - DNA, 542 bp, Homo sapiens
  source 1..542: mol_type = unassigned DNA
aaagccttccccaggggccttgtggtgccctccaccctgtcctgagctgccgctgcgggggtggcagatgctgtttcatcggtcgagagtgaagacatttccacctggacacctgaccatgtgcctgccctgagcagcgaggcccaccaggcatctctgttgtgggcagcagggccaggtcctggtctgtggaccctcggcagttggcaggctccctctgcagtggggtctgggcctcggccccaccatgtcgagcctcggcggtggctcccaggatgccggcggcagtagcagcagcagcaccaatggcagcggtggcagtggcagcagtggcccaaaggcaggagcagcagacaagagtgcagtggtggctgccgccgcaccagcctcagtggcagatgacacaccaccccccgagcgtcggaacaagagcggtatcatcagtgagcccctcaacaagagcctgcgccgctcccgcccgctctcccactactcttcttttggcagcagtggtggtagtggcggtggcagcatgatgggcg

SEQ ID NO: 7126 - DNA, 1892 bp, Homo sapiens
  source 1..1892: mol_type = unassigned DNA
gttcggtgcgcggccggggccggagttcgctgcaagtcggcggaaagtttggctgcgcgggttcccccgaagttcagagtgaagacatttccacctggacacctgaccatgtgcctgccctgagcagcgaggcccaccaggcatctctgttgtgggcagcagggccaggtcctggtctgtggaccctcggcagttggcaggctccctctgcagtggggtctgggcctcggccccaccatgtcgagcctcggcggtggctcccaggatgccggcggcagtagcagcagcagcaccaatggcagcggtggcagtggcagcagtggcccaaaggcaggagcagcagacaagagtgcagtggtggctgccgccgcaccagcctcagtggcagatgacacaccaccccccgagcgtcggaacaagagcggtatcatcagtgagcccctcaacaagagcctgcgccgctcccgcccgctctcccactactcttcttttggcagcagtggtggtagtggcggtggcagcatgatgggcggagagtctgctgacaaggccactgcggctgcagccgctgcctccctgttggccaatgggcatgacctggcggcggccatggcggtggacaaaagcaaccctacctcaaagcacaaaagtggtgctgtggccagcctgctgagcaaggcagagcgggccacggagctggcagccgagggacagctgacgctgcagcagtttgcgcagtccacagagatgctgaagcgcgtggtgcaggagcatctcccgctgatgagcgaggcgggtgctggcctgcctgacatggaggctgtggcaggtgccgaagccctcaatggccagtccgacttcccctacctgggcgctttccccatcaacccaggcctcttcattatgaccccggcaggtgtgttcctggccgagagcgcgctgcacatggcgggcctggctgagtaccccatgcagggagagctggcctctgccatcagctccggcaagaagaagcggaaacgctgcggcatgtgcgcgccctgccggcggcgcatcaactgcgagcagtgcagcagttgtaggaatcgaaagactggccatcagatttgcaaattcagaaaatgtgaggaactcaaaaagaagccttccgctgctctggagaaggtgatgcttccgacgggagccgccttccggtggtttcagtgacggcggcggaacccaaagctgccctctccgtgcaatgtcactgctcgtgtggtctccagcaagggattcgggcgaagacaaacggatgcacccgtctttagaaccaaaaatattctctcacagatttcattcctgtttttatatatatattttttgttgtcgttttaacatctccacgtccctagcataaaaagaaaaagaaaaaaatttaaactgctttttcggaagaacaacaacaaaaaagaggtaaagacgaatctataaagtaccgagacttcctgggcaaagaatggacaatcagtttccttcctgtgtcgatgtcgatgttgtctgtgcaggagatgcagtttttgtgtagagaatgtaaattttctgtaaccttttgaaatctagttactaataagcactactgtaatttagcacagtttaactccaccctcatttaaacttcctttgattctttccgaccatgaaatagtgcatagtttgcctggagaatccactcacgttcataaagagaatgttgatggcgccgtgtagaagccgctctgtatccatccacgcgtgcagagctgccagcagggagctcacagaaggggagggagcaccaggccagctgagctgcacccacagtcccgagactgggatcccccaccccaacagtgattttggaaaaaaaaatgaaa

SEQ ID NO: 7127 - DNA, 810 bp, Homo sapiens
  source 1..810: mol_type = unassigned DNA
aggtgggggcactctcctggggtctgtgacagcttgcccccaaccacggagaggtgacagagtgaagacatttccacctggacacctgaccatgtgcctgccctgagcagcgaggcccaccaggcatctctgttgtgggcagcagggccaggtcctggtctgtggaccctcggcagttggcaggctccctctgcagtggggtctgggcctcggccccaccatgtcgagcctcggcggtggctcccaggatgccggcggcagtagcagcagcagcaccaatggcagcggtggcagtggcagcagtggcccaaaggcaggagcagcagacaagagtgcagtggtggctgccgccgcaccagcctcagtggcagatgacacaccaccccccgagcgtcggaacaagagcggtatcatcagtgagcccctcaacaagagcctgcgccgctcccgcccgctctcccactactcttcttttggcagcagtggtggtagtggcggtggcagcatgatgggcggagagtctgctgacaaggccactgcggctgcagccgctgcctccctgttggccaatgggcatgacctggcggcggccatggcggtggacaaaagcaaccctacctcaaagcacaaaagtggtgctgtggccagcctgctgagcaaggcagagcgggccacggagctggcagccgagggacagctgacgctgcagcagtttgcgcagtccacagagatgctgaagcgcgtggtgcaggagcatctcccgctgatgagcgaggcgggtgctggcctgcctgacatggaggctgtggc

SEQ ID NO: 7128 - DNA, 442 bp, Homo sapiens
  source 1..442: mol_type = unassigned DNA
acaggatctcactctgtcatccaggctggaatgcagtggcatgattataactcactgcatcctcaacctcctgggctcaagcagtcctcccacctcagcctcctgagtagctaggactacaggcatgtaccaccacacctggttaacttttgtattttttgcagagatagagtttcaccatgttgtccagggtggtctcaaaactcctgagctcaagcgatctgcctgcctctgcttcccaaagtgctgagattacagagtgaagacatttccacctggacacctgaccatgtgcctgccctgagcagcgaggcccaccaggcatctctgttgtgggcagcagggccaggtcctggtctgtggaccctcggcagttggcaggctccctctgcagtggggtctgggcctcggccccaccatgtcgagcctcggcggtggctcc

SEQ ID NO: 7129 - DNA, 558 bp, Homo sapiens
  source 1..558: mol_type = unassigned DNA
gatttttgccctgggaagagatgggaacagctgaaggagattggcctccgagttcccagccagcccccggaacttgggtagaacccccctacccctcatcctcgcagtagctgggtctctcccagggacgcccctagtcagccttggcctccctctccatgccacctccctttccaagagtgaagacatttccacctggacacctgaccatgtgcctgccctgagcagcgaggcccaccaggcatctctgttgtgggcagcagggccaggtcctggtctgtggaccctcggcagttggcaggctccctctgcagtggggtctgggcctcggccccaccatgtcgagcctcggcggtggctcccaggatgccggcggcagtagcagcagcagcaccaatggcagcggtggcagtggcagcagtggcccaaaggcaggagcagcagacaagagtgcagtggtggctgccgccgcaccagcctcagtggcagatgacacaccaccccccgagcgtcggaacaagagcggtatcatcagtgagcccctcaacaagagcctgc

SEQ ID NO: 7130 - DNA, 878 bp, Homo sapiens
  source 1..878: mol_type = unassigned DNA
cggggttcggtgcgcggccggggccggagttcgctgcaagtcggcggaaagtttggctgcgcgggttcccccgaagttcagggtcctcttgcctgcccagcttgggctgatggagacagatgtaattatggaattttgcttgggaaattaatttgaaaaagttaattaattggtggttccggaggtggcgggctccacgcccggccagtcttgctgacgtcagtgctgacccactggagacgtgcagcttccgggcaagctgggcagagggaccccggtgacctggctgggcagccctggaacagagtgaagacatttccacctggacacctgaccatgtgcctgccctgagcagcgaggcccaccaggcatctctgttgtgggcagcagggccaggtcctggtctgtggaccctcggcagttggcaggctccctctgcagtggggtctgggcctcggccccaccatgtcgagcctcggcggtggctcccaggatgccggcggcagtagcagcagcagcaccaatggcagcggtggcagtggcagcagtggcccaaaggcaggagcagcagacaagagtgcagtggtggctgccgccgcaccagcctcagtggcagatgacacaccaccccccgagcgtcggaacaagagcggtatcatcagtgagcccctcaacaagagcctgcgccgctcccgcccgctctcccactactcttcttttggcagcagtggtggtagtggcggtggcagcatgatgggcggagagtctgctgacaaggccactgcggctgcagccgctgcctccctgttggccaatgggcatgacctggcggcggccatggcggtggacaaaagcaaccctacctcaaagcacaaaag

SEQ ID NO: 7131 - DNA, 2627 bp, Homo sapiens
  source 1..2627: mol_type = unassigned DNA
agggcctggattttgacaatgtcaagatttaccgtatatccctgtttgtttggatacaccagtgacgtccacttctagaagacaaagttatattacttaaacaaccaaagatatgaaactatccatgaagaacaatattatcaatacacagcagtcttttgtaaccatgcccaatgtgattgtaccagatattgaaaaggaaatacgaaggatggaaaatggagcatgcagctccttttctgaggatgatgacagtgcctctacatctgaagaatcagagaatgaaaaccctcatgcaaggggttcctttagttataagtcactcagaaagggaggaccatcacagagggagcagtacctgcctggtgccattgcactttttaatgtgaacaacagcagcaataaggaccaggaaccagaagaaaaaaagaaaaagaaaaaagaaaagaagagcaagtcagatgataaaaacgaaaataaaaacgacccagagaagaaaaagaagaaaaaggacaaagagaagaaaaagaaagaggagaaaagcaaagataagaaagaagaggagaagaaagaagttgtggttattgatccctcgggaaacacatattacaactggctgttttgcatcacattacctgttatgtacaactggacaatggttattgccagagcatgttttgatgaacttcaatctgattacctagaatattggctcattttggattacgtatcagacatagtctatttaatcgatatgtttgtacgaacaaggacaggttacctagaacaaggactgctggtaaaggaagaacttaaactcataaataaatataaatccaacttgcaatttaaacttgatgttctgtcactgataccaactgatttgctgtattttaagttagggtggaactatccagaaattagattaaacaggttgttacggttctctcgtatgtttgagttcttccagagaacagaaacaaggacaaactatccaaacatcttcaggatttccaaccttgttatgtatatcgtcatcattatccactggaatgcatgtgtgttctactctatttctaaagctattggatttggaaatgatacatgggtctaccctgatattaatgatcctgaatttggccgtttggctagaaaatacgtatacagcctttactggtctacactgactttgactaccattggtgaaacaccccctcccgtgagggattctgagtatgtctttgtggtggttgatttcctaattggagtgttaatttttgctaccatcgttggtaacataggttctatgatttccaacatgaatgcagccagagcagaatttcaagcaagaattgatgctatcaagcaatatatgcattttcgaaatgtaagcaaagatatggaaaagagggttattaaatggtttgactacctgtggaccaacaaaaaaacagttgatgagaaagaagtcttaaagtatctacctgataaactaagagcagaaattgccatcaacgttcacttagacacattaaaaaaggtacgcatttttgctgattgtgaagctggtctgttggtggagttggtcttgaaattgcaaccccaagtctacagtcctggagattatatttgcaagaaaggggatatcggacgagagatgtacattatcaaggaaggcaaactcgctgtggtggcagatgatggagtcactcagtttgtggtattgagcgatggcagctacttcggtgagatcagcattcttaacattaaagggagcaaagctggcaatcgaagaacggccaatattaaaagtattggctactcagacctgttctgtctctcaaaagatgacctcatggaagctctaactgagtacccagatgccaaaactatgctggaagagaaagggaagcagattttaatgaaagatggtctactggatctaaacattgcaaatgctggcagtgatcctaaagatcttgaagagaaggttactcgaatggaggggtcagtagacctcctgcaaaccaggtttgcccgaatcttggctgagtatgagtccatgcagcagaaactgaaacaaagattaaccaaggttgagaaatttctgaaaccgcttattgacacagaattttcaagtattgagggacctggagcggaaagtgggcccatcgactctacatagaaccgaaaagctggtcattaacagggacatgcctcatgatccttttgatcctatgactgacatcaactaaaatttaaaagaagaggaagactcagttgggaaatttttccatgaggaaaatgtgctttggtgcaaggtacaaggcccacaccctctctgagagatactatgattaaaaaagctttatatcttgggatttttcacaactgataatgtgcaaagatataaactgattaacttgtcagtgtctgtattttctgattttttcacatacgctcattttatgtaatattcttcataaaaatgaataagtagccctcactttcatgccatttccattgttgagtgaagcgtatttgaagtaactgagaattaccatgtacatcatatttgggataacatttttaaaaattagactgcaataaagtaaaattaattatgc

SEQ ID NO: 7132 - DNA, 2867 bp, Homo sapiens
  source 1..2867: mol_type = unassigned DNA
aaaaatcagcatgtttattatttttaaaaaattagggcctggattttgacaatgtcaagatttaccgtatatccctgtttgtttggatacaccagtgacgtccacttctagaagacaaagttatattacttaaacaaccaaagatggagtctcgctcttcgcccaggctggagtgcagtggcgcgatctcggctcactgcagtcttcacctcccagattcaagcgatttccagctaatttttgtatttttagtagagatgggatttcaccatgttggccaagctggacttgaactcctgatctcaagtgatctgcccacctcagcctcccaaagtgctggtattacagatatgaaactatccatgaagaacaatattatcaatacacagcagtcttttgtaaccatgcccaatgtgattgtaccagatattgaaaaggaaatacgaaggatggaaaatggagcatgcagctccttttctgaggatgatgacagtgcctctacatctgaagaatcagagaatgaaaaccctcatgcaaggggttcctttagttataagtcactcagaaagggaggaccatcacagagggagcagtacctgcctggtgccattgcactttttaatgtgaacaacagcagcaataaggaccaggaaccagaagaaaaaaagaaaaagaaaaaagaaaagaagagcaagtcagatgataaaaacgaaaataaaaacgacccagagaagaaaaagaagaaaaaggacaaagagaagaaaaagaaagaggagaaaagcaaagataagaaagaagaggagaagaaagaagttgtggttattgatccctcgggaaacacatattacaactggctgttttgcatcacattacctgttatgtacaactggacaatggttattgccagagcatgttttgatgaacttcaatctgattacctagaatattggctcattttggattacgtatcagacatagtctatttaatcgatatgtttgtacgaacaaggacaggttacctagaacaaggactgctggtaaaggaagaacttaaactcataaataaatataaatccaacttgcaatttaaacttgatgttctgtcactgataccaactgatttgctgtattttaagttagggtggaactatccagaaattagattaaacaggttgttacggttctctcgtatgtttgagttcttccagagaacagaaacaaggacaaactatccaaacatcttcaggatttccaaccttgttatgtatatcgtcatcattatccactggaatgcatgtgtgttctactctatttctaaagctattggatttggaaatgatacatgggtctaccctgatattaatgatcctgaatttggccgtttggctagaaaatacgtatacagcctttactggtctacactgactttgactaccattggtgaaacaccccctcccgtgagggattctgagtatgtctttgtggtggttgatttcctaattggagtgttaatttttgctaccatcgttggtaacataggttctatgatttccaacatgaatgcagccagagcagaatttcaagcaagaattgatgctatcaagcaatatatgcattttcgaaatgtaagcaaagatatggaaaagagggttattaaatggtttgactacctgtggaccaacaaaaaaacagttgatgagaaagaagtcttaaagtatctacctgataaactaagagcagaaattgccatcaacgttcacttagacacattaaaaaaggtacgcatttttgctgattgtgaagctggtctgttggtggagttggtcttgaaattgcaaccccaagtctacagtcctggagattatatttgcaagaaaggggatatcggacgagagatgtacattatcaaggaaggcaaactcgctgtggtggcagatgatggagtcactcagtttgtggtattgagcgatggcagctacttcggtgagatcagcattcttaacattaaagggagcaaagctggcaatcgaagaacggccaatattaaaagtattggctactcagacctgttctgtctctcaaaagatgacctcatggaagctctaactgagtacccagatgccaaaactatgctggaagagaaagggaagcagattttaatgaaagatggtctactggatctaaacattgcaaatgctggcagtgatcctaaagatcttgaagagaaggttactcgaatggaggggtcagtagacctcctgcaaaccaggtttgcccgaatcttggctgagtatgagtccatgcagcagaaactgaaacaaagattaaccaaggttgagaaatttctgaaaccgcttattgacacagaattttcaagtattgagggacctggagcggaaagtgggcccatcgactctacatagaaccgaaaagctggtcattaacagggacatgcctcatgatccttttgatcctatgactgacatcaactaaaatttaaaagaagaggaagactcagttgggaaatttttccatgaggaaaatgtgctttggtgcaaggtacaaggcccacaccctctctgagagatactatgattaaaaaagctttatatcttgggatttttcacaactgataatgtgcaaagatataaactgattaacttgtcagtgtctgtattttctgattttttcacatacgctcattttatgtaatattcttcataaaaatgaataagtagccctcactttcatgccatttccattgttgagtgaagcgtatttgaagtaactgagaattaccatgtacatcatatttgggataacatttttaaaaattagactgcaataaagtaaaattaattatgcaa

SEQ ID NO: 7133 - DNA, 2746 bp, Homo sapiens
  source 1..2746: mol_type = unassigned DNA
tttttcctgcttcttgaatggtagagagcagtctatagccagagactcgtccctagctcgagctgagctttcgcttgccgtccaccactgcccaccactgtcgtttgctgccatcgcagacctgctgctgacttccatccctctggatccggcaagggcctggattttgacaatgtcaagatttaccgtatatccctgtttgtttggatacaccagtgacgtccacttctagaagacaaagttatattacttaaacaaccaaagatatgaaactatccatgaagaacaatattatcaatacacagcagtcttttgtaaccatgcccaatgtgattgtaccagatattgaaaaggaaatacgaaggatggaaaatggagcatgcagctccttttctgaggatgatgacagtgcctctacatctgaagaatcagagaatgaaaaccctcatgcaaggggttcctttagttataagtcactcagaaagggaggaccatcacagagggagcagtacctgcctggtgccattgcactttttaatgtgaacaacagcagcaataaggaccaggaaccagaagaaaaaaagaaaaagaaaaaagaaaagaagagcaagtcagatgataaaaacgaaaataaaaacgacccagagaagaaaaagaagaaaaaggacaaagagaagaaaaagaaagaggagaaaagcaaagataagaaagaagaggagaagaaagaagttgtggttattgatccctcgggaaacacatattacaactggctgttttgcatcacattacctgttatgtacaactggacaatggttattgccagagcatgttttgatgaacttcaatctgattacctagaatattggctcattttggattacgtatcagacatagtctatttaatcgatatgtttgtacgaacaaggacaggttacctagaacaaggactgctggtaaaggaagaacttaaactcataaataaatataaatccaacttgcaatttaaacttgatgttctgtcactgataccaactgatttgctgtattttaagttagggtggaactatccagaaattagattaaacaggttgttacggttctctcgtatgtttgagttcttccagagaacagaaacaaggacaaactatccaaacatcttcaggatttccaaccttgttatgtatatcgtcatcattatccactggaatgcatgtgtgttctactctatttctaaagctattggatttggaaatgatacatgggtctaccctgatattaatgatcctgaatttggccgtttggctagaaaatacgtatacagcctttactggtctacactgactttgactaccattggtgaaacaccccctcccgtgagggattctgagtatgtctttgtggtggttgatttcctaattggagtgttaatttttgctaccatcgttggtaacataggttctatgatttccaacatgaatgcagccagagcagaatttcaagcaagaattgatgctatcaagcaatatatgcattttcgaaatgtaagcaaagatatggaaaagagggttattaaatggtttgactacctgtggaccaacaaaaaaacagttgatgagaaagaagtcttaaagtatctacctgataaactaagagcagaaattgccatcaacgttcacttagacacattaaaaaaggtacgcatttttgctgattgtgaagctggtctgttggtggagttggtcttgaaattgcaaccccaagtctacagtcctggagattatatttgcaagaaaggggatatcggacgagagatgtacattatcaaggaaggcaaactcgctgtggtggcagatgatggagtcactcagtttgtggtattgagcgatggcagctacttcggtgagatcagcattcttaacattaaagggagcaaagctggcaatcgaagaacggccaatattaaaagtattggctactcagacctgttctgtctctcaaaagatgacctcatggaagctctaactgagtacccagatgccaaaactatgctggaagagaaagggaagcagattttaatgaaagatggtctactggatctaaacattgcaaatgctggcagtgatcctaaagatcttgaagagaaggttactcgaatggaggggtcagtagacctcctgcaaaccaggtttgcccgaatcttggctgagtatgagtccatgcagcagaaactgaaacaaagattaaccaaggttgagaaatttctgaaaccgcttattgacacagaattttcaagtattgagggacctggagcggaaagtgggcccatcgactctacatagaaccgaaaagctggtcattaacagggacatgcctcatgatccttttgatcctatgactgacatcaactaaaatttaaaagaagaggaagactcagttgggaaatttttccatgaggaaaatgtgctttggtgcaaggtacaaggcccacaccctctctgagagatactatgattaaaaaagctttatatcttgggatttttcacaactgataatgtgcaaagatataaactgattaacttgtcagtgtctgtattttctgattttttcacatacgctcattttatgtaatattcttcataaaaatgaataagtagccctcactttcatgccatttccattgttgagtgaagcgtatttgaagtaactgagaattaccatgtacatcatatttgggataacattttta

SEQ ID NO: 7134 - DNA, 543 bp, Homo sapiens
  source 1..543: mol_type = unassigned DNA
tttttcctgcttcttgaatggtagagagcagtctatagccagagactcgtccctagctcgagctgagctttcgcttgccgtccaccactgcccaccactgtcgtttgctgccatcgcagacctgctgctgacttccatccctctggatccggcaagatatgaaactatccatgaagaacaatattatcaatacacagcagtcttttgtaaccatgcccaatgtgattgtaccagatattgaaaaggaaatacgaaggatggaaaatggagcatgcagctccttttctgaggatgatgacagtgcctctacatctgaagaatcagagaatgaaaaccctcatgcaaggggttcctttagttataagtcactcagaaagggaggaccatcacagagggagcagtacctgcctggtgccattgcactttttaatgtgaacaacagcagcaataaggaccaggaaccagaagaaaaaaagaaaaagaaaaaagaaaagaagagcaagtcagatgataaaaacgaaaataaaaacgacccagagaaga

SEQ ID NO: 7135 - DNA, 589 bp, Homo sapiens
  source 1..589: mol_type = unassigned DNA
cgagccctgctgcccggggcttgttgcgaattctcagggcccccgcaggcctgggagcggcctgtgataactggtgtatctggcaggagtagcagctgccccttggcgcgactgctggagccgcgaactagagaaacacagacacgcctcatagagcaacagcgtctctcggagcgtggagcccgccaagctcgagctgagctttcgcttgccgtccaccactgcccaccactgtcgtttgctgccatcgcagacctgctgctgacttccatccctctggatccggcaagatatgaaactatccatgaagaacaatattatcaatacacagcagtcttttgtaaccatgcccaatgtgattgtaccagatattgaaaaggaaatacgaaggatggaaaatggagcatgcagctccttttctgaggatgatgacagtgcctctacatctgaagaatcagagaatgaaaaccctcatgcaaggggttcctttagttataagtcactcagaaagggaggaccatcacagagggagcagtacctgcctggtgccattgcactttttaatgtgaacaacagcagcaataaggac

SEQ ID NO: 7136 - DNA, 2837 bp, Homo sapiens
  source 1..2837: mol_type = unassigned DNA
tggcaggagtagcagctgccccttggcgcgactgctggagccgcgaactagagaaacacagacacgcctcatagagcaacagcgtctctcggagcgtggagcccgccaagctcgagctgagctttcgcttgccgtccaccactgcccaccactgtcgtttgctgccatcgcagacctgctgctgacttccatccctctggatccggcaagggcctggattttgacaatgtcaagatttaccgtatatccctgtttgtttggatacaccagtgacgtccacttctagaagacaaagttatattacttaaacaaccaaagatatgaaactatccatgaagaacaatattatcaatacacagcagtcttttgtaaccatgcccaatgtgattgtaccagatattgaaaaggaaatacgaaggatggaaaatggagcatgcagctccttttctgaggatgatgacagtgcctctacatctgaagaatcagagaatgaaaaccctcatgcaaggggttcctttagttataagtcactcagaaagggaggaccatcacagagggagcagtacctgcctggtgccattgcactttttaatgtgaacaacagcagcaataaggaccaggaaccagaagaaaaaaagaaaaagaaaaaagaaaagaagagcaagtcagatgataaaaacgaaaataaaaacgacccagagaagaaaaagaagaaaaaggacaaagagaagaaaaagaaagaggagaaaagcaaagataagaaagaagaggagaagaaagaagttgtggttattgatccctcgggaaacacatattacaactggctgttttgcatcacattacctgttatgtacaactggacaatggttattgccagagcatgttttgatgaacttcaatctgattacctagaatattggctcattttggattacgtatcagacatagtctatttaatcgatatgtttgtacgaacaaggacaggttacctagaacaaggactgctggtaaaggaagaacttaaactcataaataaatataaatccaacttgcaatttaaacttgatgttctgtcactgataccaactgatttgctgtattttaagttagggtggaactatccagaaattagattaaacaggttgttacggttctctcgtatgtttgagttcttccagagaacagaaacaaggacaaactatccaaacatcttcaggatttccaaccttgttatgtatatcgtcatcattatccactggaatgcatgtgtgttctactctatttctaaagctattggatttggaaatgatacatgggtctaccctgatattaatgatcctgaatttggccgtttggctagaaaatacgtatacagcctttactggtctacactgactttgactaccattggtgaaacaccccctcccgtgagggattctgagtatgtctttgtggtggttgatttcctaattggagtgttaatttttgctaccatcgttggtaacataggttctatgatttccaacatgaatgcagccagagcagaatttcaagcaagaattgatgctatcaagcaatatatgcattttcgaaatgtaagcaaagatatggaaaagagggttattaaatggtttgactacctgtggaccaacaaaaaaacagttgatgagaaagaagtcttaaagtatctacctgataaactaagagcagaaattgccatcaacgttcacttagacacattaaaaaaggtacgcatttttgctgattgtgaagctggtctgttggtggagttggtcttgaaattgcaaccccaagtctacagtcctggagattatatttgcaagaaaggggatatcggacgagagatgtacattatcaaggaaggcaaactcgctgtggtggcagatgatggagtcactcagtttgtggtattgagcgatggcagctacttcggtgagatcagcattcttaacattaaagggagcaaagctggcaatcgaagaacggccaatattaaaagtattggctactcagacctgttctgtctctcaaaagatgacctcatggaagctctaactgagtacccagatgccaaaactatgctggaagagaaagggaagcagattttaatgaaagatggtctactggatctaaacattgcaaatgctggcagtgatcctaaagatcttgaagagaaggttactcgaatggaggggtcagtagacctcctgcaaaccaggtttgcccgaatcttggctgagtatgagtccatgcagcagaaactgaaacaaagattaaccaaggttgagaaatttctgaaaccgcttattgacacagaattttcaagtattgagggacctggagcggaaagtgggcccatcgactctacatagaaccgaaaagctggtcattaacagggacatgcctcatgatccttttgatcctatgactgacatcaactaaaatttaaaagaagaggaagactcagttgggaaatttttccatgaggaaaatgtgctttggtgcaaggtacaaggcccacaccctctctgagagatactatgattaaaaaagctttatatcttgggatttttcacaactgataatgtgcaaagatataaactgattaacttgtcagtgtctgtattttctgattttttcacatacgctcattttatgtaatattcttcataaaaatgaataagtagccctcactttcatgccatttccattgttgagtgaagcgtatttgaagtaactgagaattaccatgtacatcatatttgggataacatttttaaaaattagactgcaataaagtaaaattaattatgcaa

SEQ ID NO: 7137 - DNA, 405 bp, Homo sapiens
  source 1..405: mol_type = unassigned DNA
tattagcagcatgaggacagactaatacatagggtgaaacttttgattatatatgtaaatatataaaaatagcctttccactaataagacttctttctcctcagatatgaaactatccatgaagaacaatattatcaatacacagcagtcttttgtaaccatgcccaatgtgattgtaccagatattgaaaaggaaatacgaaggatggaaaatggagcatgcagctccttttctgaggatgatgacagtgcctctacatctgaagaatcagagaatgaaaaccctcatgcaaggggttcctttagttataagtcactcagaaagggaggaccatcacagagggagcagtacctgcctggtgccattgcactttttaatgtgaacaacagcagcaataaggacca

SEQ ID NO: 7138 - DNA, 2863 bp, Homo sapiens
  source 1..2863: mol_type = unassigned DNA
aaatcagcatgtttattatttttaaaaaattagggcctggattttgacaatgtcaagatttaccgtatatccctgtttgtttggatacaccagtgacgtccacttctagaagacaaagttatattacttaaacaaccaaagatggagtctcgctcttcgcccaggctggagtgcagtggcgcgatctcggctcactgcagtcttcacctcccagattcaagcgatttccagctaatttttgtatttttagtagagatgggatttcaccatgttggccaagctggacttgaactcctgatctcaagtgatctgcccacctcagcctcccaaagtgctggtattacagatatgaaactatccatgaagaacaatattatcaatacacagcagtcttttgtaaccatgcccaatgtgattgtaccagatattgaaaaggaaatacgaaggatggaaaatggagcatgcagctccttttctgaggatgatgacagtgcctctacatctgaagaatcagagaatgaaaaccctcatgcaaggggttcctttagttataagtcactcagaaagggaggaccatcacagagggagcagtacctgcctggtgccattgcactttttaatgtgaacaacagcagcaataaggaccaggaaccagaagaaaaaaagaaaaagaaaaaagaaaagaagagcaagtcagatgataaaaacgaaaataaaaacgacccagagaagaaaaagaagaaaaaggacaaagagaagaaaaagaaagaggagaaaagcaaagataagaaagaagaggagaagaaagaagttgtggttattgatccctcgggaaacacatattacaactggctgttttgcatcacattacctgttatgtacaactggacaatggttattgccagagcatgttttgatgaacttcaatctgattacctagaatattggctcattttggattacgtatcagacatagtctatttaatcgatatgtttgtacgaacaaggacaggttacctagaacaaggactgctggtaaaggaagaacttaaactcataaataaatataaatccaacttgcaatttaaacttgatgttctgtcactgataccaactgatttgctgtattttaagttagggtggaactatccagaaattagattaaacaggttgttacggttctctcgtatgtttgagttcttccagagaacagaaacaaggacaaactatccaaacatcttcaggatttccaaccttgttatgtatatcgtcatcattatccactggaatgcatgtgtgttctactctatttctaaagctattggatttggaaatgatacatgggtctaccctgatattaatgatcctgaatttggccgtttggctagaaaatacgtatacagcctttactggtctacactgactttgactaccattggtgaaacaccccctcccgtgagggattctgagtatgtctttgtggtggttgatttcctaattggagtgttaatttttgctaccatcgttggtaacataggttctatgatttccaacatgaatgcagccagagcagaatttcaagcaagaattgatgctatcaagcaatatatgcattttcgaaatgtaagcaaagatatggaaaagagggttattaaatggtttgactacctgtggaccaacaaaaaaacagttgatgagaaagaagtcttaaagtatctacctgataaactaagagcagaaattgccatcaacgttcacttagacacattaaaaaaggtacgcatttttgctgattgtgaagctggtctgttggtggagttggtcttgaaattgcaaccccaagtctacagtcctggagattatatttgcaagaaaggggatatcggacgagagatgtacattatcaaggaaggcaaactcgctgtggtggcagatgatggagtcactcagtttgtggtattgagcgatggcagctacttcggtgagatcagcattcttaacattaaagggagcaaagctggcaatcgaagaacggccaatattaaaagtattggctactcagacctgttctgtctctcaaaagatgacctcatggaagctctaactgagtacccagatgccaaaactatgctggaagagaaagggaagcagattttaatgaaagatggtctactggatctaaacattgcaaatgctggcagtgatcctaaagatcttgaagagaaggttactcgaatggaggggtcagtagacctcctgcaaaccaggtttgcccgaatcttggctgagtatgagtccatgcagcagaaactgaaacaaagattaaccaaggttgagaaatttctgaaaccgcttattgacacagaattttcaagtattgagggacctggagcggaaagtgggcccatcgactctacatagaaccgaaaagctggtcattaacagggacatgcctcatgatccttttgatcctatgactgacatcaactaaaatttaaaagaagaggaagactcagttgggaaatttttccatgaggaaaatgtgctttggtgcaaggtacaaggcccacaccctctctgagagatactatgattaaaaaagctttatatcttgggatttttcacaactgataatgtgcaaagatataaactgattaacttgtcagtgtctgtattttctgattttttcacatacgctcattttatgtaatattcttcataaaaatgaataagtagccctcactttcatgccatttccattgttgagtgaagcgtatttgaagtaactgagaattaccatgtacatcatatttgggataacatttttaaaaattagactgcaataaagtaaaattaattatgc

SEQ ID NO: 7139 - DNA, 2834 bp, Homo sapiens
  source 1..2834: mol_type = unassigned DNA
ctggcagataagtgctctggttgtacatggaggatgaccgaaaaaaccaatggtgtgaagagctccccagccaataatcacaaccatcatgcacctcctgccatcaaggccaatggcaaagatgaccacaggacaagcagcaggccacactctgcagctgacgatgacacctcctcagaactgcagaggctggcagacgtggatgccccacagcagggaaggagtggcttccgcaggatagttcgcctggtggggatcatcagagaatgggccaacaagaatttccgagaggaggaacctaggcctgactcattcctcgagcgttttcgtgggcctgaactccagactgtgaccacacaggagggggatggcaaaggcgacaaggatggcgaggacaaaggcaccaagaagaaatttgaactatttgtcttggacccagctggggattggtactactgctggctatttgtcattgccatgcccgtcctttacaactggtgcctgctggtggccagagcctgcttcagtgacctacagaaaggctactacctggtgtggctggtgctggattatgtctcagatgtggtctacattgcggacctcttcatccgattgcgcacaggtttcctggagcaggggctgctggtcaaagataccaagaaactgcgagacaactacatccacaccctgcagttcaagctggatgtggcttccatcatccccactgacctgatctattttgctgtggacatccacagccctgaggtgcgcttcaaccgcctgctgcactttgcccgcatgtttgagttctttgaccggacagagacacgcaccaactaccctaacatcttccgcatcagcaaccttgtcctctacatcttggtcatcatccactggaatgcctgcatctattatgccatctccaaatccataggctttggggtcgacacctgggtttacccaaacatcactgaccctgagtatggctacctggctagggaatacatctattgcctttactggtccacactgactctcactaccattggggagacaccaccccctgtaaaggatgaggagtacctatttgtcatctttgacttcctgattggcgtcctcatctttgccaccatcgtgggaaatgtgggctccatgatctccaacatgaatgccacccgggcagagttccaggctaagatcgatgccgtgaaacactacatgcagttccgaaaggtcagcaaggggatggaagccaaggtcattaggtggtttgactacttgtggaccaataagaagacagtggatgagcgagaaattctcaagaatctgccagccaagctcagggctgagatagccatcaatgtccacttgtccacactcaagaaagtgcgcatcttccatgattgtgaggctggcctgctggtagagctggtactgaaactccgtcctcaggtcttcagtcctggggattacatttgccgcaaaggggacatcggcaaggagatgtacatcattaaggagggcaaactggcagtggtggctgatgatggtgtgactcagtatgctctgctgtcggctggaagctgctttggcgagatcagtatccttaacattaagggcagtaaaatgggcaatcgacgcacagctaatatccgcagcctgggctactcagatctcttctgcttgtccaaggatgatcttatggaagctgtgactgagtaccctgatgccaagaaagtcctagaagagaggggtcgggagatcctcatgaaggagggactgctggatgagaacgaagtggcaaccagcatggaggtcgacgtgcaggagaagctagggcagctggagaccaacatggaaaccttgtacactcgctttggccgcctgctggctgagtacacgggggcccagcagaagctcaagcagcgcatcacagttctggaaaccaagatgaaacagaacaatgaagatgactacctgtctgatgggatgaacagccctgagctggctgctgctgacgagccataagacctggggcccaactgcctctccagcattggccttggccttgatcccagaagctagaggagctatttagatctccggatttacatgcattaccctcatgttccctgaattctcccaaaagcctctctgaccctgggtttttggcctaaacatccaagattccgcctccaagtttagcccaagtttgtggagagtacagactgcgttggctgggcttccgagagcttcggcctgcctaagtctgaggaagggagaagggggcagctgtctgccaggagtctggctcttttgctcatagcgacccctcccttggttctggcccccgctttttctaacatgtcttctgaatgcttcctttttccctgcacacgcatgtacttcgagcaccgactatagacatttagatcaggtacccagtgtctgtctcccacgacaggccaagggatgtgatagtgttgttgggagggggtagaagggtgcccactcagggttattcctcccccatcagatgctccagctcctgctctgtagattgatctgtctgtctgctagccaggatgggatctctgcagtcttctgtggaccaaggagatagacccggcttctggtccattccagggcagggagtgaggagcaaggcaactggcatttgtccacctggagacagaggtagctggcagctctggccatccctcccctatgaagagcattcctaaagaggccctgaaaactgctggtggtggggagactcttcaagttaatatctgcattagaggcacctatgagttaaaaaattcctttgaact

SEQ ID NO: 7140 - DNA, 3470 bp, Homo sapiens
  source 1..3470: mol_type = unassigned DNA
agcaatcatctggggggctaaatgtgacaaaccgagaagatggccaagatcaacacccaatactcccacccctccaggacccacctcaaggtaaagacctcagaccgagatctcaatcgcgctgaaaatggcctcagcagagcccactcgtcaagtgaggagacatcgtcagtgctgcagccggggatcgccatggagaccagaggactggctgactccgggcagggctccttcaccggccaggggatcgccaggctgtcgcgcctcatcttcttgctgcgcaggtgggctgccaggcatgtgcaccaccaggaccagggaccggactcttttcctgatcgtttccgtggagccgagcttaaggaggtgtccagccaagaaagcaatgcccaggcaaatgtgggcagccaggagccagcagacagagggagaagcgcctggcccctggccaaatgcaacactaacaccagcaacaacacggaggaggagaagaagacgaaaaagaaggatgcgatcgtggtggacccgtccagcaacctgtactaccgctggctgaccgccatcgccctgcctgtcttctataactggtatctgcttatttgcagggcctgtttcgatgagctgcagtccgagtacctgatgctgtggctggtcctggactactcggcagatgtcctgtatgtcttggatgtgcttgtacgagctcggacaggttttctcgagcaaggcttaatggtcagtgataccaacaggctgtggcagcattacaagacgaccacgcagttcaagctggatgtgttgtccctggtccccaccgacctggcttacttaaaggtgggcacaaactacccagaagtgaggttcaaccgcctactgaagttttcccggctctttgaattctttgaccgcacagagacaaggaccaactaccccaatatgttcaggattgggaacttggtcttgtacattctcatcatcatccactggaatgcctgcatctactttgccatttccaagttcattggttttgggacagactcctgggtctacccaaacatctcaatcccagagcatgggcgcctctccaggaagtacatttacagtctctactggtccaccttgacccttaccaccattggtgagaccccaccccccgtgaaagatgaggagtatctctttgtggtcgtagacttcttggtgggtgttctgatttttgccaccattgtgggcaatgtgggctccatgatctcgaatatgaatgcctcacgggcagagttccaggccaagattgattccatcaagcagtacatgcagttccgcaaggtcaccaaggacttggagacgcgggttatccggtggtttgactacctgtgggccaacaagaagacggtggatgagaaggaggtgctcaagagcctcccagacaagctgaaggctgagatcgccatcaacgtgcacctggacacgctgaagaaggttcgcatcttccaggactgtgaggcagggctgctggtggagctggtgctgaagctgcgacccactgtgttcagccctggggattatatctgcaagaagggagatattgggaaggagatgtacatcatcaacgagggcaagctggccgtggtggctgatgatggggtcacccagttcgtggtcctcagcgatggcagctacttcggggagatcagcattctgaacatcaaggggagcaagtcggggaaccgcaggacggccaacatccgcagcattggctactcagacctgttctgcctctcaaaggacgatctcatggaggccctcaccgagtaccccgaagccaagaaggccctggaggagaaaggacggcagatcctgatgaaagacaacctgatcgatgaggagctggccagggcgggcgcggaccccaaggaccttgaggagaaagtggagcagctggggtcctccctggacaccctgcagaccaggtttgcacgcctcctggctgagtacaacgccacccagatgaagatgaagcagcgtctcagccaactggaaagccaggtgaagggtggtggggacaagcccctggctgatggggaagttcccggggatgctacaaaaacagaggacaaacaacagtgaaaatgcagcatctgtctcctgcttcacagggtcgactgtcagggtgaccgtatgtggccgcagctgtgtggcatggaacttggtcagggttgaattccagctctactcaccctttgaaagctgtgtgactgcctgagagaacctgtttcttcacctaaaaaatgggactttttgtctcagtcccagtgaagtgccaggtttgattgtgaagtccgcatgaaacactgcaccaggcagggctttgcaaagtgcaaggtatccccagtccaagtatatgaaaacgtgcacacaggactctcattacttttttatggaatctgcaaggtgtttttaggctttttaatctgattttcttataaatgaaagattatttagtcacctttctcctgtccaacttcaccaccacctgataatgggtatataacaggaagctgaaggtacaacatagtgactaaaattcagacttacacaagacagtttgaggcatatttcttaatctggtatcacctcgtgtgttctttggggccctagaaaccctggcttttgggagtgctatggcaagtagaagttctgccggatggaaagaggctgccccatttgaggtcatttaaaatctgtgaagcaaatccagactccttgccgttcagccactgtgaaaccagaatctgcttcacagaaaaaagcatctcagttaggagaagagacatcccctccttctcacttgccaaagagattcaaagacagcccctatcctccattcttgagtcagggccctaggtgacctattctaactcaaggaggagagctatgtacagggagagcattttagattgaaggttggaatggtgtactaaaccaaaaaagctgacaactgagagttttagaagattagaccattaggaacgtatctttgcaaactgcccattcacccatgaagaggaagcctcaagatcccttggaattgcatcccaaggcaaagcttttggctcaccgaaagctcacagattgcagaaattagcttttttaaaaaacaaaccccagtaaatataatttcattaacattttataacagatttatatttttgagttccgtgattgcaaattatgacctcaaattccatccttcacttatgtaacatgttgcaaattacccaaagatgagtctttcttctttctttcctttttcctttcttcttcctttccttttttctttcttcttccttctttcttcctttttctctctcctcttttcctcctcaaaatgtatatattttaaaagccttaactgttagttatgcctgcattcatatttgcacaggaaaaataaagacctggatttaaaaata

SEQ ID NO: 7141 - DNA, 3841 bp, Homo sapiens
  source 1..3841: mol_type = unassigned DNA
gcttactcatccagtgtggattacactaccagcaaaacatcccaggaaggagtccagggtggccgcccacagttaggagagaacccagaacggaacgacggacttgtttgctttcttgcccctgactctccccgtcctccctgggagggttggggatgtgaactaatgacttctgcctctttcggaccgcctttgaggctccagagcctcaccttactttcccacggagagggaggccacaggctccttcagcagtcgccgagcagagtcctgggccgggagcgcgggggagggagcgagcggaactgcgcctaggaggccgagggaggaggcgctccgcagaccctggcgcgccgcggagaagctcaaactttggcaggcaatcatctggggggctaaatgtgacaaaccgagaagatggccaagatcaacacccaatactcccacccctccaggacccacctcaaggtaaagacctcagaccgagatctcaatcgcgctgaaaatggcctcagcagagcccactcgtcaagtgaggagacatcgtcagtgctgcagccggggatcgccatggagaccagaggactggctgactccgggcagggctccttcaccggccaggggatcgccaggctgtcgcgcctcatcttcttgctgcgcaggtgggctgccaggcatgtgcaccaccaggaccagggaccggactcttttcctgatcgtttccgtggagccgagcttaaggaggtgtccagccaagaaagcaatgcccaggcaaatgtgggcagccaggagccagcagacagagggagaagcgcctggcccctggccaaatgcaacactaacaccagcaacaacacggaggaggagaagaagacgaaaaagaaggatgcgatcgtggtggacccgtccagcaacctgtactaccgctggctgaccgccatcgccctgcctgtcttctataactggtatctgcttatttgcagggcctgtttcgatgagctgcagtccgagtacctgatgctgtggctggtcctggactactcggcagatgtcctgtatgtcttggatgtgcttgtacgagctcggacaggttttctcgagcaaggcttaatggtcagtgataccaacaggctgtggcagcattacaagacgaccacgcagttcaagctggatgtgttgtccctggtccccaccgacctggcttacttaaaggtgggcacaaactacccagaagtgaggttcaaccgcctactgaagttttcccggctctttgaattctttgaccgcacagagacaaggaccaactaccccaatatgttcaggattgggaacttggtcttgtacattctcatcatcatccactggaatgcctgcatctactttgccatttccaagttcattggttttgggacagactcctgggtctacccaaacatctcaatcccagagcatgggcgcctctccaggaagtacatttacagtctctactggtccaccttgacccttaccaccattggtgagaccccaccccccgtgaaagatgaggagtatctctttgtggtcgtagacttcttggtgggtgttctgatttttgccaccattgtgggcaatgtgggctccatgatctcgaatatgaatgcctcacgggcagagttccaggccaagattgattccatcaagcagtacatgcagttccgcaaggtcaccaaggacttggagacgcgggttatccggtggtttgactacctgtgggccaacaagaagacggtggatgagaaggaggtgctcaagagcctcccagacaagctgaaggctgagatcgccatcaacgtgcacctggacacgctgaagaaggttcgcatcttccaggactgtgaggcagggctgctggtggagctggtgctgaagctgcgacccactgtgttcagccctggggattatatctgcaagaagggagatattgggaaggagatgtacatcatcaacgagggcaagctggccgtggtggctgatgatggggtcacccagttcgtggtcctcagcgatggcagctacttcggggagatcagcattctgaacatcaaggggagcaagtcggggaaccgcaggacggccaacatccgcagcattggctactcagacctgttctgcctctcaaaggacgatctcatggaggccctcaccgagtaccccgaagccaagaaggccctggaggagaaaggacggcagatcctgatgaaagacaacctgatcgatgaggagctggccagggcgggcgcggaccccaaggaccttgaggagaaagtggagcagctggggtcctccctggacaccctgcagaccaggtttgcacgcctcctggctgagtacaacgccacccagatgaagatgaagcagcgtctcagccaactggaaagccaggtgaagggtggtggggacaagcccctggctgatggggaagttcccggggatgctacaaaaacagaggacaaacaacagtgaaaatgcagcatctgtctcctgcttcacagggtcgactgtcagggtgaccgtatgtggccgcagctgtgtggcatggaacttggtcagggttgaattccagctctactcaccctttgaaagctgtgtgactgcctgagagaacctgtttcttcacctaaaaaatgggactttttgtctcagtcccagtgaagtgccaggtttgattgtgaagtccgcatgaaacactgcaccaggcagggctttgcaaagtgcaaggtatccccagtccaagtatatgaaaacgtgcacacaggactctcattacttttttatggaatctgcaaggtgtttttaggctttttaatctgattttcttataaatgaaagattatttagtcacctttctcctgtccaacttcaccaccacctgataatgggtatataacaggaagctgaaggtacaacatagtgactaaaattcagacttacacaagacagtttgaggcatatttcttaatctggtatcacctcgtgtgttctttggggccctagaaaccctggcttttgggagtgctatggcaagtagaagttctgccggatggaaagaggctgccccatttgaggtcatttaaaatctgtgaagcaaatccagactccttgccgttcagccactgtgaaaccagaatctgcttcacagaaaaaagcatctcagttaggagaagagacatcccctccttctcacttgccaaagagattcaaagacagcccctatcctccattcttgagtcagggccctaggtgacctattctaactcaaggaggagagctatgtacagggagagcattttagattgaaggttggaatggtgtactaaaccaaaaaagctgacaactgagagttttagaagattagaccattaggaacgtatctttgcaaactgcccattcacccatgaagaggaagcctcaagatcccttggaattgcatcccaaggcaaagcttttggctcaccgaaagctcacagattgcagaaattagcttttttaaaaaacaaaccccagtaaatataatttcattaacattttataacagatttatatttttgagttccgtgattgcaaattatgacctcaaattccatccttcacttatgtaacatgttgcaaattacccaaagatgagtctttcttctttctttcctttttcctttcttcttcctttccttttttctttcttcttccttctttcttcctttttctctctcctcttttcctcctcaaaatgtatatattttaaaagccttaactgttagttatgcctgcattcatatttgcacaggaaaaataaagacctggattt

SEQ ID NO: 7142 - DNA, 2504 bp, Homo sapiens
  source 1..2504: mol_type = unassigned DNA
aaaacatcccaggaaggagtccagggtggccgcccacagttaggagagaacccagaacggaacgacggacttgtttgctttcttgcccctgactctccccgtcctccctgggagggttggggatgtgaactaatgacttctgcctctttcggaccgcctttgaggctccagagcctcaccttactttcccacggagagggaggccacaggctccttcagcagtcgccgagcagagtcctgggccgggagcgcgggggagggagcgagcggaactgcgcctaggaggccgagggaggaggcgctccgcagaccctggcgcgccgcggagaagctcaaactttggcaggcaatcatctggggggctaaatgtgacaaaccgagaagatggccaagatcaacacccaatactcccacccctccaggacccacctcaaggtaaagacctcagaccgagatctcaatcgcgctgaaaatggcctcagcagagcccactcgtcaagtgaggagacatcgtcagtgctgcagccggggatcgccatggagaccagaggactggctgactccgggcagggctccttcaccggccaggggatcgccaggctgtcgcgcctcatcttcttgctgcgcaggtgggctgccaggcatgtgcaccaccaggaccagggaccggactcttttcctgatcgtttccgtggagccgagcttaaggaggtgtccagccaagaaagcaatgcccaggcaaatgtgggcagccaggagccagcagacagagggagaaggaagaagacgaaaaagaaggatgcgatcgtggtggacccgtccagcaacctgtactaccgctggctgaccgccatcgccctgcctgtcttctataactggtatctgcttatttgcagggcctgtttcgatgagctgcagtccgagtacctgatgctgtggctggtcctggactactcggcagatgtcctgtatgtcttggatgtgcttgtacgagctcggacaggttttctcgagcaaggcttaatggtcagtgataccaacaggctgtggcagcattacaagacgaccacgcagttcaagctggatgtgttgtccctggtccccaccgacctggcttacttaaaggtgggcacaaactacccagaagtgaggttcaaccgcctactgaagttttcccggctctttgaattctttgaccgcacagagacaaggaccaactaccccaatatgttcaggattgggaacttggtcttgtacattctcatcatcatccactggaatgcctgcatctactttgccatttccaagttcattggttttgggacagactcctgggtctacccaaacatctcaatcccagagcatgggcgcctctccaggaagtacatttacagtctctactggtccaccttgacccttaccaccattggtgagaccccaccccccgtgaaagatgaggagtatctctttgtggtcgtagacttcttggtgggtgttctgatttttgccaccattgtgggcaatgtgggctccatgatctcgaatatgaatgcctcacgggcagagttccaggccaagattgattccatcaagcagtacatgcagttccgcaaggtcaccaaggacttggagacgcgggttatccggtggtttgactacctgtgggccaacaagaagacggtggatgagaaggaggtgctcaagagcctcccagacaagctgaaggctgagatcgccatcaacgtgcacctggacacgctgaagaaggttcgcatcttccaggactgtgaggcagggctgctggtggagctggtgctgaagctgcgacccactgtgttcagccctggggattatatctgcaagaagggagatattgggaaggagatgtacatcatcaacgagggcaagctggccgtggtggctgatgatggggtcacccagttcgtggtcctcagcgatggcagctacttcggggagatcagcattctgaacatcaaggggagcaagtcggggaaccgcaggacggccaacatccgcagcattggctactcagacctgttctgcctctcaaaggacgatctcatggaggccctcaccgagtaccccgaagccaagaaggccctggaggagaaaggacggcagatcctgatgaaagacaacctgatcgatgaggagctggccagggcgggcgcggaccccaaggaccttgaggagaaagtggagcagctggggtcctccctggacaccctgcagaccaggtttgcacgcctcctggctgagtacaacgccacccagatgaagatgaagcagcgtctcagccaactggaaagccaggtgaagggtggtggggacaagcccctggctgatggggaagttcccggggatgctacaaaaacagaggacaaacaacagtgaaaatgcagcatctgtctcctgcttcacagggtcgactgtcagggtgaccgtatgtggccgcagctgtgtggcatggaacttggtcaggg

SEQ ID NO: 7143 - DNA, 4034 bp, Homo sapiens
  source 1..4034: mol_type = unassigned DNA
gagtggcagcaagaaggcaattcctggctggcggttggcatctaagcaggcatcaggatgttgggctgggtccagagggtgctgcctcagcccccagggacccctcggaagaccaagatgcaggaggaagaggaagtggaaccagagccagagatggaggcggaggtggaaccagaaccgaatcctgaggaggccgagacagagtccgagtccatgccccccgaagagtcattcaaggaggaggaagtggctgtggcagacccaagccctcaggagaccaaggaggctgcccttacttccaccatatccctccgggcccagggcgctgagatttctgaaatgaatagtcccagccgcagggtactgacctggctcatgaagggcgtagagaaggtgatcccgcagcctgttcacagcatcacggaggacccggctcagatcctggggcatggcagcactggggacacagggtgcacagatgaacccaatgaggcccttgaggcccaagacactaggcctgggctgcggctgcttctgtggctggagcagaatctggaaagagtgcttcctcagccccccaaatcctctgaggtctggagagatgagcctgcagttgctacaggtgctgcctcagacccagcgcctccaggacgcccccaggaaatggggcccaagctgcaggcccgggagaccccctccctgcccacacccatccccctgcagcccaaggaggaacccaaggaggcaccagctccagagccccagcccggctcccaggcccagacctcctccctgccaccaaccagggaccctgccaggctggtggcatgggtcctgcacaggctggagatggccttgccgcagccagtgctacatgggaaaataggggaacaggagcctgactcccctgggatatgtgatgtgcagaccatcagcatccttcctggaggacaagtggagcctgaccttgtcctagaggaggttgaaccgccctgggaggatgcccaccaggatgtcagtaccagcccacagggtacagaggtggttccagcttatgaagaagagaacaaagctgtggagaagatgcccagagagctgtcccggattgaagaggagaaagaagatgaggaggaggaagaggaagaggaggaggaggaggaagaggaggaggtgactgaggtgctgctggatagctgtgtggtgtcgcaggtgggcgtgggccagagtgaagaagacgggacccggccccagagcacttcagatcagaagctgtgggaggaagttggggaggaggccaagaaggaggctgaagagaaggccaaggaggaggccgaggaggtggctgaagaggaggctgaaaaggagccccaggactgggcggagaccaaggaggagcctgaggctgaggccgaggctgccagttcaggagtgcctgccacgaaacagcacccagaagtgcaggtggaagatactgatgctgatagctgccccctcatggcagaagagaatccaccctcaaccgtgttgccgccaccgtctcctgccaaatcagacacccttatagtcccaagctcagcctcggggacacacaggaagaagctgccctctgaggatgatgaggctgaagagctcaaggcgttgtcaccagcagagtccccagtggttgcctggtctgaccccaccaccccgaaggacactgatggccaggaccgtgcggcctccacggccagcacaaatagcgccatcatcaacgaccggctccaggagctggtgaagctcttcaaggagcggacagagaaagtgaaggagaaactcattgaccctgacgtcacctctgatgaggagagccccaagccctccccagccaagaaagccccagagccagctccagacacaaagcccgctgaagccgagccagtggaagaggagcactattgcgacatgctctgctgcaagttcaaacaccgcccctggaagaagtaccagtttccccagagcattgacccgctgaccaacctgatgtatgtcctatggctgttcttcgtggtgatggcctggaattggaactgttggctgattcccgtgcgctgggccttcccctaccagaccccggacaacatccaccactggctgctgatggattacctatgcgacctcatctacttcctggacatcaccgtgttccagacacgcctgcagtttgtcagaggcggggacatcattacggacaaaaaggacatgcgaaataactacctgaagtctcgccgcttcaagatggacctgctcagcctcctgcccttggattttctctatttgaaagtcggtgtgaaccccctcctccgcctgccccgctgtttaaagtacatggccttcttcgagtttaacagccgcctggaatccatcctcagcaaagcctacgtgtacagggtcatcaggaccacagcctaccttctctacagcctgcatttgaattcctgtctttattactgggcatcggcctatcagggcctcggctccactcactgggtttacgatggcgtgggaaacagttatattcgctgttactactttgctgtgaagaccctcatcaccatcggggggctgcctgaccccaagacactctttgaaattgtcttccagctgctgaattatttcacgggcgtctttgctttctctgtgatgatcggacagatgagagatgtggtaggggccgccaccgccggacagacctactaccgcagctgcatggacagcacggtgaagtacatgaatttctacaagatccccaagtccgtgcagaaccgcgtcaagacctggtacgagtacacctggcactcgcaaggcatgctggatgagtcagagctgatggtgcagcttccagacaagatgcggctggacctcgccatcgacgtgaactacaacatcgttagcaaagtcgcactctttcagggctgtgaccggcagatgatctttgacatgctgaagaggcttcgctctgttgtctacctgcccaacgactatgtgtgcaagaagggggagatcggccgtgagatgtacatcatccaggcagggcaagtgcaggtcttgggcggccctgatgggaaatctgtgctggtgacgctgaaagctggatctgtgtttggagaaataagcttgctggctgttgggggcgggaaccggcgcacggccaacgtggtggcgcacgggtttaccaacctcttcatcctggataagaaggacctgaatgagattttggtgcattatcctgagtctcagaagttactccggaagaaagccaggcgcatgctgagaagcaacaataagcccaaggaggagaagagcgtgctgatccttccaccccgggcgggcaccccaaagctcttcaacgctgccctcgctatgacaggaaagatgggtggcaagggggcaaaaggcggcaaacttgctcacctccgggcccggctcaaagaactggccgcgctggaggcggctgcaaagcagcaagagttggtggaacaggccaagagctcgcaagacgtcaagggagaggaaggctccgccgccccagaccagcacacgcacccaaaggaggccgccaccgacccacccgcgccccggacgccccccgagcccccggggtctccaccgagctctccaccgcctgcctcccttgggaggccggagggagaggaggaggggccggccgagcccgaagagcactcggtgaggatctgcatgagcccgggcccggagccgggagagcagatcctgtcggtgaagatgccggaggaaagggaggagaaggcggagtaaggtggggtgaggcggatcccgcgcgcagttccagcaggtgtgtccccagcgcccgctgcgcccctgcgccccagcgccccaccttcccccacggctcaagagaagatgcttttccgtagtcgtgacctcagtggctgcagctctgaccgtcccgccagcacgccagccccgactcagctcctcgcggggctgggcctgagctcgacaagttgcatcaagtg

SEQ ID NO: 7144 - DNA, 1630 bp, Homo sapiens
  source 1..1630: mol_type = unassigned DNA
ccagctacgagtggcagcaagaaggcaattcctggctggcggttggcatctaagcaggcatcaggatgttgggctgggtccagagggtgctgcctcagcccccagggacccctcggaagaccaagatgcaggaggaagaggaagtggaaccagagccagagatggaggcggaggtggaaccagaaccgaatcctgaggaggccgagacagagtccgagtccatgccccccgaagagtcattcaaggaggaggaagtggctgtggcagacccaagccctcaggagaccaaggaggctgcccttacttccaccatatccctccgggcccagggcgctgagatttctgaaatgaatagtcccagccgcagggtactgacctggctcatgaagggcgtagagaaggtgatcccgcagcctgttcacagcatcacggaggacccggctcagatcctggggcatggcagcactggggacacagggtgcacagatgaacccaatgaggcccttgaggcccaagacactaggcctgggctgcggctgcttctgtggctggagcagaatctggaaagagtgcttcctcagccccccaaatcctctgaggtctggagagatgagcctgcagttgctacaggtgctgcctcagacccagcgcctccaggacgcccccaggaaatggggcccaagctgcaggcccgggagaccccctccctgcccacacccatccccctgcagcccaaggaggaacccaaggaggcaccagctccagagccccagcccggctcccaggcccagacctcctccctgccaccaaccagggaccctgccaggctggtggcatgggtcctgcacaggctggagatggccttgccgcagccagtgctacatgggaaaataggggaacaggagcctgactcccctgggatatgtgatgtgcagaccagggtgatgggagctggaggtctctgaaataagggagaagggaatctgggagagctcagatggacacatggatggaaggaaagaaggatgccctgaagagaagaccttcccgggggaggtggccactgacaccccaccctatttgaacagcgaacccctccctctccacacactcccaggcaggacaaggggagccagagtcacctgcaccagccccagagcctcccagaccagaacaaggggaaggccagccatgggcagcctgcaagatttaggctagacagcaggacttacccccagagggctgtggaaaaggcccatagccgggcgtggtggctcacgcctgtaatcccagcactttgggaggctgaggcaggaggattgcttgagccccgaagttcgagaccaccgtgggcaacacagtgagaccctgtctctaaaaaaccttttttaaattaataaattaaaaagccccatggatggaggactcagtattgagcatctctttgagaggacgcgtgcacagcccccagtgtggtacctggcaccgtcagcacctcgacaggatacagtttttcccagaagaggttctccctaggcctggccacactctctccttccaaggcttggggacaccaatgagcagcaacaaatgttttcattaacattaaaagagtgtaaatgagcacatc

SEQ ID NO: 7145 - DNA, 4347 bp, Homo sapiens
  source 1..4347: mol_type = unassigned DNA
aaggcacagtcataaatacagagggttttcagaaccacctcagagaagatgtttaaatcgctgacaaaagtcaacaaggtgaagcctataggagagaacaatgagaatgaacaaagttctcgtcggaatgaagaaggctctcacccaagtaatcagtctcagcaaaccacagcacaggaagaaaacaaaggtgaagagaaatctctcaaaaccaagtcaactccagtcacgtctgaagagccacacaccaacatacaagacaaactctccaagaaaaattcctctggagatctgaccacaaaccctgaccctcaaaatgcagcagaaccaactggaacagtgccagagcagaaggaaatggaccccgggaaagaaggtccaaacagcccacaaaacaaaccgcctgcagctcctgttataaatgagtatgccgatgcccagctacacaacctggtgaaaagaatgcgtcaaagaacagccctctacaagaaaaagttggtagagggagatctctcctcacccgaagccagcccacaaactgcaaagcccacggctgtaccaccagtaaaagaaagcgatgataagccaacagaacattactacaggctgttgtggttcaaagtcaaaaagatgcctttaacagagtacttaaagcgaattaaacttccaaacagcatagattcatacacagatcgactctatctcctgtggctcttgcttgtcactcttgcctataactggaactgctgttttataccactgcgcctcgtcttcccatatcaaaccgcagacaacatacactactggcttattgcggacatcatatgtgatatcatctacctttatgatatgctatttatccagcccagactccagtttgtaagaggaggagacataatagtggattcaaatgagctaaggaaacactacaggacttctacaaaatttcagttggatgtcgcatcaataataccatttgatatttgctacctcttctttgggtttaatccaatgtttagagcaaataggatgttaaagtacacttcattttttgaatttaatcatcacctagagtctataatggacaaagcatatatctacagagttattcgaacaactggatacttgctgtttattctgcacattaatgcctgtgtttattactgggcttcaaactatgaaggaattggcactactagatgggtgtatgatggggaaggaaacgagtatctgagatgttattattgggcagttcgaactttaattaccattggtggccttccagaaccacaaactttatttgaaattgtttttcaactcttgaattttttttctggagtttttgtgttctccagtttaattggtcagatgagagatgtgattggagcagctacagccaatcagaactacttccgcgcctgcatggatgacaccattgcctacatgaacaattactccattcctaaacttgtgcaaaagcgagttcggacttggtatgaatatacatgggactctcaaagaatgctagatgagtctgatttgcttaagaccctaccaactacggtccagttagccctcgccattgatgtgaacttcagcatcatcagcaaagtcgacttgttcaagggttgtgatacacagatgatttatgacatgttgctaagattgaaatccgttctctatttgcctggtgactttgtctgcaaaaagggagaaattggcaaggaaatgtatatcatcaagcatggagaagtccaagttcttggaggccctgatggtactaaagttctggttactctgaaagctgggtcggtgtttggagaaatcagccttctagcagcaggaggaggaaaccgtcgaactgccaatgtggtggcccacgggtttgccaatcttttaactctagacaaaaagaccctccaagaaattctagtgcattatccagattctgaaaggatcctcatgaagaaagccagagtgcttttaaagcagaaggctaagaccgcagaagcaacccctccaagaaaagatcttgccctcctcttcccaccgaaagaagagacacccaaactgtttaaaactctcctaggaggcacaggaaaagcaagtcttgcaagactactcaaattgaagcgagagcaagcagctcagaagaaagaaaattctgaaggaggagaggaagaaggaaaagaaaatgaagataaacaaaaagaaaatgaagataaacaaaaagaaaatgaagataaaggaaaagaaaatgaagataaagataaaggaagagagccagaagagaagccactggacagacctgaatgtacagcaagtcctattgcagtggaggaagaaccccactcagttagaaggacagttttacccagagggacttctcgtcaatcactcattatcagcatggctccttctgctgagggcggagaagaggttcttactattgaagtcaaagaaaaggctaagcaataaatgtttgattatctttagatgtgatatagctagttcccaaagtgattgtacctaggattgtaacttaaattaacgaggggaaacgacatgctgggacccttgagaaacgaaaggcaaatccctagcttagtttctaggacttatctgagagtgtgatttcatgcagtggtaataagaagattattaaaagccatccctattctccgttttcattaactttatgcaattgctatatcttctaattgtatgtagtaagtttccttttcctttggttctttcctgatgatgtctcttccttccagttttattagcttgctcttggctgtgatgtgattcactaaccttttctcttaatttttattgtgtttaatttcttctttggcactctaaagcctggctaattgttctaggtttatgaatttcacctcttacatgtaaagggtataagattttaatgtaataggtcaaaaatcagattattttcattcaaatgaggatgatgagtcactgtaatatcaaaaaatccccagcagctgggactgaagggaagcagagatcatgaagctttctgaatgagaagtctgatttttggaacagtcccctgaagaccaatgttggtcggcagaattagcaaactggcaaaatcacattgcaggaacatattggaaaaattgtaccctttactaaagaaataaacttcaatattttctcttctaaccaacttaaaagacaccaatctacctaactcatctggctcaagggacttggactggaggatacaggctaaagtgacacttatcagaatcttcctcaagcacttgctggaaaagatatcagattggaacttcttgtttaaaattaagctttagtaaaacaaagtgatgaggttaggaaggcagactctacacatgtcagattgacatatccccacaatttccggaacctacatgtatagctgtttacaaaatctccaagttaattaagggcactttaggaagttgtcctcatgaattagctagcattagcataattaccgacgttgcatgctgtgaggaggctacaaaggccaggctggtgtcggaagtaataatacatatagaattccattctaataaatgccattagtgtataacatcaagttctgtgtaatgaggctatttccaagtctccaaagatggtcactgtaacagcactttgctgagagggttttaacaaatcatattagccaaaaagcctacaacatagatgcatttagcaaaccatgtacaaatcaatcactataataaactgcatcatttgatagagtcaccgtttttgcatgtagtgttagagtatcacaaaatataacaagttttactaaaggatggttggttttttcaggatttaagggaatatggacaaattgttaaatagtatttatttgataaatgggagtttgtatgcagaaagagtgaattgcgtataaaaagggtgatttaaaaacccagaaacaaaaggtagaatagggctgaagcatctgataataggaaaagaaaaggacaaaagtcctcaacttgtgagcaatatgctttccctttacaccctgtaatttattcaaatgatattaaaatacaagaccattgcaatttatgcttttcgcctggcagttattttcccccccaagctatcctgtttcagataatatcaatttatttccaatccatcagactaaaatctaagaaaattcaagaactcttttattgttgatttggtgccaccaaattctttttctttttaaatctttctaattatcctttctttttcaatcccattgctaacacccagaacatattttctgttcaatgcaaataaacattcactttttaccta

SEQ ID NO: 7146 - DNA, 4509 bp, Homo sapiens
  source 1..4509: mol_type = unassigned DNA
aggtgtctggaactggattacagtttcttctgattgaacgcagcctttgaatactgcctggcctatcgcgaatacatccctgccttggacaagacgcagctgaatctctaagtgatgctactgccactaccaccccagagctccaaacctgtgcctaagaaatctcagtccagcaaaattgtgcccagtcatcatgacccatctgaaaagacgggggagaattgccaaacgaagatatctccatcttcacttcaggagtctccatcttcacttcagggagcactcaaaaagagatcagcttttgaagatctcactaatgcttctcaatgtcaacctgtccagcccaagaaagaagccaataaagagtttgtaaaagttgtttccaagaagataaacaggaacacacatgctcttggactggccaaaaagaataagcggaatctaaaatggcataagctggaagtcacaccagtagtagcctctactaccgtggtaccaaacattatggagaaaccactcattctagacatatccaccacctccaaaacacccaacactgaggaggcatctctcttcagaaagccattagttttaaaggaggaacccactattgaggatgaaacccttatcaataagtcattatctttaaaaaagtgctcaaatcatgaggaggtgtccttactggaaaagctacagcccctgcaggaggagagtgacagtgatgatgcgtttgttatagagccaatgacttttaagaagacacataaaactgaggaggcagccatcaccaagaagacattatccttaaagaagaagatgtgtgcaagtcagcggaagcagtcctgccaggaagagtcgttggctgtgcaggatgtcaatatggaagaggattccttctttatggagtcaatgagttttaagaagaagcctaaaactgaggagtcaatccccacccataagttatcatctttaaagaagaaatgtaccatttatgggaagatatgccactttaggaagccaccagtattgcagacaaccatctgtggagcaatgtcctccattaagaagcctaccactgagaaggagacacttttccaagagctatctgtattgcaagagaaacacaccactgagcatgagatgtccatcttgaagaaatcattggccttgcagaagaccaactttaaagaggattcccttgttaaggagtcgttagcctttaagaagaagcctagcactgaggaggcaatcatgatgccagtaatattgaaggagcagtgcatgactgaggggaagaggtcccgtctgaagccattagtattgcaggagatcacctctggagagaagtcgctcattatgaagccattgtccattaaagaaaagccatctactgagaaggagtccttttcccaggaaccatctgcattgcaaaagaagcacaccactcaggaggaggtttccatcttaaaggagccctcgtccttgctaaagtctccaactgaggagtcaccttttgatgaggctttggcttttacaaagaagtgtaccattgaggaggcaccccccaccaagaagcctttaattttaaagaggaagcatgccactcaggggacaatgtcccacttgaagaaaccactaatattacagaccacctctggagaaaagtcacttattaaggagccactgccctttaaagaagaaaaagtgtctttaaagaaaaagtgtaccacacaagagatgatgtccatctgtccagaactgttggactttcaggatatgattggtgaagataagaattctttctttatggagccaatgtcatttaggaagaaccctacaactgaggagacagtacttaccaagacatcgttgtctttacaggaaaagaaaattactcaggggaagatgtcccacttaaagaagccactggtcttgcagaagatcacttctgaggaggagtcattctataagaagctgttgccctttaagatgaaatctacaacggaagaaaagttcctctcccaggaaccatctgcattgaaagagaagcataccaccttgcaggaagtgtccctctcaaaagagtcattggccatccaagagaaggctaccactgaggaggaattctctcaggaactattttcattgcatgttaagcataccaacaaaagtgggtccctcttccaggaggctttggtcttgcaagagaagactgatgccgaagaggattccttgaagaacttgttggctttgcaggagaaaagcaccatggaagaagagtcccttatcaataagctattggctctgaaggaggagctttctgctgaggcagccacaaacatacagacacaattatctttaaagaagaagtccacttctcatggaaaagtgttcttcctgaagaagcagttggctttgaatgagaccatcaatgaagaggagttccttaataagcagccactggccttggaggggtatcccagcattgcggagggggagaccctcttcaagaagcttttggccatgcaggaggagcccagcattgagaaggaagctgtcctcaaggagcccactattgacacagaagctcactttaaggaacctttggccttgcaggaggagcccagcactgagaaggaggctgtcctcaaggagcccagtgttgacacagaagctcactttaaggaaactttggccttgcaggagaagcccagcattgagcaggaggccctctttaagcgacactcagctttgtgggagaagcccagcactgagaaggagaccatcttcaaggagtctttggacttgcaagagaagcccagcattaagaaagagaccctcctcaaaaagccattagccttgaagatgtctaccatcaatgaggcagtcctcttcgaagatatgatagctctgaatgagaaacccaccactgggaaggagttgtccttcaaggagccattagccttacaagagagtcccacctacaaggaagacacctttctcaaaacattgttggtcccccaagttggaaccagcccaaatgtgtctagcactgcccctgaatccataaccagcaagtccagcattgctaccatgaccagtgtgggcaaatctggtaccatcaatgaggcattcctcttcgaagatatgataactctgaatgagaaacccaccactgggaaggagttgtccttcaaggagccattggccttacaagagagtcccacctgcaaggaagacacctttctggaaacattcttgatcccccaaattggaaccagcccatatgtgtttagcaccacccctgaatccataacagagaagtccagcattgcaaccatgaccagcgtgggcaagtccaggaccaccaccgagtccagtgcatgtgaatctgcttctgataaacctgtctcaccacaggccaagggaacaccaaaggagataaccccacgggaagatattgatgaggacagcagtgatccaagtttcaacccaatgtatgccaaggaaatcttcagttacatgaaagagagagaggaacagtttatacttacagattacatgaacaggcagattgaaatcaccagtgacatgagggccattcttgtggactggttggtggaggtgcaggtgtcctttgagatgacccatgagaccctgtacttggcagtgaagctggtggatctctacctaatgaaggcagtatgcaagaaggataagttacaactccttggtgccactgcctttatgattgcagcaaaatttgaggagcacaactcacctcgtgtggatgactttgtgtacatctgtgatgataattatcagcgatctgaggtactcagcatggaaatcaacatcctgaacgtcctcaaatgtgacattaacattcccatcgcctaccattttctgcgcagatatgctaggtgtatccacaccaacatgaagacactgaccttgtcccgctacatctgcgagatgaccctgcaggaataccactatgtccaggagaaggcttccaagctagctgctgcctccttactcctggccctctacatgaagaagctcggatactgggttcccttcctggagcattacagtggctacagtatctctgagcttcaccccttggtcagacagctgaacaaactgctgactttcagttcttacgatagtctcaaggctgtgtattacaagtattctcacccggtcttctttgaagtcgccaaaatccctgccttggatatgttgaagctggaggagattttgaactgtgattgtgaggctcagggcctggtactctagcagcagccacagggctaagcatgcatgttaacagggtatatttattctatgttcgaatttgtcttttgatcgcttttattcatttttcctttctttgtcttttcccaaactgataatgttataaatatttatgttgcttgtttttatgaaagaaaaaatattgtcatatttgactacaaatttaataaaaaattaatggttattgtt

SEQ ID NO: 7147 - DNA, 1201 bp, Homo sapiens
  source 1..1201: mol_type = unassigned DNA
ttccaggtgtctggaactggattacagtttcttctgattgaacgcagcctttgaatactgcctggcctatcgcgaatacatccctgccttggacaagacgcagctgaatctctaagtgatgctactgccactaccaccccagagctccaaacctgtgcctaagaaatctcagtccagcaaaattgtgcccagtcatcatgacccatctgaaaagacgggggagaattgccaaacgaagatatctccatcttcacttcaggagtctccatcttcacttcagggagcactcaaaaagagatcagcttttgaagatctcactaatgtgtcctttgagatgacccatgagaccctgtacttggcagtgaagctggtggatctctacctaatgaaggcagtatgcaagaaggataagttacaactccttggtgccactgcctttatgattgcagcaaaatttgaggagcacaactcacctcgtgtggatgactttgtgtacatctgtgatgataattatcagcgatctgaggtactcagcatggaaatcaacatcctgaacgtcctcaaatgtgacattaacattcccatcgcctaccattttctgcgcagatatgctaggtgtatccacaccaacatgaagacactgaccttgtcccgctacatctgcgagatgaccctgcaggaataccactatgtccaggagaaggcttccaagctagctgctgcctccttactcctggccctctacatgaagaagctcggatactgggttcccttcctggagcattacagtggctacagtatctctgagcttcaccccttggtcagacagctgaacaaactgctgactttcagttcttacgatagtctcaaggctgtgtattacaagtattctcacccggtcttctttgaagtcgccaaaatccctgccttggatatgttgaagctggaggagattttgaactgtgattgtgaggctcagggcctggtactctagcagcagccacagggctaagcatgcatgttaacagggtatatttattctatgttcgaatttgtcttttgatcgcttttattcatttttcctttctttgtcttttcccaaactgataatgttataaatatttatgttgcttgtttttatgaaagaaaaaatattgtcatatttgactacaaatttaataaaaaattaatggttattgtt

SEQ ID NO: 7148 - DNA, 1201 bp, Homo sapiens
  source 1..1201: mol_type = unassigned DNA
ttaaaggtgtctggaactggattacagtttcttctgattgaacgcagcctttgaatactgcctggcctatcgcgaatacatccctgccttggacaagacgcagctgaatctctaagtgatgctactgccactaccaccccagagctccaaacctgtgcctaagaaatctcagtccagcaaaattgtgcccagtcatcatgacccatctgaaaagacgggggagaattgccaaacgaagatatctccatcttcacttcaggagtctccatcttcacttcagggagcactcaaaaagagatcagcttttgaagatctcactaatgtgtcctttgagatgacccatgagaccctgtacttggcagtgaagctggtggatctctacctaatgaaggcagtatgcaagaaggataagttacaactccttggtgccactgcctttatgattgcagcaaaatttgaggagcacaactcacctcgtgtggatgactttgtgtacatctgtgatgataattatcagcgatctgaggtactcagcatggaaatcaacatcctgaacgtcctcaaatgtgacattaacattcccatcgcctaccattttctgcgcagatatgctaggtgtatccacaccaacatgaagacactgaccttgtcccgctacatctgcgagatgaccctgcaggaataccactatgtccaggagaaggcttccaagctagctgctgcctccttactcctggccctctacatgaagaagctcggatactgggttcccttcctggagcattacagtggctacagtatctctgagcttcaccccttggtcagacagctgaacaaactgctgactttcagttcttacgatagtctcaaggctgtgtattacaagtattctcacccggtcttctttgaagtcgccaaaatccctgccttggatatgttgaagctggaggagattttgaactgtgattgtgaggctcagggcctggtactctagcagcagccacagggctaagcatgcatgttaacagggtatatttattctatgttcgaatttgtcttttgatcgcttttattcatttttcctttctttgtcttttcccaaactgataatgttataaatatttatgttgcttgtttttatgaaagaaaaaatattgtcatatttgactacaaatttaataaaaaattaatggttattgtt

SEQ ID NO: 7149 - DNA, 4693 bp, Homo sapiens
  source 1..4693: mol_type = unassigned DNA
gtggaagcatttccgtcattctgagacagttgggctgaggcggttggtcgcctctctctctctctctctctgttcctcatctacattttgattggtttatttttgtattgttttctttcagtttccgataggtggagaacattctgctaatagcttttcttccagtccatttgtggcttgttaaaggtgtctggaactggattacagtttcttctgattgaacgcagcctttgaatactgcctggcctatcgcgaatacatccctgccttggacaagacgcagctgaatctctaagtgatgctactgccactaccaccccagagctccaaacctgtgcctaagaaatctcagtccagcaaaattgtgcccagtcatcatgacccatctgaaaagacgggggagaattgccaaacgaagatatctccatcttcacttcaggagtctccatcttcacttcagggagcactcaaaaagagatcagcttttgaagatctcactaatgcttctcaatgtcaacctgtccagcccaagaaagaagccaataaagagtttgtaaaagttgtttccaagaagataaacaggaacacacatgctcttggactggccaaaaagaataagcggaatctaaaatggcataagctggaagtcacaccagtagtagcctctactaccgtggtaccaaacattatggagaaaccactcattctagacatatccaccacctccaaaacacccaacactgaggaggcatctctcttcagaaagccattagttttaaaggaggaacccactattgaggatgaaacccttatcaataagtcattatctttaaaaaagtgctcaaatcatgaggaggtgtccttactggaaaagctacagcccctgcaggaggagagtgacagtgatgatgcgtttgttatagagccaatgacttttaagaagacacataaaactgaggaggcagccatcaccaagaagacattatccttaaagaagaagatgtgtgcaagtcagcggaagcagtcctgccaggaagagtcgttggctgtgcaggatgtcaatatggaagaggattccttctttatggagtcaatgagttttaagaagaagcctaaaactgaggagtcaatccccacccataagttatcatctttaaagaagaaatgtaccatttatgggaagatatgccactttaggaagccaccagtattgcagacaaccatctgtggagcaatgtcctccattaagaagcctaccactgagaaggagacacttttccaagagctatctgtattgcaagagaaacacaccactgagcatgagatgtccatcttgaagaaatcattggccttgcagaagaccaactttaaagaggattcccttgttaaggagtcgttagcctttaagaagaagcctagcactgaggaggcaatcatgatgccagtaatattgaaggagcagtgcatgactgaggggaagaggtcccgtctgaagccattagtattgcaggagatcacctctggagagaagtcgctcattatgaagccattgtccattaaagaaaagccatctactgagaaggagtccttttcccaggaaccatctgcattgcaaaagaagcacaccactcaggaggaggtttccatcttaaaggagccctcgtccttgctaaagtctccaactgaggagtcaccttttgatgaggctttggcttttacaaagaagtgtaccattgaggaggcaccccccaccaagaagcctttaattttaaagaggaagcatgccactcaggggacaatgtcccacttgaagaaaccactaatattacagaccacctctggagaaaagtcacttattaaggagccactgccctttaaagaagaaaaagtgtctttaaagaaaaagtgtaccacacaagagatgatgtccatctgtccagaactgttggactttcaggatatgattggtgaagataagaattctttctttatggagccaatgtcatttaggaagaaccctacaactgaggagacagtacttaccaagacatcgttgtctttacaggaaaagaaaattactcaggggaagatgtcccacttaaagaagccactggtcttgcagaagatcacttctgaggaggagtcattctataagaagctgttgccctttaagatgaaatctacaacggaagaaaagttcctctcccaggaaccatctgcattgaaagagaagcataccaccttgcaggaagtgtccctctcaaaagagtcattggccatccaagagaaggctaccactgaggaggaattctctcaggaactattttcattgcatgttaagcataccaacaaaagtgggtccctcttccaggaggctttggtcttgcaagagaagactgatgccgaagaggattccttgaagaacttgttggctttgcaggagaaaagcaccatggaagaagagtcccttatcaataagctattggctctgaaggaggagctttctgctgaggcagccacaaacatacagacacaattatctttaaagaagaagtccacttctcatggaaaagtgttcttcctgaagaagcagttggctttgaatgagaccatcaatgaagaggagttccttaataagcagccactggccttggaggggtatcccagcattgcggagggggagaccctcttcaagaagcttttggccatgcaggaggagcccagcattgagaaggaagctgtcctcaaggagcccactattgacacagaagctcactttaaggaacctttggccttgcaggaggagcccagcactgagaaggaggctgtcctcaaggagcccagtgttgacacagaagctcactttaaggaaactttggccttgcaggagaagcccagcattgagcaggaggccctctttaagcgacactcagctttgtgggagaagcccagcactgagaaggagaccatcttcaaggagtctttggacttgcaagagaagcccagcattaagaaagagaccctcctcaaaaagccattagccttgaagatgtctaccatcaatgaggcagtcctcttcgaagatatgatagctctgaatgagaaacccaccactgggaaggagttgtccttcaaggagccattagccttacaagagagtcccacctacaaggaagacacctttctcaaaacattgttggtcccccaagttggaaccagcccaaatgtgtctagcactgcccctgaatccataaccagcaagtccagcattgctaccatgaccagtgtgggcaaatctggtaccatcaatgaggcattcctcttcgaagatatgataactctgaatgagaaacccaccactgggaaggagttgtccttcaaggagccattggccttacaagagagtcccacctgcaaggaagacacctttctggaaacattcttgatcccccaaattggaaccagcccatatgtgtttagcaccacccctgaatccataacagagaagtccagcattgcaaccatgaccagcgtgggcaagtccaggaccaccaccgagtccagtgcatgtgaatctgcttctgataaacctgtctcaccacaggccaagggaacaccaaaggagataaccccacgggaagatattgatgaggacagcagtgatccaagtttcaacccaatgtatgccaaggaaatcttcagttacatgaaagagagagaggaacagtttatacttacagattacatgaacaggcagattgaaatcaccagtgacatgagggccattcttgtggactggttggtggaggtgcaggtgtcctttgagatgacccatgagaccctgtacttggcagtgaagctggtggatctctacctaatgaaggcagtatgcaagaaggataagttacaactccttggtgccactgcctttatgattgcagcaaaatttgaggagcacaactcacctcgtgtggatgactttgtgtacatctgtgatgataattatcagcgatctgaggtactcagcatggaaatcaacatcctgaacgtcctcaaatgtgacattaacattcccatcgcctaccattttctgcgcagatatgctaggtgtatccacaccaacatgaagacactgaccttgtcccgctacatctgcgagatgaccctgcaggaataccactatgtccaggagaaggcttccaagctagctgctgcctccttactcctggccctctacatgaagaagctcggatactgggttcccttcctggagcattacagtggctacagtatctctgagcttcaccccttggtcagacagctgaacaaactgctgactttcagttcttacgatagtctcaaggctgtgtattacaagtattctcacccggtcttctttgaagtcgccaaaatccctgccttggatatgttgaagctggaggagattttgaactgtgattgtgaggctcagggcctggtactctagcagcagccacagggctaagcatgcatgttaacagggtatatttattctatgttcgaatttgtcttttgatcgcttttattcatttttcctttctttgtcttttcccaaactgataatgttataaatatttatgttgcttgtttttatgaaagaaaaaatattgtcatatttgactacaaatttaataaaaaattaatggttattgtt

SEQ ID NO: 7150 - DNA, 1521 bp, Homo sapiens
  source 1..1521: mol_type = unassigned DNA
ttccaggtgtctggaactggattacagtttcttctgattgaacgcagcctttgaatactgcctggcctatcgcgaatacatccctgccttggacaagacgcagctgaatctctaagtgatgctactgccactaccaccccagagctccaaacctgtgcctaagaaatctcagtccagcaaaattgtgcccagtcatcatgacccatctgaaaagacgggggagaattgccaaacgaagatatctccatcttcacttcaggagtctccatcttcacttcagggagcactcaaaaagagatcagcttttgaagatctcactaatgcttctcaatgtcaacctgtccagcccaagaaagaagccaataaagagtttgtaaaagttgtttccaagaagataaacaggaacacacatgctcttggactggccaaaaagaataagcggaatctaaaatgataaccccacgggaagatattgatgaggacagcagtgatccaagtttcaacccaatgtatgccaaggaaatcttcagttacatgaaagagagagaggaacagtttatacttacagattacatgaacaggcagattgaaatcaccagtgacatgagggccattcttgtggactggttggtggaggtgcaggtgtcctttgagatgacccatgagaccctgtacttggcagtgaagctggtggatctctacctaatgaaggcagtatgcaagaaggataagttacaactccttggtgccactgcctttatgattgcagcaaaatttgaggagcacaactcacctcgtgtggatgactttgtgtacatctgtgatgataattatcagcgatctgaggtactcagcatggaaatcaacatcctgaacgtcctcaaatgtgacattaacattcccatcgcctaccattttctgcgcagatatgctaggtgtatccacaccaacatgaagacactgaccttgtcccgctacatctgcgagatgaccctgcaggaataccactatgtccaggagaaggcttccaagctagctgctgcctccttactcctggccctctacatgaagaagctcggatactgggttcccttcctggagcattacagtggctacagtatctctgagcttcaccccttggtcagacagctgaacaaactgctgactttcagttcttacgatagtctcaaggctgtgtattacaagtattctcacccggtcttctttgaagtcgccaaaatccctgccttggatatgttgaagctggaggagattttgaactgtgattgtgaggctcagggcctggtactctagcagcagccacagggctaagcatgcatgttaacagggtatatttattctatgttcgaatttgtcttttgatcgcttttattcatttttcctttctttgtcttttcccaaactgataatgttataaatatttatgttgcttgtttttatgaaagaaaaaatattgtcatatttgactacaaatttaataaaaaattaatggttattgtt

SEQ ID NO: 7151 - DNA, 1682 bp, Homo sapiens
  source 1..1682: mol_type = unassigned DNA
cggggcgggaggaggcggggccaggcctggtctctgataacgggatgggtggtgctggacctcgggcggggccgggcctcgtggcgggaggaggcagggcagggcctctgggacggggctggacggcttgttgacggaaacgagcccttgacgctgtggcccggaagtggagcggctgtcgcagtgcggctccggcagtggcagcggaggcctgtgtttgcggccttcggcaagcgactgagatggcgagcgcaactgcacctgcagccgcagtccccaccctggcttcgcctttggagcagctccggcacttggcggaggagctgcggttgctcctgcctcgagtgcgggtcggcgaagcccaggagaccaccgaggagtttaatcgagagatgttctggagaagactcaatgaggcagctgtgactgtgtcaagggaagccacgactctgaccatagtcttctctcagcttccactgccgtctccacaggaaacccagaagttctgtgaacaagtccatgctgccatcaaggcatttattgcagtgtactatttgcttccaaaggatcaggggatcaccctgagaaagctggtacggggcgccaccctggacatcgtggatggcatggctcagctcatggaagtactttccgtcactccaactcagagccctgagaacaatgaccttatttcctacaacagtgtctgggttgcgtgccagcagatgcctcagataccaagagataacaaagctgcagctcttttgatgctgaccaagaatgtggattttgtgaaggatgcacatgaagaaatggagcaggctgtggaagaatgtgacccttactctggcctcttgaatgatactgaggagaacaactctgacaaccacaatcatgaggatgatgtgttggggtttcccagcaatcaggacttgtattggtcagaggacgatcaagagctcataatcccatgccttgcgctggtgagagcatccaaagcctgcctgaagaaaattcggatgttagtggcagagaatgggaagaaggatcaggtggcacagctggatgacattgtggatatttctgatgaaatcagccctagtgtggatgatttggctctgagcatatatccacctatgtgtcacctgaccgtgcgaatcaattctgcgaaacttgtatctgttttaaagaaggcacttgaaattacaaaagcaagtcatgtgacccctcagccagaagatagttggatccctttacttattaatgccattgatcattgcatgaatagaatcaaggagctcactcagagtgaacttgaattatgacttttcaggctcatttgtactctcttcccctctcatcgtcatggtcaggctctgatacctgcttttaaaatggagctagaatgcttgctggattgaaagggagtgcctatctatatttagcaagagacactattaccaaagattgttggttaggccagattgacacctatttataaaccatatgcgtatatttttctgtgctatatatgaaaaataattgcatgatttctcattcctgagtcatttctcagagattcctaggaaagctgccttattctctttttgcagtaaagtatgttgttttcattgtaaagatgttgatggtctcaataaaatgctaacttgccagtgattaaa

SEQ ID NO: 7152 - DNA, 1385 bp, Homo sapiens
  source 1..1385: mol_type = unassigned DNA
agtgcggctccggcagtggcagcggaggcctgtgtttgcggccttcggcaagcgactgagatggcgagcgcaactgcacctgcagccgcagtccccaccctggcttcgcctttggagcagctccggcacttggcggaggagctgcggttgctcctgcctcgagtgcgggtcggcgaagcccaggagaccaccgaggagtttaatcgagagatgttctggagaagactcaatgaggcagctgtgactgtgtcaagggaagccacgactctgaccatagtcttctctcagcttccactgccgtctccacaggaaacccagaagttctgtgaacaagtccatgctgccatcaaggcatttattgcagtgtactatttgcttccaaaggatcaggccctgagaacaatgaccttatttcctacaacagtgtctgggttgcgtgccagcagatgcctcagataccaagagataacaaagctgcagctcttttgatgctgaccaagaatgtggattttgtgaaggatgcacatgaagaaatggagcaggctgtggaagaatgtgacccttactctggcctcttgaatgatactgaggagaacaactctgacaaccacaatcatgaggatgatgtgttggggtttcccagcaatcaggacttgtattggtcagaggacgatcaagagctcataatcccatgccttgcgctggtgagagcatccaaagcctgcctgaagaaaattcggatgttagtggcagagaatgggaagaaggatcaggtggcacagctggatgacattgtggatatttctgatgaaatcagccctagtgtggatgatttggctctgagcatatatccacctatgtgtcacctgaccgtgcgaatcaattctgcgaaacttgtatctgttttaaagaaggcacttgaaattacaaaagcaagtcatgtgacccctcagccagaagatagttggatccctttacttattaatgccattgatcattgcatgaatagaatcaaggagctcactcagagtgaacttgaattatgacttttcaggctcatttgtactctcttcccctctcatcgtcatggtcaggctctgatacctgcttttaaaatggagctagaatgcttgctggattgaaagggagtgcctatctatatttagcaagagacactattaccaaagattgttggttaggccagattgacacctatttataaaccatatgcgtatatttttctgtgctatatatgaaaaataattgcatgatttctcattcctgagtcatttctcagagattcctaggaaagctgccttattctctttttgcagtaaagtatgttgttttcattgtaaagatgttgatggtctcaataaaatgct

SEQ ID NO: 7153 - DNA, 2317 bp, Homo sapiens
  source 1..2317: mol_type = unassigned DNA
tcctcccgctgtcccccacggaggggactgctctcccccgctgcatcctttctgtgaggtaccttacccacctcagcacctgagagggtgaaatagaattctaacctcgacattcgggaagtgtttttgagaagtctcggtcggtaagggaagtcttccaagtccgtgcagcactaacgtattggcacctgcctcctcttcggccaccccccagatgaggcagctgtgactgtgtcaagggaagccacgactctgaccatagtcttctctcagcttccactgccgtctccacaggaaacccagaagttctgtgaacaagtccatgctgccatcaaggcatttattgcagtgtactatttgcttccaaaggatcaggggatcaccctgagaaagctggtacggggcgccaccctggacatcgtggatggcatggctcagctcatggaagtactttccgtcactccaactcagagccctgagaacaatgaccttatttcctacaacagtgtctgggttgcgtgccagcagatgcctcagataccaagagataacaaagctgcagctcttttgatgctgaccaagaatgtggattttgtgaaggatgcacatgaagaaatggagcaggctgtggaagaatgtgacccttactctggcctcttgaatgatactgaggagaacaactctgacaaccacaatcatgaggatgatgtgttggggtttcccagcaatcaggacttgtattggtcagaggacgatcaagagctcataatcccatgccttgcgctggtgagagcatccaaagcctgcctgaagaaaattcggatgttagtggcagagaatgggaagaaggatcaggtggcacagctggatgacattgtggatatttctgatgaaatcagccctagtgtggatgatttggctctgagcatatatccacctatgtgtcacctgaccgtgcgaatcaattctgcgaaacttgtatctgttttaaagaaggcacttgaaattacaaaagcaagtcatgtgacccctcagccagaagatagttggatccctttacttattaatgccattgatcattgcatgaatagaatcaaggagctcactcagagtgaacttgaattatgacttttcaggctcatttgtactctcttcccctctcatcgtcatggtcaggctctgatacctgcttttaaaatggagctagaatgcttgctggattgaaagggagtgcctatctatatttagcaagagacactattaccaaagattgttggttaggccagattgacacctatttataaaccatatgcgtatatttttctgtgctatatatgaaaaataattgcatgatttctcattcctgagtcatttctcagagattcctaggaaagctgccttattctctttttgcagtaaagtatgttgttttcattgtaaagatgttgatggtctcaataaaatgctaacttgccagtgattaaatgagtgcccttccaaagtttctttttaccagaaatacagtggattgagactagaacattgctttcatttgggtttgtaggtttaaaaatctgattctaatcagaagtatatttagaacaaaacactttatttataaaagatgactccaaaattcatcttagtatttcaccatgttatatattattatcagcaagtccttctgaatattatcacagattactccatgtctctaaaatatattggcattgagctcatttgttaggtttgcccaccttattgaacagatttattttccttatacatacttgtgttgtccttggttacgtgtgtccccaaatgtaaataccaaatttttataaatcaaaaattttttagtgtgtaagagattttatgtaattttaagggccttttcagttcatccttttgcaaaaccatcaccacttaattatacttttgcatcagtctagaagactgcatattggaaagcagtgtaaatctataatgatgtatattctggtgagctgaatagggcattatgcatgtcctacaggtctccgccacctctcatgcccatcatcttccttttgtaggtgtaattcataacatatgcctttctgctgtctttaggtataatcagcaacagcagtcattctttgagtgactaatgtatacttggggttggggttgaaattccttaagccaaatgagttttagcttactgttttgaagtgccattttgtattgttaacaagtgtcatgaagggaaggaactaaaatcaaactgacagagtgtcaaggcaacaaaataacataaacaaaataataacattgt

SEQ ID NO: 7154 - DNA, 4442 bp, Homo sapiens
  source 1..4442: mol_type = unassigned DNA
gaagatggtgcacctccgggccggcggttgctgagctgacccggacggcgagggagcgggagcccgagcccgaccactccggctgccgcggggtgcggcgcagccaccgccatgtcgctgctgcagtcggcgctcgacttcttggcgggtccaggctccctgggcggtgcttccggccgcgaccagagtgacttcgtggggcagacggtggaactgggcgagctgcggctgcgggtgcggcgggtcctggccgaaggagggtttgcatttgtgtatgaagctcaagatgtggggagtggcagagagtatgcattaaagaggctattatccaatgaagaggaaaagaacagagccatcattcaagaagtttgcttcatgaaaaagctttccggccacccgaacattgtccagttttgttctgcagcgtctataggaaaagaggagtcagacacggggcaggctgagttcctcttgctcacagagctctgtaaagggcagctggtggaatttttgaagaaaatggaatctcgaggccccctttcgtgcgacacggttctgaagatcttctaccagacgtgccgcgccgtgcagcacatgcaccggcagaagccgcccatcatccacagggacctcaaggttgagaacttgttgcttagtaaccaagggaccattaagctgtgtgactttggcagtgccacgaccatctcgcactaccctgactacagctggagcgcccagaggcgagccctggtggaggaagagatcacgaggaatacaacaccaatgtatagaacaccagaaatcatagacttgtattccaacttcccgatcggcgagaagcaggatatctgggccctgggctgcatcttgtacctgctgtgcttccggcagcacccttttgaggatggagcgaaacttcgaatagtcaatgggaagtactcgatccccccgcacgacacgcagtacacggtcttccacagcctcatccgcgccatgctgcaggtgaacccggaggagcggctgtccatcgccgaggtggtgcaccagctgcaggagatcgcggccgcccgcaacgtgaaccccaagtctcccatcacagagctcctggagcagaatggaggctacgggagcgccacactgtcccgagggccaccccctcccgtgggccccgctggcagtggctacagtggaggcctggcgctggcggagtacgaccagccgtatggcggcttcctggacattctgcggggtgggacagagcggctcttcaccaacctcaaggacacctcctccaaggtcatccagtccgtcgctaattatgcaaagggtgacctggacatatcttacatcacatccagaattgcagtgatgtcattcccagcagaaggtgtggagtcagcgctcaaaaacaacatcgaagatgtgcggttgttcctggactccaagcacccagggcactatgccgtctacaacctgtccccgaggacctaccggccctccaggttccacaaccgggtctccgagtgtggctgggcagcacggcgggccccacacctgcacaccctgtacaacatctgcaggaacatgcacgcctggctgcggcaggaccacaagaacgtctgcgtcgtgcactgcatggacgggagagccgcgtctgctgtggccgtctgctccttcctgtgcttctgccgtctcttcagcaccgcggaggccgccgtgtacatgttcagcatgaagcgctgcccaccaggcatctggccatcccacaaaaggtacatcgagtacatgtgtgacatggtggcggaggagcccatcacaccccacagcaagcccatcctggtgagggccgtggtcatgacacccgtgccgctgttcagcaagcagaggagcggctgcaggcccttctgcgaggtctacgtgggggacgagcgtgtggccagcacctcccaggagtacgacaagatgcgggactttaagattgaagatggcaaagcggtgattcccctgggcgtcacggtgcaaggagacgtgctcatcgtcatctatcacgcccggtccactctgggcggccggctgcaggccaagatggcatccatgaagatgttccagattcagttccacacggggtttgtgcctcggaacgccaccactgtgaaatttgccaagtatgacctggacgcgtgtgacattcaagaaaaatacccggatttatttcaagtgaacctggaagtggaggtggagcccagggacaggccgagccgggaagccccaccatgggagaactcgagcatgagggggctgaaccccaaaatcctgttttccagccgggaggagcagcaagacattctgtctaagtttgggaagccggagcttccccggcagcctggctccacggctcagtatgatgctggggcagggtccccggaagccgaacccacagactctgactcaccgccaagcagcagcgcggacgccagtcgcttcctgcacacgctggactggcaggaagagaaggaggcagagactggtgcagaaaatgcctcttccaaggagagcgagtctgccctgatggaggacagagacgagagtgaggtgtcagatgaagggggatccccgatctccagcgagggccaggaacccagggccgacccagagccccccggcctggcagcagggctggtgcagcaggacttggtttttgaggtggagacaccggctgtgctgccagagcctgtgccacaggaagacggggtcgacctcctgggcctgcactccgaggtgggcgcagggccagctgtacccccgcaggcctgcaaggccccctccagcaacaccgacctgctcagctgcctccttgggccccctgaggccgcctcccaggggcccccggaggatctgctcagcgaggacccgctgctcctggcaagcccggcccctcccctgagcgtgcagagcaccccaagaggagggccccctgccgctgctgacccctttggcccgcttctgccgtcttcaggcaacaactcccagccctgctccaatcctgatctcttcggcgaatttctcaattcggactctgtgaccgtcccaccatccttcccgtctgcccacagtgctccgcccccatcctgcagcgccgacttcctgcacctgggggatctgccaggagagcccagcaagatgacagcctcgtccagcaacccagacctgctgggaggatgggctgcctggaccgagactgcagcatcggcagtggcccccacgccagccacagaaggccccctcttctctcctggaggtcagccggccccttgtggctctcaggccagctggaccaagtctcagaacccggacccatttgctgaccttggcgacctcagctccggcctccaaggctcaccagctggattccctcctgggggcttcattcccaaaacggccaccacgcccaaaggcagcagctcctggcagacaagtcggccgccagcccagggcgcctcatggccccctcaggccaagccgccccccaaagcctgcacacagccaaggcctaactatgcctcgaacttcagtgtgatcggggcgcgggaggagcggggggtccgcgcacccagctttgctcaaaagccaaaagtctctgagaacgactttgaagatctgttgtccaatcaaggcttctcctccaggtctgacaagaaagggccaaagaccattgcagagatgaggaagcaggacctggctaaagacacggacccactcaagctgaagctcctggactggattgagggcaaggagcggaacatccgggccctgctgtccacgctgcacacagtgctgtgggacggggagagccgctggacgcccgtgggcatggccgacctggtggctccggagcaagtgaagaagcactatcgccgcgcggtgctggctgtgcaccccgacaaggctgcggggcagccgtacgagcagcacgccaagatgatcttcatggagctgaatgacgcctggtcggagtttgagaaccagggctcccggcccctcttctgaggccgcagtggtggtggctgcgcacacagctccacaggttgggagccgtcgtgggacctgggtccccaccgtgaggaccccgtgggcgacagcaggtgtggccagggtggggctccgagccccgggtcaccgcccgcccagcgttccaggcacatgaagagaaagcattccaaagcctctgattgttgtttcctttttctcctcccgaaggaacagctgattcatgctcctcccgcaattgtcacgtctgtgatttatttggtgtttcgggcgtggcctctggagccccggcacgtggtgggccacgctgctggcgctcatgggccctggtgtttgcaccgcactttgtaatcagtcccgtggttgtctgtacagaattaaactattttccgatg

SEQ ID NO: 7155 - DNA, 2266 bp, Homo sapiens
  source 1..2266: mol_type = unassigned DNA
atggtgcacctccgggccggcggttgctgagctgacccggacggcgagggagcgggagcccgagcccgaccactccggctgccgcggggtgcggcgcagccaccgccatgtcgctgctgcagtcggcgctcgacttcttggcgggtccaggctccctgggcggtgcttccggccgcgaccagagtgacttcgtggggcagacggtggaactgggcgagctgcggctgcgggtgcggcgggtcctggccgaaggagggtttgcatttgtgtatgaagctcaagatgtggggagtggcagagagtatgcattaaagaggctattatccaatgaagaggaaaagaacagagccatcattcaagaagtttgcttcatgaaaaagctttccggccacccgaacattgtccagttttgttctgcagcgtctataggaaaagaggagtcagacacggggcaggctgagttcctcttgctcacagagccccccggcctggcagcagggctggtgcagcaggacttggtttttgaggtggagacaccggctgtgctgccagagcctgtgccacaggaagacggggtcgacctcctgggcctgcactccgaggtgggcgcagggccagctgtacccccgcaggcctgcaaggccccctccagcaacaccgacctgctcagctgcctccttgggccccctgaggccgcctcccaggggcccccggaggatctgctcagcgaggacccgctgctcctggcaagcccggcccctcccctgagcgtgcagagcaccccaagaggagggccccctgccgctgctgacccctttggcccgcttctgccgtcttcaggcaacaactcccagccctgctccaatcctgatctcttcggcgaatttctcaattcggactctgtgaccgtcccaccatccttcccgtctgcccacagtgctccgcccccatcctgcagcgccgacttcctgcacctgggggatctgccaggagagcccagcaagatgacagcctcgtccagcaacccagacctgctgggaggatgggctgcctggaccgagactgcagcatcggcagtggcccccacgccagccacagaaggccccctcttctctcctggaggtcagccggccccttgtggctctcaggccagctggaccaagtctcagaacccggacccatttgctgaccttggcgacctcagctccggcctccaaggctcaccagctggattccctcctgggggcttcattcccaaaacggccaccacgcccaaaggcagcagctcctggcagacaagtcggccgccagcccagggcgcctcatggccccctcaggccaagccgccccccaaagcctgcacacagccaaggcctaactatgcctcgaacttcagtgtgatcggggcgcgggaggagcggggggtccgcgcacccagctttgctcaaaagccaaaagtctctgagaacgactttgaagatctgttgtccaatcaaggcttctcctccaggtctgacaagaaagggccaaagaccattgcagagatgaggaagcaggacctggctaaagacacggacccactcaagctgaagctcctggactggattgagggcaaggagcggaacatccgggccctgctgtccacgctgcacacagtgctgtgggacggggagagccgctggacgcccgtgggcatggccgacctggtggctccggagcaagtgaagaagcactatcgccgcgcggtgctggctgtgcaccccgacaaggctgcggggcagccgtacgagcagcacgccaagatgatcttcatggagctgaatgacgcctggtcggagtttgagaaccagggctcccggcccctcttctgaggccgcagtggtggtggctgcgcacacagctccacaggttgggagccgtcgtgggacctgggtccccaccgtgaggaccccgtgggcgacagcaggtgtggccagggtggggctccgagccccgggtcaccgcccgcccagcgttccaggcacatgaagagaaagcattccaaagcctctgattgttgtttcctttttctcctcccgaaggaacagctgattcatgctcctcccgcaattgtcacgtctgtgatttatttggtgtttcgggcgtggcctctggagccccggcacgtggtgggccacgctgctggcgctcatgggccctggtgtttgcaccgcactttgtaatcagtcccgtggttgtctgtacagaattaaactattttccgatg

SEQ ID NO: 7156 - DNA, 1204 bp, Homo sapiens
  source 1..1204: mol_type = unassigned DNA
ggtccccgacattccatatacaagatggccgcagtcggcaaggagagacgtcgctgaggggcttgcctgaagcgaggggattctaacattttcagagaaccttttggaaagaacaagcctacttcaataaatgaaggagaataaagaaaattcaagcccttcagtaacttcagcaaacctggaccacacaaagccatgttggtactgggataagaaagacttggctcatacaccctcacaacttgaaggacttgatccagccaccgaggcccggtaccgccgagagggcgctcggttcatctttgatgtgggcacacgtttggggctacactatgataccctggcaactggaataatttattttcatcgcttctatatgtttcattccttcaagcaattcccaagatatgtgacaggagcctgttgcctctttctggctgggaaagtagaagaaacaccaaaaaaatgtaaagatatcatcaaaacagctcgtagtttattaaatgatgtacaatttggccagtttggagatgacccaaaggaggaagtaatggttctggagagaatcttactgcagaccatcaagtttgatttacaggtagaacatccataccagttcctactaaaatatgcaaagcaactcaaaggtgataaaaacaaaattcaaaagttggttcaaatggcatggacatttgtaaatgacagaactagtctctgcaccaccttgtcactgcagtgggaaccagagatcatagcagtagcagtgatgtatctcgcaggacgtttgtgcaaatttgaaatacaagaatggacctccaaacccatgtataggagatggtgggagcagtttgttcaagatgtcccggtcgacgttttggaagacatctgccaccaaatcctggatctttactcacaaggaaaacaacagatgcctcatcacaccccccatcagctgcaacagcccccatctcttcagcctacaccacaagtgccgcaagtacagcagtcacagccgtctcaaagctccgaaccatcccagccccagcagaaggacccccccctcatcctcctccagggttgggcctgccgccagccagctacccacctcctgccgtcccccctggaggacagcctcctgtgcccccgcccattcccccacccggcatgcctccagttggggggctggggcgggcagcctggatga

SEQ ID NO: 7157 - DNA, 1207 bp, Homo sapiens
  source 1..1207: mol_type = unassigned DNA
ggtccccgacattccatatacaagatggccgcagtcggcaaggagagacgtcgctgaggggcttgcctgaagcgaggggattctaacattttcagagaaccttttggaaagaacaagcctacttcaataaatgaaggagaataaagaaaattcaagcccttcagtaacttcagcaaacctggaccacacaaagccatgttggtactgggataagaaagacttggctcatacaccctcacaacttgaaggacttgatccagccaccgaggcccggtaccgccgagagggcgctcggttcatctttgatgtgggcacacgtttggggctacactatgataccctggcaactggaataatttattttcatcgcttctatatgtttcattccttcaagcaattcccaagatatgtgacaggagcctgttgcctctttctggctgggaaagtagaagaaacaccaaaaaaatgtaaagatatcatcaaaacagctcgtagtttattaaatgatgtacaatttggccagtttggagatgacccaaaggaggaagtaatggttctggagagaatcttactgcagaccatcaagtttgatttacaggtagaacatccataccagttcctactaaaatatgcaaagcaactcaaaggtgataaaaacaaaattcaaaagttggttcaaatggcatggacatttgtaaatgacagaactagtctctgcaccaccttgtcactgcagtgggaaccagagatcatagcagtagcagtgatgtatctcgcaggacgtttgtgcaaatttgaaatacaagaatggacctccaaacccatgtataggagatggtgggagcagtttgttcaagatgtcccggtcgacgttttggaagacatctgccaccaaatcctggatctttactcacaaggaaaacaacagatgcctcatcacaccccccatcagctgcaacagcccccatctcttcagcctacaccacaagtgccgcaagtacagcagtcacagccgtctcaaagctccgaaccatcccagccccagcagaaggacccccagcaaccagcccagcagcagcagccagcccaacagcccaagaaaccctctccgcagcccagttctccccgacaggttaagcgagccgtggttgtttctcccaaagaagagaacaaagcagcaggcaaggcctctttgaaacacacttgg

SEQ ID NO: 7158 - DNA, 3524 bp, Homo sapiens
  source 1..3524: mol_type = unassigned DNA
gacattccatatacaagatggccgcagtcggcaaggagagacgtcgctgaggggcttgcctgaagcgaggggattctaacattttcagagaaccttttggaaagaacaagcctacttcaataaatgaaggagaataaagaaaattcaagcccttcagtaacttcagcaaacctggaccacacaaagccatgttggtactgggataagaaagacttggctcatacaccctcacaacttgaaggacttgatccagccaccgaggcccggtaccgccgagagggcgctcggttcatctttgatgtgggcacacgtttggggctacactatgataccctggcaactggaataatttattttcatcgcttctatatgtttcattccttcaagcaattcccaagatatgtgacaggagcctgttgcctctttctggctgggaaagtagaagaaacaccaaaaaaatgtaaagatatcatcaaaacagctcgtagtttattaaatgatgtacaatttggccagtttggagatgacccaaaggaggaagtaatggttctggagagaatcttactgcagaccatcaagtttgatttacaggtagaacatccataccagttcctactaaaatatgcaaagcaactcaaaggtgataaaaacaaaattcaaaagttggttcaaatggcatggacatttgtaaatgacagtctctgcaccaccttgtcactgcagtgggaaccagagatcatagcagtagcagtgatgtatctcgcaggacgtttgtgcaaatttgaaatacaagaatggacctccaaacccatgtataggagatggtgggagcagtttgttcaagatgtcccggtcgacgttttggaagacatctgccaccaaatcctggatctttactcacaaggaaaacaacagatgcctcatcacaccccccatcagctgcaacagcccccatctcttcagcctacaccacaagtgccgcaagtacagcagtcacagccgtctcaaagctccgaaccatcccagccccagcagaaggacccccagcaaccagcccagcagcagcagccagcccaacagcccaagaaaccctctccgcagcccagttctccccgacaggttaagcgagccgtggttgtttctcccaaagaagagaacaaagcagcagaaccaccaccacctaaaatccccaaaattgagaccactcatccaccgttgcctccagcccacccacctccagaccggaagcctcccctcgctgctgccttaggtgaggctgagccgccgggccctgtggatgccactgacctccccaaagtccagattccccctccggcccacccggcccctgtgcaccagccaccgccgctgccacaccggcccccgcccccacccccctccagctacatgaccgggatgtccaccaccagctcctacatgtctggagagggctaccagagcctgcagtccatgatgaagaccgagggaccctcctacggtgccctgccccccgcctacggcccacctgcacacctgccctaccacccccatgtctacccgcccaacccgcccccgccacctgtgcctcctcccccagcctccttccccccacctgccatcccaccccctactcctggctaccccccacccccacccacctacaaccccaacttcccacccccacccccacgcctcccgcctacccacgcagtcccccctcatcctcctccagggttgggcctgccgccagccagctacccacctcctgccgtcccccctggaggacagcctcctgtgcccccgcccattcccccacccggcatgcctccagttggggggctggggcgggcagcctggatgagataacgtgagccttttttccctctttgtttttttaacaagattttctaatcgacttgcagagtagttgaagtgggtaagcagcagggtaccttgtataatgcacgacagttgcagtatgggaagaatggaccgggcccctgggataaaatcagagtggtcctcacacctagaggacggggacaaccagctttcagagtagcctcatcagtgcccttgcagtctgactgtgtacacttggttcagctaatgtctgagagtcctgcactgggttactttatactagtgaggacgttaaccagccatattggctcaataaatagcttcggtaaggagttaatttccttctagaaatcagtgcctatttttcctggaaactcaattttaaatagtccaattccatctgaagccaagctgttgtcattttcattcggtgacattctctcccatgacacccagaaggggcagaagaaccacatttttcatttatagatgtttgcatcctttgtattaaaattattttgaaggggttgcctcattggatggctttttttttttcctccagggagaaggggagaaatgtacttggaaattaatgtatgtttacatctctttgcaaattcctgtacatagagatatattttttaagtgtgaatgtaacaacatactgtgaattccatcttggttacaaatgagactccttcagtcagttatccaaataaaagcagttctgaaactatccctttctttgttatgggtggaaggtggggctccaggccttcgcagtctgtggcttataaaatgtgcagaggccctccttccagaccctggggacgcgggagaggcctggctgcagctcacagcagccacagccaaccccactgcctcccaaggcactctgggtggatccgcacagctgcctgccaagccagcctgcccccatcctgtgcctgccttggtttcctttggaggacctggttgagttccaaaccagtttgaaactttgaagccttgctgcgtagaacgcacacaggaacccgggggcttggatttgaaaccctttccacttctggcctgtgatgagacagaggcagctggaggagcagcggcctcactgtccaccttgaggggccacggctctgtctgtggaaggggccccgactgagcccccatctgcggtgcttgaggggccttggccctgtctctgcctgctgaccctgccacccacgacagaaacaagcactgagcacccagccaggaggctcacaaagaggcctttatttatctagctcaaagtagacactatcacaatcttgtttgttactccttttactaaaatagttcaaatcaatgtttttaccacactatcaaaaagttctatttcttcttgtctccccacgtcagagtggttgaatagaaggtagaaacaggccgggagtccacgggctcccagctctaaacggcgccagggcaggaaggggtggctccaggtctcactgtggcaccttctacagaaaatagacgtagctgccgggcccggggacagaaaccagacgttccagtccatctccaaaaagcagcacaaatactttgccccacagtatgaaaaatatacacctctaccgctctgcagtcatgcatttagttttaagaaaaaaaaaaaa

SEQ ID NO: 7159 - DNA, 2665 bp, Homo sapiens
  source 1..2665: mol_type = unassigned DNA
ggtccccgacattccatatacaagatggccgcagtcggcaaggagagacgtcgctgaggggcttgcctgaagcgaggggattctaacattttcagagaaccttttggaaagaacaagcctacttcaataaatgaaggagaataaagaaaattcaagcccttcagtaacttcagcaaacctggaccacacaaagccatgttggtactgggataagaaagacttggctcatacaccctcacaacttgaaggacttgatccagccaccgaggcccggtaccgccgagagggcgctcggttcatctttgatgtgggcacacgtttggggctacactatgataccctggcaactggaataatttattttcatcgcttctatatgtttcattccttcaagcaattcccaagatatgtgacaggagcctgttgcctctttctggctgggaaagtagaagaaacaccaaaaaaatgtaaagatatcatcaaaacagctcgtagtttattaaatgatgtacaatttggccagtttggagatgacccaaaggaggaagtaatggttctggagagaatcttactgcagaccatcaagtttgatttacaggtagaacatccataccagttcctactaaaatatgcaaagcaactcaaaggtgataaaaacaaaattcaaaagttggttcaaatggcatggacatttgtaaatgacagtctctgcaccaccttgtcactgcagtgggaaccagagatcatagcagtagcagtgatgtatctcgcaggacgtttgtgcaaatttgaaatacaagaatggacctccaaacccatgtataggagatggtgggagcagtttgttcaagatgtcccggtcgacgttttggaagacatctgccaccaaatcctggatctttactcacaaggaaaacaacagatgcctcatcacaccccccatcagctgcaacagcccccatctcttcagcctacaccacaagtgccgcaagtacagcagtcacagccgtctcaaagctccgaaccatcccagccccagcagaaggacccccagcaaccagcccagcagcagcagccagcccaacagcccaagaaaccctctccgcagcccagttctccccgacaggttaagcgagccgtggtgagtgggctaaagcaggccctgggtagagcaggctttccaggtggcggcaacaccactgttgtttctcccaaagaagagaacaaagcagcagaaccaccaccacctaaaatccccaaaattgagaccactcatccaccgttgcctccagcccacccacctccagaccggaagcctcccctcgctgctgccttaggtgaggctgagccgccgggccctgtggatgccactgacctccccaaagtccagattccccctccggcccacccggcccctgtgcaccagccaccgccgctgccacaccggcccccgcccccacccccctccagctacatgaccgggatgtccaccaccagctcctacatgtctggagagggctaccagagcctgcagtccatgatgaagaccgagggaccctcctacggtgccctgccccccgcctacggcccacctgcacacctgccctaccacccccatgtctacccgcccaacccgcccccgccacctgtgcctcctcccccagcctccttccccccacctgccatcccaccccctactcctggctaccccccacccccacccacctacaaccccaacttcccacccccacccccacgcctcccgcctacccacgcagtcccccctcatcctcctccagggttgggcctgccgccagccagctacccacctcctgccgtcccccctggaggacagcctcctgtgcccccgcccattcccccacccggcatgcctccagttggggggctggggcgggcagcctggatgagataacgtgagccttttttccctctttgtttttttaacaagattttctaatcgacttgcagagtagttgaagtgggtaagcagcagggtaccttgtataatgcacgacagttgcagtatgggaagaatggaccgggcccctgggataaaatcagagtggtcctcacacctagaggacggggacaaccagctttcagagtagcctcatcagtgcccttgcagtctgactgtgtacacttggttcagctaatgtctgagagtcctgcactgggttactttatactagtgaggacgttaaccagccatattggctcaataaatagcttcggtaaggagttaatttccttctagaaatcagtgcctatttttcctggaaactcaattttaaatagtccaattccatctgaagccaagctgttgtcattttcattcggtgacattctctcccatgacacccagaaggggcagaagaaccacatttttcatttatagatgtttgcatcctttgtattaaaattattttgaaggggttgcctcattggatggctttttttttttcctccagggagaaggggagaaatgtacttggaaattaatgtatgtttacatctctttgcaaattcctgtacatagagatatattttttaagtgtgaatgtaacaacatactgtgaattccatcttggttacaaatgagactccttcagtcagttatccaaataaaagcagttctgaaact

SEQ ID NO: 7160 - DNA, 811 bp, Homo sapiens
  source 1..811: mol_type = unassigned DNA
gatggccgcagtcggcaaggagagacgtcgctgaggggcttgcctgaagcgagggcatggagcttttggagagtgtctttattctgagtgaaagaaaaggaagaggatgaaaaagcaagaacagtttaaaggagctccttctctcatggaccacttccatccacccactccccaaatcacaagatgcacatttggtttacatcagtgaattcagtgatttgtgcagatgtgaattaacccaatcccatgacttgtctaagtgaaagtgcctacatggaataaactgaaaaggggtgctggatggaagagatggttagttttagaacataaatctttgtcaagattaagacaggcccaggttttgctgaagaatggaatctggaccagcgttagaggacctgtatgtctagtgaagaaaaaccagaagaaagattctaacattttcagagaaccttttggaaagaacaagcctacttcaataaatgaaggagaataaagaaaattcaagcccttcagtaacttcagcaaacctggaccacacaaagccatgttggtactgggataagaaagacttggctcatacaccctcacaacttgaaggacttgatccagccaccgaggcccggtaccgccgagagggcgctcggttcatctttgatgtgggcacacgtttggggctacactatgataccctggcaactggaataatttattttcatcgcttctatatgtttcattccttcaagcaattcccaagatatgtgacaggagcctgttgcctctttctggctgggaaagtagaagaaacacc

SEQ ID NO: 7161 - DNA, 936 bp, Homo sapiens
  source 1..936: mol_type = unassigned DNA
attccatatacaagatggccgcagtcggcaaggagagacgtcgctgaggggcttgcctgaagcgaggggtgagtgacccaccgactgagggcagcgccgcccacctcccgcgtatctggaggtcggagtaggttatggccaaccgccgctatccactggcggagtctctctttccggattctgcctccctccgctaacctccggattctaacattttcagagaaccttttggaaagaacaagcctacttcaataaatgaaggagaataaagaaaattcaagcccttcagtaacttcagcaaacctggaccacacaaagccatgttggtactgggataagaaagacttggctcatacaccctcacaacttgaaggacttgatccagccaccgaggcccggtaccgccgagagggcgctcggttcatctttgatgtgggcacacgtttggggctacactatgataccctggcaactggaataatttattttcatcgcttctatatgtttcattccttcaagcaattcccaagatatgtgacaggagcctgttgcctctttctggctgggaaagtagaagaaacaccaaaaaaatgtaaagatatcatcaaaacagctcgtagtttattaaatgatgtacaatttggccagtttggagatgacccaaaggaggaagtaatggttctggagagaatcttactgcagaccatcaagtttgatttacaggtagaacatccataccagttcctactaaaatatgcaaagcaactcaaaggtgataaaaacaaaattcaaaagttggttcaaatggcatggacatttgtaaatgacagtctctgcaccaccttgtcactgcagtgggaaccagagatcatagcagtagcagtgatgtatctcgcaggacgtttgtgcaaatttgaaatacaagaatggacctcc

SEQ ID NO: 7162 - DNA, 1118 bp, Homo sapiens
  source 1..1118: mol_type = unassigned DNA
atagggtccacagccctgtgttcttcaaatactgtaaagcagccctctccagattccttgagggtcactttatattacacattcgtccacacaggacaacaaagtcaccacttccacccgccaaagcgcgctcaggtcggccgccacttcccttggtacacgcggaacgcaagccgcgccgaggctaaaggaagaggccggaatgcagggcgaaggggcgcagagatgctagccaatgctgccacctctattttgggtataagggatcttgtaaagctccgttattcgtgtggctatcacaaacaaggtggtttcgaccggccttggctagagaaggcctcctcagcctctgaggatcccaaggtctgtcgcagcacccaacactcccctcgcaggcccagatgccgagggcggaggcgcggcctggagggactagttggcgcgcggctgcccggcgtggtgacgtcagggcggaagcgcacgcggcgtgaagcggcccagaacccggcggtcacgggaatatccgtcgcgccgagaacgctggttagtcttgtttcgggttccggctgcgttgggcttgcgtgcggctcgctaagactatggcgtccgggcctcattcgacagctactgctgccgcagccgcctcatcggccgccccaagcgcgggcggctccagctccgggacgacgaccacgacgacgaccacgacgggagggatcctgatcggcgatcgcctgtactcggaagtttcacttaccatcgaccactctctgattccggaggagaggctctcgcccaccccatccatgcaggatgggctcgacctgcccagtgagacggacttacgcatcctgggctgcgagctcatccaggccgccggcattctcctccggctgccgcaggtggcgatggcaacggggcaggtgttgtttcatcgttttttctactccaaatctttcgtcaaacacagtttcgagattgttgctatggcttgtattaatcttgcatcaaaaatcgaagaagcacctagaagaataagagatgtgattaatgtattccaccacctccgccagttaagaggaaaaagcgaccagctacatttaccaaagcctgggtga

SEQ ID NO: 7163 - DNA, 2388 bp, Homo sapiens
  source 1..2388: mol_type = unassigned DNA
acgcggcgtgaagcggcccagaacccggcggtcacgggaatatccgtcgcgccgagaacgctggttagtcttgtttcgggttccggctgcgttgggcttgcgtgcggctcgctaagactatggcgtccgggcctcattcgacagctactgctgccgcagccgcctcatcggccgccccaagcgcgggcggctccagctccgggacgacgaccacgacgacgaccacgacgggagggatcctgatcggcgatcgcctgtactcggaagtttcacttaccatcgaccactctctgattccggaggagaggctctcgcccaccccatccatgcaggatgggctcgacctgcccagtgagacggacttacgcatcctgggctgcgagctcatccaggccgccggcattctcctccggctgccgcaggtggcgatggcaacggggcaggtgttgtttcatcgttttttctactccaaatctttcgtcaaacacagtttcgagattgttgctatggcttgtattaatcttgcatcaaaaatcgaagaagcacctagaagaataagagatgtgattaatgtattccaccacctccgccagttaagaggaaaaaggactccaagccccctgatccttgatcagaactacattaacaccaaaaatcaagttatcaaagcagagaggagggtgctaaaggagttgggattttgtgttcatgtcaagcatcctcataagatcattgttatgtatttacaagtcttagaatgtgaacgtaatcaaaccctggttcaaactgcctggaattacatgaatgacagtcttcgaaccaatgtgtttgttcgatttcaaccagagactatagcatgtgcttgcatctaccttgcagctagagcacttcagattccgttgccaactcgtccccattggtttcttctttttggtactacagaagaggaaatccaggaaatctgcatagaaacacttaggctttataccagaaaaaagccaaactatgaattactggaaaaagaagtagaaaaaagaaaagtagccttacaagaagccaaattaaaagcaaagggattgaatccggatggaactccagccctttcaaccctgggtggattttctccagcctccaagccatcatcaccaagagaagtaaaagctgaagagaaatcaccaatctccattaatgtgaagacagtcaaaaaagaacctgaggatagacaacaggcttccaaaagcccttacaatggtgtaagaaaagacagcaagagaagtagaaatagcagaagtgcaagtcgatcgaggtcaagaacacgatcacgttctagatcacatactccaagaagacactataataataggcggagtcgatctggaacatacagctcgagatcaagaagcaggtcccgcagtcacagtgaaagccctcgaagacatcataatcatggttctcctcaccttaaggccaagcataccagagatgatttaaaaagttcaaacagacatggtcataaaaggaaaaaatctcgttctcgatctcagagcaagtctcgggatcactcagatgcagccaagaaacacaggcatgaaaggggacatcatagggacaggcgtgaacgatctcgctcctttgagaggtcccataaaagcaagcaccatggtggcagtcgctcaggacatggcaggcacaggcgctgactttctcttcctttgagcctgcatcagttcttggttttgcctatctacagtgtgatgtatggactcaatcaaaaacattaaacgcaaactgattaggatttgatttcttgaaaccctctaggtctctagaacactgaggacagtttcttttgaaaagaactatgttaatttttttgcacattaaaatgccctagcagtatctaattaaaaaccatggtcaggttcaattgtactttattatagttgtgtattgtttattgctataagaactggagcgtgaattctgtaaaaatgtatcttatttttatacagataaaattgcagacactgttctatttaagtggttatttgtttaaatgatggtgaatactttcttaacactggtttgtctgcatgtgtaaagatttttacaaggaaataaaatacaaatcttgttttttctaaactgcttcaaataccttatttaaataaattattaaaaaggaaaattttaatagcaaaatggctgtactggttttctgacaaacttattctttcctccattagatggtagtttgagattattaaaatgcaattcttaactgcattgtgagctattgtaagtcttcactgtatatatggaaaaagtaaatgggagtcgcccaacaatgtgacattaaatgttatattttagcactaaaccaaaaaa

SEQ ID NO: 7164 - DNA, 2305 bp, Homo sapiens
  source 1..2305: mol_type = unassigned DNA
cacaaaatggcggcggcggcggcggcggctggtgctgcagggtcggcagctcccgcggcagcggccggcgccccgggatctgggggcgcaccctcagggtcgcagggggtgctgatcggggacaggctgtactccggggtgctcatcaccttggagaactgcctcctgcctgacgacaagctccgtttcacgccgtccatgtcgagcggcctcgacaccgacacagagaccgacctccgcgtggtgggctgcgagctcatccaggcggccggtatcctgctccgcctgccgcaggtggccatggctaccgggcaggtgttgttccagcggttcttttataccaagtccttcgtgaagcactccatggagcatgtgtcaatggcctgtgtccacctggcttccaagatagaagaggccccaagacgcatacgggacgtcatcaatgtgtttcaccgccttcgacagctgagagacaaaaagaagcccgtgcctctactactggatcaagattatgttaatttaaagaaccaaattataaaggcggaaagacgagttctcaaagagttgggtttctgcgtccatgtgaagcatcctcataagataatcgttatgtaccttcaggtgttagagtgtgagcgtaaccaacacctggtccagacctcatggaattacatgaacgacagccttcgcaccgacgtcttcgtgcggttccagccagagagcatcgcctgtgcctgcatttatcttgctgcccggacgctggagatccctttgcccaatcgtccccattggtttcttttgtttggagcaactgaagaagaaattcaggaaatctgcttaaagatcttgcagctttatgctcggaaaaaggttgatctcacacacctggagggtgaagtggaaaaaagaaagcacgctatcgaagaggcaaaggcccaagcccggggcctgttgcctgggggcacacaggtgctggatggtacctcggggttctctcctgcccccaagctggtggaatcccccaaagaaggtaaagggagcaagccttccccactgtctgtgaagaacaccaagaggaggctggagggcgccaagaaagccaaggcggacagccccgtgaacggcttgccaaaggggcgagagagtcggagtcggagccggagccgtgagcagagctactcgaggtccccatcccgatcagcgtctcctaagaggaggaaaagtgacagcggctccacatctggtgggtccaagtcgcagagccgctcccggagcaggagtgactccccaccgagacaggccccccgcagcgctccctacaaaggctctgagattcggggctcccggaagtccaaggactgcaagtacccccagaagccacacaagtctcggagccggagttcttcccgttctcgaagcaggtcacgggagcgggcggataatccgggaaaatacaagaagaaaagtcattactacagagatcagcgacgagagcgctcgaggtcgtatgaacgcacaggccgtcgctatgagcgggaccaccctgggcacagcaggcatcggaggtgaggcggggttgcagtgactggtggccgcaagcccttccctggggagtacctgatggctgccctttgacccccggtggctgccctttgacccccgggtgtgctctcagcgcaagtggtcctagaacaggattctttttggaaatgtctgtcgactggaccttggtggatttggaaatggaactgagggaccggtgacacgtgcttcagaccggtctggggtgcggcgcacacctgggcccgtgcagggctcagctcggcagcagctctgagggcagctcaatgaaaaagtgaatgcacacgcccttgttggcgtggcctggcatggcctggtgctatcggcagccgctctccactccccgactgatactcaattacgtgaagccaagaaagatgatttttagaacctttgcctatattaggttgtacttatgtacatattttgcagtgtttcacaggagaaagtggccttaactgccccttattctctctccacgttgtaaataaacatgtgtttaatacaagttaaagctatgtatgaaaactcagaacttgaatcccgtcagcttaaaacttgtgtagggaatcctgacttttaaaatgtgagggtatttggatctgtgttgaaagtcgtatatttttatctgtgcggtgctgagtgcaggccaccagctcctaaatagaggttccctatatgcgcgtatgacatggtgaataaacacaactctctccactcagga

SEQ ID NO: 7165 - DNA, 1186 bp, Homo sapiens
  source 1..1186: mol_type = unassigned DNA
ggcggcacaaaatggcggcggcggcggcggcggctggtgctgcagggtcggcagctcccgcggcagcggccggcgccccgggatctgggggcgcaccctcagggtcgcagggggtgctgatcggggacaggctgtactccggggtgctcatcaccttggagaactgcctcctgcctgacgacaagctccgtttcacgccgtccatgtcgagcggcctcgacaccgacacagagaccgacctccgcgtggtgggctgcgagctcatccaggcggccggtatcctgctccgcctgccgcaggtggccatggctaccgggcaggtgttgttccagcggttcttttataccaagtccttcgtgaagcactccatggagcatgtgtcaatggcctgtgtccacctggcttccaagatagaagaggccccaagacgcatacgggacgtcatcaatgtgtttcaccgccttcgacagctgagagacaaaaagaagcccgtgcctctactactggatcaagattatgttaatttaaagaaccaaattataaaggcggaaagacgagttctcaaagagttgggtttctgcgtccatgtgaagcatcctcataagataatcgttatgtaccttcaggtgttagagtgtgagcgtaaccaacacctggtccagacctcatgggtagcctctgagggtaagtgactaagacttctcctctgctgtccaagcgctttggtgcagggacagcggcatcttcagccaatccagtgcaggctctccaccgaaggctggctctagactggtggtacgcacatagcatagccatggccgactcctgctgtggttctctgacgattgtgcttcttgttaatcctctgtcgtgctttggtaatcgtattgattagagttggtaactgtcttgacttgaattttgtccctttaaaactgctgtacctgtatgataaagatgcagtacctttctcttaaaaaaaaatgctatggaaagctgtgagaattgaagagacaaattggctgtgtcagtgtggggttatgtcatgatttctagaagccctgaagttgctcttttgagcagctttgcatgacacgctctggtaaaaggtgtgcatctttaaattatttcatggatactttgaaaaatattgtatcacttcaaatacagcaataagtttatatgt

SEQ ID NO: 7166 - DNA, 3229 bp, Homo sapiens
  source 1..3229: mol_type = unassigned DNA
atgataaagatgcagtacctttctcttaaaaaaaaatgctatggaaagctgtgagaattgaagagacaaattggctgtgtcagtgtggggttatgtcatgatttctagaagccctgaagttgctcttttgagcagctttgcatgacacgctctggtaaaaggtgtgcatctttaaattatttcatggatactttgaaaaatattgtatcacttcaaatacagcaataagtttatatgttctcaagatttcatttgtttttaagaattttaagttcgtggattaatatcactacttgaatactgacagttgttgattagacaccgaaaggttactgattgttgaatgtatctgtgttagagctgtgcactggcacgcttgcatcaggggctggggccacacggccgccacacagattcccccgtgatgcctggagctgcttccagagccgggtgtctccaagaggcacctgtaggacttcccatttagaaatctcttgagtgggtttgtatgttaccttctccaaggtttatttaggacagagatattgctggaaggtcatgggtcagattccctcacaacccacctcgtctgcgggtgcagccccactccaaggctccccgttattggggtatgtgaggagcagtaaatataaaaccagttcaactgtcctcatggaatcaccctttctgtttttgcagtattcataaagctagtgtaaggtctggttttagtctattaaatcttagagatctaaaggaaatgctcaaaatgtagccaggttttaaatgctttaacttttaaaaaatgtaaatttttgtatgtttatagcttctaaatatgaaagttaaagaatgtactgtgatgaaatgttcagtattatgttgcttctcagtatcatgttgcttctcagtattgtgttgcttctgattctatgaatgttcattttaagaccccttgttgaaatgggacagttggcagcggctctgatgagcccgagaagaggcctgcccttgggtgcggagtctccctccgcacgatgctcccacgcgtccaacttgcacccaaggggcttttccctcttccaagtggactccttcaaggaagctgcagctcggtcagcagagaaggggcctgccgccagcgccctggaggaagaggaagaggaacccaagaggatggcttgtctcccagcagccacaccggctttgtgctcagccagttcatttgagtttgcatgtttctctgcactatggattttgagcatttagatttctttaatcaaaagcgttttagtgactccagtagacattttctttctgaggcatcgtgctttgcatgagagcaggccaaggttgaggggaaaagtaaagttaaagtcggttctctttcatagcaacacgtattgtctgacattcagccagctttttttttttctaataatttctgtgcctttctgtcctgtatttactgtatttagaaaaagcagctagaatatttctccattaactcttgagattcacaggactgtctagctctgagtcctagcaatagactccttagaggagtagtacgtttatctagattttctctagataatgcaggcggaagacctgggttcccgggtggggcattgcagttcttcctgtgtttggcttccaggaattacatgaacgacagccttcgcaccgacgtcttcgtgcggttccagccagagagcatcgcctgtgcctgcatttatcttgctgcccggacgctggagatccctttgcccaatcgtccccattggtttcttttgtttggagcaactgaagaagaaattcaggaaatctgcttaaagatcttgcagctttatgctcggaaaaaggttgatctcacacacctggagggtgaagtggaaaaaagaaagcacgctatcgaagagggcccaagcccggggcctgttgcctgggggcacacaggtgctggatggtacctcggggttctctcctgcccccaagctgggtgctgggattacagcctggagtgcagtggcgctatctgggatcactgcaagctccgcctaccagattctggtgattcttgtgcctcagcctcccaagtagctgggattgcaggcgcccaccaccacgctcagagtctcgctgtgttgccagtggaatcccccaaagaaggtaaagggagcaagccttccccactgtctgtgaagaacaccaagaggaggctggagggcgccaagaaagccaaggcggacagccccgtgaacggcttgccaaaggggcgagagagtcggagtcggagccggagccgtgagcagagctactcgaggtccccatcccgatcagcgtctcctaagaggaggaaaagtgacagcggctccacatctggtgggtccaagtcgcagagccgctcccggagcaggagtgactccccaccgagacaggccccccgcagcgctccctacaaaggctctgagattcggggctcccggaagtccaaggactgcaagtacccccagaagccacacaagtctcggagccggagttcttcccgttctcgaagcaggtcacgggagcgggcggataatccgggaaaatacaagaagaaaagtcattactacagagatcagcgacgagagcgctcgaggtcgtatgaacgcacaggccgtcgctatgagcgggaccaccctgggcacagcaggcatcggaggtgaggcggggttgcagtgactggtggccgcaagcccttccctggggagtacctgatggctgccctttgacccccggtggctgccctttgacccccgggtgtgctctcagcgcaagtggtcctagaacaggattctttttggaaatgtctgtcgactggaccttggtggatttggaaatggaactgagggaccggtgacacgtgcttcagaccggtctggggtgcggcgcacacctgggcccgtgcagggctcagctcggcagcagctctgagggcagctcaatgaaaaagtgaatgcacacgcccttgttggcgtggcctggcatggcctggtgctatcggcagccgctctccactccccgactgatactcaattacgtgaagccaagaaagatgatttttagaacctttgcctatattaggttgtacttatgtacatattttgcagtgtttcacaggagaaagtggccttaactgccccttattctctctccacgttgtaaataaacatgtgtttaatac

SEQ ID NO: 7167 - DNA, 5959 bp, Homo sapiens
  source 1..5959: mol_type = unassigned DNA
acttttggagtaggaggccatgctgcaaacccagacttttcaggctgcatctcagatataccgaagtgtgtacccgctacgcacagtgcggtgatgcctggccacctccagcctccagcggggacctcctgcccaggtggagtctgaatgcccaccgccaccagcccacgcgcgcagtgggcgtacacgtggtgacctgcctgcggctgggttcccagctccggctcctcctccctccagctctcgctcggcttcctgcagtatcacgtgcagctgcgctgggtgcaggatggcggcggccgcggcggcggcagcagcggtgggtgtcaggctccgggactgctgcagccgaggcgctgtgctcctgctcttcttttccctgtctcctcggcccccggccgccgccgcctggctgctgggcctgcggcccgaggacactgctggaggccgcgtgtccctggaggggggcaccctgcgcgccgccgaaggcaccagcttcctcctgcgtgtctatttccagccaggaccgccggccaccgccgcaccggtgccctcaccgaccctcaactcgggggagaatggcaccggcgactgggctccgcggctcgtgttcatcgaggagcccccgggcggtggcggcgtggcccccagcgcggtccccactcgccccccgggaccgcagcgctgcagggagcagagcgactgggcatcggacgtggaagtcctggggcccttgcgtcccgggggcgtggcaggctcggccctggtccaggtgcgagtgcgggagctgcgcaagggcgaagcggagcggggcggcgcgggcggtggcgggaagctcttttcactctgcgcctgggatgggcgcgcgtggcaccaccacggcgccgccggcggcttcctgctgcgcgttcgcccgcggttgtacggcccaggcggggacctgctgccccctgcgtggctgcgggcgctcggggcgctcctgctgctagccttgtcggccctgttcagcggcctgcgcctgagcctgctgtcgctggacccggtggagttacgggtgctgcggaacagcggctcggccgccgagcaggagcaggcgcgccgcgtgcaggccgttcgcggcagggggacccatctgctctgcaccctactcctgggccaagccggagccaacgcggccctggctggctggctgtacacctcgctgccgccgggcttcgggggcaccggggaagactacagcgaagaggggatccacttcccgtggctgccggcgctcgtgtgcaccggcgcggtattcctgggcgccgaaatctgcccctactcagtgtgttcgcggcacgggctggccatcgcctcgcacagcgtgtgcctgacccggcttctgatggcagccgccttccccgtgtgctacccgctgggccgcctgctggactgggcgctgcgccaggagataagcaccttctacacgcgggagaagttgctggagacgttgcgggccgcagacccctacagtgacctggtgaaggaggagctcaacatcatacagggtgccctggagctgcgcaccaaagttgtggaggaggtgctgacccccctgggagactgcttcatgctgcgctcagacgcggtgctcgacttcgccactgtctccgagatcctgcgcagcggctacactcgcatcccagtgtacgagggtgaccagcggcacaacattgtggacattttatttgtcaaggacttggccttcgtggaccccgacgactgcaccccgctcctcactgtcacccgcttctacaaccggcccctgcattgtgttttcaatgacacccgactggacacggttctggaggagtttaagaagggaaaatctcacctggccattgtccagcgggtgaataatgagggagaaggggaccctttctatgaggtgatgggcattgtcacgctggaggatatcatagaggagattatcaagtcggagatcctggatgaaactgatctctacactgacaatcggaaaaagcagagggtcccgcaacgggagcggaagcggcatgacttctccttgtttaagctttcggacacggagatgcgggtgaagatctcaccacagcttctgctagccacacaccgcttcatggccacagaagtggagccctttaagtctctgtacctttcggagaagatcctgctccggctcctgaaacatcccaacgtgatccaggagctgaagtttgatgagaagaacaagaaggccccggaacactacctctaccagcgcaaccgccctgtggactactttgtgctgcttctacagggtaaagtggaggtggaggttggtaaggaaggccttcgctttgaaaatggagcctttacttactatggcgtcccagccatcatgaccactgcttgctcagataatgacgtgcggaaggttggaagtctggctggatcttctgtctttctaaaccggtccccttctcgctgcagtgggttgaatcgctctgagtctccaaaccgagagcgcagtgactttgggggcagcaacacccagctgtacagcagcagcaacaacctctacatgcctgactactcagtccacatcctcagcgatgtgcagtttgtgaagatcacacggcagcaatatcagaacgcactcactgcctgccacatggacagctcacctcagtcccctgacatggaggccttcacagacggggactccactaaggcccccacaacccggggcacaccccagacccctaaggatgaccccgccatcacgctcctcaacaacaggaacagcctgccgtgcagccgctcagacgggctgagaagccccagcgaggtagtgtacctgaggatggaggagctggccttcacccaggaagaaatgactgacttcgaggagcacagcacacagcagctcacgctgtctcctgcagccgttcccacgagagcagcatcagatagtgaatgttgtaacatcaacctggatacagagaccagcccctgcagtagcgattttgaggaaaacgtgggcaagaagctgctgagaaccttgagtggccaaaaaaggaagaggtcaccagaaggagagagaacctctgaggacaactccaatttaacacctctgatcacatgacagggcaaagccagcattcactgggtgtgtgaaattccagagctttgggggagaatccaccctcccatcatctgcttcccccaaggcctcccacaggtgacagaatgttctgccttcccttccatctcttcacccctagctgtcagtttggcagattttccctcgttacctccagttcgactcagaaccttgacatggccataacagaaggaggtgcctctgatagaacatgctagaaatggtcttttccacagcatagtctgggactggaaaagagatgtctgactgcaagctgacaatgccactctgggacccctgatgctcttctttgttctttgggtcccctgatgccataggagacctatcgtcttggaacttgccattctttcctccagaacaaaatgttaactttctaacacatttcatgcatagcttggctcagaaggtgccattggcagacaggcacatgggaggctggagtaggaggtctgaagattagttcaggggatggaccaagaatttcccccagagctttaaagaagtgggactcagccatgttggcgcgtgattgacattacagcacagaaaactgttagtgactggtttcctgttagataagggttccagcagcctggggcagtatgtctcagctggaatggaaagaatgtgagatggaacctcaagtcactgtttttaccagggacacatctgttttggctcccaatcagcagtcttcaatcgatcaataattctgctctggaagagaaggaacagggagcagagagacccaactgggagccagagatggaacttcaggtcttaagtgcaaatcaaagcaaaaaacaaacaaaacttacatggaaaaactgtaagtgctgaaagcaagtttagccatgacaaaccaaagagtgcccaggtcagccaagaaagatacataatctcatgggacttcagtgggagttacacaggaatgttgaagaatcattcttctttttcatgcatttgtccttctcccacccccttactacaccctagcagatcagctgagtgtactttattccaagaacttactggatctctggtttttctcctgaagttggggcaggtgcaattccaagcataaccaccagatggcagagtgaccgcgcatacctgcttccaagaataaaacagttctgaaaagcaaccgcaaagccgggcgcggtggctcacacctgtaatcccaacagtttggaagaccgaggcgggtggatcacttgaagtcaggagtttgagaccagcctggccaacatggtgaaaccccatctctcctgggcatgtagtcccagctactcgggaggctgaggcaggagaatcgcttgaacctgggaggcagaggttgcagtgagctgagatcacaccactgcacttcatcctaggcaacagagcgagactctgtctccccccgcaaaaaaaaaaaagaaagaaagaaagagaaaagaaaagaaaagcaaccacagccagccttagggaaaacttggaagtaagtgaaatttgtcttcagaataactatctccctttctgatctgtctcctactctttagatgttctcagtcaagtactcactgaactcattgatcgagtgctgtctgctaaatctccaaaccattcccaaacctttccccgtagtataccatccagcttccctccccttcctccaaaaccctccctcccacctccccacacccattgagtcattcacaggcaggagggagactgatcattcctctgggttatctgcatctcaaaagaaaatgcttacccacaggaactgttaactcaggggttcttaacttggggtccatcaccccagggggtccatagttggacttcagagggtctatgaaacccctaaaactgtcagtatttaatgtatttattcttgtatgttttttccagagcattaaagctttcataaggttctcaaaggtctcagacctacaaagagttaaaacaaacagacaaacaaaaaaaaacactactattttaaatagtggaactttcagcccagcgtttctgcaatgcagagtgaagtggatactgggcagttcgagacaggtttttaatcataagtggtcttttcaaatgtccatcaattgatggggaaggctggcacccaccaagaagtggaagtcctcagaaattctcggcacaccctagagtattgtacaaccaacacccccacataactttgtcccctcttccccaacaacccagagcaggtgttgcagacaggagggccacagcgtgtggaagtaaagactttggagctagagaagccttttccagcaatgattattgacttcaccacaccccttgcctggcctggcctgaggctcagcagtgcatgacttctcgtagataacttcacagtcatccagtcccaacacctgctcttgcctggtaggaacaggcgaagtgtcagccctcaatgttgggtacttagacccaaaccaataaatggtgagttttgaacaagaactaccatcatgcaggcttcttgcccagctgaccactggccccggggtgcctgcctggctggtcttcatcacctgaggccaccaggctcaagccactgctgttgcattacacccatccctttgcaaaatccctatggagcctgtcaccactcccctccctatatacccccaccccacaaagattttcttcaggttaaaaaaaaagtttaaaaaaaagattttaaaataaagcatttatgaaggcttaataaattgtaaataatttttaaataaaatgaaaatgcctttcctggaa

SEQ ID NO: 7168 - DNA, 5305 bp, Homo sapiens
  source 1..5305: mol_type = unassigned DNA
atggcggcggccgcggcggcggcagcagcggtgggtgtcaggctccgggactgctgcagccgaggcgctgtgctcctgctcttcttttccctgtctcctcggcccccggccgccgccgcctggctgctgggcctgcggcccgaggacactgctggaggccgcgtgtccctggaggggggcaccctgcgcgccgccgaaggcaccagcttcctcctgcgtgtctatttccagccaggaccgccgcgctgcagggagcagagcgactgggcatcggacgtggaagtcctggggcccttgcgtcccgggggcgtggcaggctcggccctggtccagctcttttcactctgcgcctgggatgggcgcgcgtggcaccaccacggcgccgccggcggcttcctgctgcgcgttcgcccgcggttgtacggcccaggcggggacctgctgccccctgcgtggctgcgggcgctcggggcgctcctgctgctagccttgtcggccctgttcagcggcctgcgcctgagcctgctgtcgctggacccggtggagttacgggtgctgcggaacagcggctcggccgccgagcaggagcaggcgcgccgcgtgcaggccgttcgcggcagggggacccatctgctctgcaccctactcctgggccaagccggagccaacgcggccctggctggctggctgtacacctcgctgccgccgggcttcgggggcaccggggaagactacagcgaagaggggatccacttcccgtggctgccggcgctcgtgtgcaccggcgcggtattcctgggcgccgaaatctgcccctactcagtgtgttcgcggcacgggctggccatcgcctcgcacagcgtgtgcctgacccggcttctgatggcagccgccttccccgtgtgctacccgctgggccgcctgctggactgggcgctgcgccaggagataagcaccttctacacgcgggagaagttgctggagacgttgcgggccgcagacccctacagtgacctggtgaaggaggagctcaacatcatacagggtgccctggagctgcgcaccaaagttgtggaggaggtgctgacccccctgggagactgcttcatgctgcgctcagacgcggtgctcgacttcgccactgtctccgagatcctgcgcagcggctacactcgcatcccagtgtacgagggtgaccagcggcacaacattgtggacattttatttgtcaaggacttggccttcgtggaccccgacgactgcaccccgctcctcactgtcacccgcttctacaaccggcccctgcattgtgttttcaatgacacccgactggacacggttctggaggagtttaagaagggaaaatctcacctggccattgtccagcgggtgaataatgagggagaaggggaccctttctatgaggtgatgggcattgtcacgctggaggatatcatagaggagattatcaagtcggagatcctggatgaaactgatctctacactgacaatcggaaaaagcagagggtcccgcaacgggagcggaagcggcatgacttctccttgtttaagctttcggacacggagatgcgggtgaagatctcaccacagcttctgctagccacacaccgcttcatggccacagaagtggagccctttaagtctctgtacctttcggagaagatcctgctccggctcctgaaacatcccaacgtgatccaggagctgaagtttgatgagaagaacaagaaggccccggaacactacctctaccagcgcaaccgccctgtggactactttgtgctgcttctacagggtaaagtggaggtggaggttggtaaggaaggccttcgctttgaaaatggagcctttacttactatggcgtcccagccatcatgaccactgcttgctcagataatgacgtgcggaaggttggaagtctggctggatcttctgtctttctaaaccggtccccttctcgctgcagtgggttgaatcgctctgagtctccaaaccgagagcgcagtgactttgggggcagcaacacccagctgtacagcagcagcaacaacctctacatgcctgactactcagtccacatcctcagcgatgtgcagtttgtgaagatcacacggcagcaatatcagaacgcactcactgcctgccacatggacagctcacctcagtcccctgacatggaggccttcacagacggggactccactaaggcccccacaacccggggcacaccccagacccctaaggatgaccccgccatcacgctcctcaacaacaggaacagcctgccgtcatcagatagtgaatgttgtaacatcaacctggatacagagaccagcccctgcagtagcgattttgaggaaaacgtgggcaagaagctgctgagaaccttgagtggccaaaaaaggaagaggtcaccagaaggagagagaacctctgaggacaactccaatttaacacctctgatcacatgacagggcaaagccagcattcactgggtgtgtgaaattccagagctttgggggagaatccaccctcccatcatctgcttcccccaaggcctcccacaggtgacagaatgttctgccttcccttccatctcttcacccctagctgtcagtttggcagattttccctcgttacctccagttcgactcagaaccttgacatggccataacagaaggaggtgcctctgatagaacatgctagaaatggtcttttccacagcatagtctgggactggaaaagagatgtctgactgcaagctgacaatgccactctgggacccctgatgctcttctttgttctttgggtcccctgatgccataggagacctatcgtcttggaacttgccattctttcctccagaacaaaatgttaactttctaacacatttcatgcatagcttggctcagaaggtgccattggcagacaggcacatgggaggctggagtaggaggtctgaagattagttcaggggatggaccaagaatttcccccagagctttaaagaagtgggactcagccatgttggcgcgtgattgacattacagcacagaaaactgttagtgactggtttcctgttagataagggttccagcagcctggggcagtatgtctcagctggaatggaaagaatgtgagatggaacctcaagtcactgtttttaccagggacacatctgttttggctcccaatcagcagtcttcaatcgatcaataattctgctctggaagagaaggaacagggagcagagagacccaactgggagccagagatggaacttcaggtcttaagtgcaaatcaaagcaaaaaacaaacaaaacttacatggaaaaactgtaagtgctgaaagcaagtttagccatgacaaaccaaagagtgcccaggtcagccaagaaagatacataatctcatgggacttcagtgggagttacacaggaatgttgaagaatcattcttctttttcatgcatttgtccttctcccacccccttactacaccctagcagatcagctgagtgtactttattccaagaacttactggatctctggtttttctcctgaagttggggcaggtgcaattccaagcataaccaccagatggcagagtgaccgcgcatacctgcttccaagaataaaacagttctgaaaagcaaccgcaaagccgggcgcggtggctcacacctgtaatcccaacagtttggaagaccgaggcgggtggatcacttgaagtcaggagtttgagaccagcctggccaacatggtgaaaccccatctctcctgggcatgtagtcccagctactcgggaggctgaggcaggagaatcgcttgaacctgggaggcagaggttgcagtgagctgagatcacaccactgcacttcatcctaggcaacagagcgagactctgtctccccccgcaaaaaaaaaaaagaaagaaagaaagagaaaagaaaagaaaagcaaccacagccagccttagggaaaacttggaagtaagtgaaatttgtcttcagaataactatctccctttctgatctgtctcctactctttagatgttctcagtcaagtactcactgaactcattgatcgagtgctgtctgctaaatctccaaaccattcccaaacctttccccgtagtataccatccagcttccctccccttcctccaaaaccctccctcccacctccccacacccattgagtcattcacaggcaggagggagactgatcattcctctgggttatctgcatctcaaaagaaaatgcttacccacaggaactgttaactcaggggttcttaacttggggtccatcaccccagggggtccatagttggacttcagagggtctatgaaacccctaaaactgtcagtatttaatgtatttattcttgtatgttttttccagagcattaaagctttcataaggttctcaaaggtctcagacctacaaagagttaaaacaaacagacaaacaaaaaaaaacactactattttaaatagtggaactttcagcccagcgtttctgcaatgcagagtgaagtggatactgggcagttcgagacaggtttttaatcataagtggtcttttcaaatgtccatcaattgatggggaaggctggcacccaccaagaagtggaagtcctcagaaattctcggcacaccctagagtattgtacaaccaacacccccacataactttgtcccctcttccccaacaacccagagcaggtgttgcagacaggagggccacagcgtgtggaagtaaagactttggagctagagaagccttttccagcaatgattattgacttcaccacaccccttgcctggcctggcctgaggctcagcagtgcatgacttctcgtagataacttcacagtcatccagtcccaacacctgctcttgcctggtaggaacaggcgaagtgtcagccctcaatgttgggtacttagacccaaaccaataaatggtgagttttgaacaagaactaccatcatgcaggcttcttgcccagctgaccactggccccggggtgcctgcctggctggtcttcatcacctgaggccaccaggctcaagccactgctgttgcattacacccatccctttgcaaaatccctatggagcctgtcaccactcccctccctatatacccccaccccacaaagattttcttcaggttaaaaaaaaagtttaaaaaaaagattttaaaataaagcatttatgaaggcttaataaattgtaaataatttttaaataaaatgaaaatgcctttcctgg

SEQ ID NO: 7169 - DNA, 2399 bp, Homo sapiens
  source 1..2399: mol_type = unassigned DNA
aagctcttttcactctgcgcctgggatgggcgcgcgtggcaccaccacggcgccgccggcggcttcctgctgcgcgttcgcccgcggttgtacggcccaggcggggacctgctgccccctgcgtggctgcgggcgctcggggcgctcctgctgctagccttgtcggccctgttcagcggcctgcgcctgagcctgctgtcgctggacccggtggagttacgggtgctgcggaacagcggctcggccgccgagcaggagcaggcgcgccgcgtgcaggccgttcgcggcagggggacccatctgctctgcaccctactcctgggccaagccggagccaacgcggccctggctggctggctgtacacctcgctgccgccgggcttcgggggcaccggggaagactacagcgaagaggggatccacttcccgtggctgccggcgctcgtgtgcaccggcgcggtattcctgggcgccgaaatctgcccctactcagtgtgttcgcggcacgggctggccatcgcctcgcacagcgtgtgcctgacccggcttctgatggcagccgccttccccgtgtgctacccgctgggccgcctgctggactgggcgctgcgccaggagataagcaccttctacacgcgggagaagttgctggagacgttgcgggccgcagacccctacagtgacctggtgaaggaggagctcaacatcatacagggtgccctggagctgcgcaccaaagttgtggaggaggtgctgacccccctgggagactgcttcatgctgcgctcagacgcggtgctcgacttcgccactgtctccgagatcctgcgcagcggctacactcgcatcccagtgtacgagggtgaccagcggcacaacattgtggacattttatttgtcaaggacttggccttcgtggaccccgacgactgcaccccgctcctcactgtcacccgcttctacaaccggcccctgcattgtgttttcaatgacacccgactggacacggttctggaggagtttaagaagggaaaatctcacctggccattgtccagcgggtgaataatgagggagaaggggaccctttctatgaggtgatgggcattgtcacgctggaggatatcatagaggagattatcaagtcggagatcctggatgaaactgatctctacactgacaatcggaaaaagcagagggtcccgcaacgggagcggaagcggcatgacttctccttgtttaagctttcggacacggagatgcgggtgaagatctcaccacagcttctgctagccacacaccgcttcatggccacagaagtggagccctttaagtctctgtacctttcggagaagatcctgctccggctcctgaaacatcccaacgtgatccaggagctgaagtttgatgagaagaacaagaaggccccggaacactacctctaccagcgcaaccgccctgtggactactttgtgctgcttctacagggtaaagtggaggtggaggttggtaaggaaggccttcgctttgaaaatggagcctttacttactatggcgtcccagccatcatgaccactgcttgctcagataatgacgtgcggaaggttggaagtctggctggatcttctgtctttctgcctgtctctgtgtctcgtaccttcgctgtcagcagaggggactctctggcaggctccccagtaaaccggtccccttctcgctgcagtgggttgaatcgctctgagtctccaaaccgagagcgcagtgactttgggggcagcaacacccagctgtacagcagcagcaacaacctctacatgcctgactactcagtccacatcctcagcgatgtgcagtttgtgaagatcacacggcagcaatatcagaacgcactcactgcctgccacatggacagctcacctcagtcccctgacatggaggccttcacagacggggactccactaaggcccccacaacccggggcacaccccagacccctaaggatgaccccgccatcacgctcctcaacaacaggaacagcctgccgtgcagccgctcagacgggctgagaagccccagcgaggtagtgtacctgaggatggaggagctggccttcacccaggaagaaatgactgacttcgaggagcacagcacacagcagctcacgctgtctcctgcagccgttcccacgagagcagcatcagatagtgaatgttgtaacatcaacctggatacagagaccagcccctgcagtagcgattttgaggaaaacgtgggcaagaagctgctgagaaccttgagtggccaaaaaaggaagaggtcaccagaaggagagagaacctctgaggacaactccaatttaacacctctgatcacatgacagggcaaagccagcattcactg

SEQ ID NO: 7170 - DNA, 5455 bp, Homo sapiens
  source 1..5455: mol_type = unassigned DNA
atggcggcggccgcggcggcggcagcagcggtgggtgtcaggctccgggactgctgcagccgaggcgctgtgctcctgctcttcttttccctgtctcctcggcccccggccgccgccgcctggctgctgggcctgcggcccgaggacactgctggaggccgcgtgtccctggaggggggcaccctgcgcgccgccgaaggcaccagcttcctcctgcgtgtctatttccagccaggaccgccgcgctgcagggagcagagcgactgggcatcggacgtggaagtcctggggcccttgcgtcccgggggcgtggcaggctcggccctggtccagctcttttcactctgcgcctgggatgggcgcgcgtggcaccaccacggcgccgccggcggcttcctgctgcgcgttcgcccgcggttgtacggcccaggcggggacctgctgccccctgcgtggctgcgggcgctcggggcgctcctgctgctagccttgtcggccctgttcagcggcctgcgcctgagcctgctgtcgctggacccggtggagttacgggtgctgcggaacagcggctcggccgccgagcaggagcaggcgcgccgcgtgcaggccgttcgcggcagggggacccatctgctctgcaccctactcctgggccaagccggagccaacgcggccctggctggctggctgtacacctcgctgccgccgggcttcgggggcaccggggaagactacagcgaagaggggatccacttcccgtggctgccggcgctcgtgtgcaccggcgcggtattcctgggcgccgaaatctgcccctactcagtgtgttcgcggcacgggctggccatcgcctcgcacagcgtgtgcctgacccggcttctgatggcagccgccttccccgtgtgctacccgctgggccgcctgctggactgggcgctgcgccaggagataagcaccttctacacgcgggagaagttgctggagacgttgcgggccgcagacccctacagtgacctggtgaaggaggagctcaacatcatacagggtgccctggagctgcgcaccaaagttgtggaggaggtgctgacccccctgggagactgcttcatgctgcgctcagacgcggtgctcgacttcgccactgtctccgagatcctgcgcagcggctacactcgcatcccagtgtacgagggtgaccagcggcacaacattgtggacattttatttgtcaaggacttggccttcgtggaccccgacgactgcaccccgctcctcactgtcacccgcttctacaaccggcccctgcattgtgttttcaatgacacccgactggacacggttctggaggagtttaagaagggaaaatctcacctggccattgtccagcgggtgaataatgagggagaaggggaccctttctatgaggtgatgggcattgtcacgctggaggatatcatagaggagattatcaagtcggagatcctggatgaaactgatctctacactgacaatcggaaaaagcagagggtcccgcaacgggagcggaagcggcatgacttctccttgtttaagctttcggacacggagatgcgggtgaagatctcaccacagcttctgctagccacacaccgcttcatggccacagaagtggagccctttaagtctctgtacctttcggagaagatcctgctccggctcctgaaacatcccaacgtgatccaggagctgaagtttgatgagaagaacaagaaggccccggaacactacctctaccagcgcaaccgccctgtggactactttgtgctgcttctacagggtaaagtggaggtggaggttggtaaggaaggccttcgctttgaaaatggagcctttacttactatggcgtcccagccatcatgaccactgcttgctcagataatgacgtgcggaaggttggaagtctggctggatcttctgtctttctaaaccggtccccttctcgctgcagtgggttgaatcgctctgagtctccaaaccgagagcgcagtgactttgggggcagcaacacccagctgtacagcagcagcaacaacctctacatgcctgactactcagtccacatcctcagcgatgtgcagtttgtgaagatcacacggcagcaatatcagaacgcactcactgcctgccacatggacagctcacctcagtcccctgacatggaggccttcacagacggggactccactaaggcccccacaacccggggcacaccccagacccctaaggatgaccccgccatcacgctcctcaacaacaggaacagcctgccgtgcagccgctcagacgggctgagaagccccagcgaggtagtgtacctgaggatggaggagctggccttcacccaggaagaaatgactgacttcgaggagcacagcacacagcagctcacgctgtctcctgcagccgttcccacgagagcagcatcagatagtgaatgttgtaacatcaacctggatacagagaccagcccctgcagtagcgattttgaggaaaacgtgggcaagaagctgctgagaaccttgagtggccaaaaaaggaagaggtcaccagaaggagagagaacctctgaggacaactccaatttaacacctctgatcacatgacagggcaaagccagcattcactgggtgtgtgaaattccagagctttgggggagaatccaccctcccatcatctgcttcccccaaggcctcccacaggtgacagaatgttctgccttcccttccatctcttcacccctagctgtcagtttggcagattttccctcgttacctccagttcgactcagaaccttgacatggccataacagaaggaggtgcctctgatagaacatgctagaaatggtcttttccacagcatagtctgggactggaaaagagatgtctgactgcaagctgacaatgccactctgggacccctgatgctcttctttgttctttgggtcccctgatgccataggagacctatcgtcttggaacttgccattctttcctccagaacaaaatgttaactttctaacacatttcatgcatagcttggctcagaaggtgccattggcagacaggcacatgggaggctggagtaggaggtctgaagattagttcaggggatggaccaagaatttcccccagagctttaaagaagtgggactcagccatgttggcgcgtgattgacattacagcacagaaaactgttagtgactggtttcctgttagataagggttccagcagcctggggcagtatgtctcagctggaatggaaagaatgtgagatggaacctcaagtcactgtttttaccagggacacatctgttttggctcccaatcagcagtcttcaatcgatcaataattctgctctggaagagaaggaacagggagcagagagacccaactgggagccagagatggaacttcaggtcttaagtgcaaatcaaagcaaaaaacaaacaaaacttacatggaaaaactgtaagtgctgaaagcaagtttagccatgacaaaccaaagagtgcccaggtcagccaagaaagatacataatctcatgggacttcagtgggagttacacaggaatgttgaagaatcattcttctttttcatgcatttgtccttctcccacccccttactacaccctagcagatcagctgagtgtactttattccaagaacttactggatctctggtttttctcctgaagttggggcaggtgcaattccaagcataaccaccagatggcagagtgaccgcgcatacctgcttccaagaataaaacagttctgaaaagcaaccgcaaagccgggcgcggtggctcacacctgtaatcccaacagtttggaagaccgaggcgggtggatcacttgaagtcaggagtttgagaccagcctggccaacatggtgaaaccccatctctcctgggcatgtagtcccagctactcgggaggctgaggcaggagaatcgcttgaacctgggaggcagaggttgcagtgagctgagatcacaccactgcacttcatcctaggcaacagagcgagactctgtctccccccgcaaaaaaaaaaaagaaagaaagaaagagaaaagaaaagaaaagcaaccacagccagccttagggaaaacttggaagtaagtgaaatttgtcttcagaataactatctccctttctgatctgtctcctactctttagatgttctcagtcaagtactcactgaactcattgatcgagtgctgtctgctaaatctccaaaccattcccaaacctttccccgtagtataccatccagcttccctccccttcctccaaaaccctccctcccacctccccacacccattgagtcattcacaggcaggagggagactgatcattcctctgggttatctgcatctcaaaagaaaatgcttacccacaggaactgttaactcaggggttcttaacttggggtccatcaccccagggggtccatagttggacttcagagggtctatgaaacccctaaaactgtcagtatttaatgtatttattcttgtatgttttttccagagcattaaagctttcataaggttctcaaaggtctcagacctacaaagagttaaaacaaacagacaaacaaaaaaaaacactactattttaaatagtggaactttcagcccagcgtttctgcaatgcagagtgaagtggatactgggcagttcgagacaggtttttaatcataagtggtcttttcaaatgtccatcaattgatggggaaggctggcacccaccaagaagtggaagtcctcagaaattctcggcacaccctagagtattgtacaaccaacacccccacataactttgtcccctcttccccaacaacccagagcaggtgttgcagacaggagggccacagcgtgtggaagtaaagactttggagctagagaagccttttccagcaatgattattgacttcaccacaccccttgcctggcctggcctgaggctcagcagtgcatgacttctcgtagataacttcacagtcatccagtcccaacacctgctcttgcctggtaggaacaggcgaagtgtcagccctcaatgttgggtacttagacccaaaccaataaatggtgagttttgaacaagaactaccatcatgcaggcttcttgcccagctgaccactggccccggggtgcctgcctggctggtcttcatcacctgaggccaccaggctcaagccactgctgttgcattacacccatccctttgcaaaatccctatggagcctgtcaccactcccctccctatatacccccaccccacaaagattttcttcaggttaaaaaaaaagtttaaaaaaaagattttaaaataaagcatttatgaaggcttaataaattgtaaataatttttaaataaaatgaaaatgcctttcctgg

SEQ ID NO: 7171 - DNA, 2207 bp, Homo sapiens
  source 1..2207: mol_type = unassigned DNA
aatgagggagaaggggaccctttctatgaggtgatgggcattgtcacgctggaggatatcatagaggagattatcaagtcggagatcctggatgaaactgatctctacactgacaatcggaaaaagcagagggtcccgcaacgggagcggaagcggcatgacttctccttgtttaagctttcggacacggagatgcgggtgaagatctcaccacagcttctgctagccacacaccgcttcatggccacagaagtggagccctttaagtctctgtacctttcggagaagatcctgctccggctcctgaaacatcccaacgtgatccaggagctgaagtttgatgagaagaacaagaaggccccggaacactacctctaccagcgcaaccgccctgtggactactttgtgctgcttctacagggtaaagtggaggtggaggttggtaaggaaggccttcgctttgaaaatggagcctttacttactatggcgtcccagccatcatgaccactgcttgctcagataatgacgtgcggaaggttggaagtctggctggatcttctgtctttctaaaccggtccccttctcgctgcagtgggttgaatcgctctgagtctccaaaccgagagcgcagtgactttgggggcagcaacacccagctgtacagcagcagcaacaacctctacatgcctgactactcagtccacatcctcagcgatgtgcagtttgtgaagatcacacggcagcaatatcagaacgcactcactgcctgccacatggacagctcacctcagtcccctgacatggaggccttcacagacggggactccactaaggcccccacaacccggggcacaccccagacccctaaggatgaccccgccatcacgctcctcaacaacaggaacagcctgccgtgcagccgctcagacgggctgagaagccccagcgaggtagtgtacctgaggatggaggagctggccttcacccaggaagaaatgactgacttcgaggagcacagcacacagcagctcacgctgtctcctgcagccgttcccacgagagcagcatcagatagtgaatgttgtaacatcaacctggatacagagaccagcccctgcagtagcgattttgaggaaaacgtgggcaagaagctgctgagaaccttgagtggccaaaaaaggaagaggtcaccagaaggagagagaacctctgaggacaactccaatttaacacctctgatcacatgacagggcaaagccagcattcactgggtgtgtgaaattccagagctttaaagaagtgggactcagccatgttggcgcgtgattgacattacagcacagaaaactgttagtgactggtttcctgttagataagggttccagcagcctggggcagtatgtctcagctggaatggaaagaatgtgagatggaacctcaagtcactgtttttaccagggacacatctgttttggctcccaatcagcagtcttcaatcgatcaataattctgctctggaagagaaggaacagggagcagagagacccaactgggagccagagatggaacttcaggtcttaagtgcaaatcaaagcaaaaaacaaacaaaacttacatggaaaaactgtaagtgctgaaagcaagtttagccatgacaaaccaaagagtgcccaggtcagccaagaaagatacataatctcatgggacttcagtgggagttacacaggaatgttgaagaatcattcttctttttcatgcatttgtccttctcccacccccttactacaccctagcagatcagctgagtgtactttattccaagaacttactggatctctggtttttctcctgaagttggggcaggtgcaattccaagcataaccaccagatggcagagtgaccgcgcatacctgcttccaagaataaaacagttctgaaaagcaaccgcaaagccgggcgcggtggctcacacctgtaatcccaacagtttggaagaccgaggcgggtggatcacttgaagtcaggagtttgagaccagcctggccaacatggtgaaaccccatctctcctgggcatgtagtcccagctactcgggaggctgaggcaggagaatcgcttgaacctgggaggcagaggttgcagtgagctgagatcacaccactgcacttcatcctaggcaacagagcgagactctgtctccccccgc

SEQ ID NO: 7172 - DNA, 3987 bp, Homo sapiens
  source 1..3987: mol_type = unassigned DNA
agtcagggaggcgaactgctgagcactggccgcggacgctccgttgcagtctcgcccaggggccggtacctgcgctcgcgccgccgggttgaaaggatgaagccgcagctggagcagccaccctatgattggctgtggcgcttgtgaacccaaagtaaagatggcgggcgggcaggcagccgccgcactgcccacttggaagatggcggcgcgccgcagcctcagcgctcgcggccgggggatcctgcaggcggctgcggggcggctgctgccgctgctcctgctgagctgctgctgcggtgcgggcggctgcgcagcggtgggcgagaatgaggagacggtgatcatcgggctgcgactggaggacacgaacgacgtgtcgttcatggaagggggggcgctgcgggtgagcgaacggacccgggtcaagctgcgggtgtacgggcagaacatcaataacgagacgtggtcccgcatcgccttcaccgagcacgagcggcggcgccacagcccgggggagcgcgggctggggggccccgcgccgccagagccggacagcggcccccagcgatgcggcatccgcacctcagacatcatcatcttgccccacatcattctcaaccgccgcacctcgggcatcatcgagatcgagatcaaaccgctacgcaagatggagaagagcaagtcctattacctgtgcacgtcgctctccacgcccgccctgggcgccggcggctcggggtccacgggtggcgccgtcgggggcaagggtggctcgggggtggccgggctcccgccgcccccgtgggccgagaccacctggatttaccacgacggcgaggacaccaagatgatcgtaggcgaagagaagaagttcctgctgcccttctggctgcaggtgatcttcatttcgctgctgctgtgcctgtcgggcatgttcagcggcctcaacctggggctcatggccctggacccgatggagctgcgcatcgtgcagaactgcggcacggagaaggagaagaattacgccaagcgcatcgagccggtgcgcaggcagggcaactacctgctgtgctcactgctgctgggcaacgtgctggtcaacaccacgctcaccatcctgctcgacgacatcgccggctcgggcctcgtggccgtggtagtctccaccatcggtatcgtcatcttcggagagatcgtgccccaggccatctgctcccggcatggcctggctgtgggggccaacaccatcttcctcaccaagtttttcatgatgatgaccttccccgcttcctacccggtcagcaagctgctggactgcgtcctgggccaggagataggcaccgtctataaccgggaaaaactgctggagatgctccgggtcaccgatccctacaacgacctcgttaaggaggagctgaacatcatccaaggggcgctggagctccgcaccaagacggtggaggacgtgatgaccccactccgggactgcttcatgatcaccggcgaagccatcctggacttcaacaccatgtctgagatcatggagagcggctacacccgcattccagtgtttgaaggggagcgctccaatatcgtggacctgctgtttgtcaaagacttggccttcgtggatcccgatgactgtacccccctgaaaaccatcaccaaattttataaccaccccttgcactttgttttcaatgacaccaagttggacgctatgctggaagaatttaagaaaggtaaatctcacctggctatcgtgcagcgggtaaacaatgagggagaaggggatccattttatgaagttctgggaatcgtcaccttagaagatgtgattgaagaaatcatcaaatctgagattcttgatgaaacagatttatacactgacaacagaacgaaaaagaaagtggctcaccgggaacgaaagcaagatttttctgcctttaagcagacagacagtgagatgaaggttaaaatatcaccacagctcctcctggccatgcaccgtttcctagcaacagaagtagaagcatttagcccatcccagatgtcagagaagatccttctaaggctgctaaagcaccccaatgtcatccaggaactgaaatatgatgagaagaacaagaaagcccccgaatactacctctaccagcgcaacaagccagtagactacttcgttctcattctgcaggggaaagtggaagttgaagctgggaaagaaggtatgaagtttgaagcgagcgccttctcatactatggcgtgatggccctgacagcctctccaggtgaaaataagtcccctcctcgcccatgtggcttgaatcactcagactctctcagtcgaagcgaccggattgacgccgtcacaccaacactggggagcagcaataaccagctcaattcttcgctcctccaagtctacatccccgattactcggtgcgagccctttcggatctgcagtttgttaagatctcaagacagcaataccaaaatgccttgatggcatcccggatggacaaaaccccccagtcttcagacagtgaaaacactaaaatcgaattgactcttacggagctgcatgacgggttgccagacgagacagccaacctgctcaacgaacagaactgtgtgacgcacagtaaggccaaccacagcctgcacaacgaaggcgccatctaggccgcgctggctgcacccgcccaggcccgcacccgcccagtcccgagggcccggccctgtctgcccatgacttcactggtgtgagcttgtccgccatgctgtaccctgcaacatcctgagaccaaagaccttgtgcccttcccaggagccgcggaggaggacagtgagggaggaatggaaacgagagatgtgaagttggcagccggggcatggcgttcaagattttggagatgaactgattccgcccaaatagaatcatgtttattttttcagctctcccttttatcattattcacactcctctgccctcgatttgcatgaagttgaaaattgttgcgatttattttttcaagagatcatgtttttaaagtgtcttttgcagagttttaagttgttctgtctgaactctgctgtgatcccatgatgtgaccctgatgggctggacttgcccctccggtagccttccttggccctcccagcgaggggcacccttcctctgtgccccagtgggcatcaccgtcgatctcgctggctgaatgaagaagaccgtgttactgcagaacctgccaagtctgtcatcactgtggggtgtagcctgcctcagagggacctgcaatcacctctctgagctcagtggtattttgagaatttaatgtttaactgtacccctttccctcaggaagatttaacatttgcttgggaatgtgattttgctcccaccctaaggaatttttatcaccaaaatgaatgttaatgaatttaaaacccatggtttatcattggcaagaggcaagttgacttcatcctgtcattccagcctggggtctgccagccagccctcctccccgacccagcgcctaagctcacagagtgtcgtcgcccacctccctggtccttgctcttgttaacccaagatgctgctacacagatgccaaatggaaatcttccacagggctttttcagtaaacacgtgatgtggagtgcaagctcctccccttcccactagaacatactttaacagaaaacgagtcggaccttctagctgcactctgtactgtgtgccgagaaggcatttctagacccgtgtttttaaaggagggaactttggggattgccagcccctgctcctcctcccagggagccaactgtccctcctcccctgtccctgggcccatggggcccggcagtggctgtgtcccctgcctgagggctctgtgcctcctgcctcagatgcggcctgtgccagagaggctgcctgtacagccagggtcagtttggccccaaacagggattcagaaacc

SEQ ID NO: 7173 - DNA, 2059 bp, Homo sapiens
  source 1..2059: mol_type = unassigned DNA
gcctcggggttcctcagctggctgaggtggagtcagtgtcagtcagggaggcgaactgctgagcactggccgcggacgctccgttgcagtctcgcccaggggccggtacctgcgctcgcgccgccgggttgaaaggatgaagccgcagctggagcagccaccctatgattggctgtggcgcttgtgaacccaaagtaaagatggcgggcgggcaggcagccgccgcactgcccacttggaagatggcggcgcgccgcagcctcagcgctcgcggccgggggatcctgcaggcggctgcggggcggctgctgccgctgctcctgctgagctgctgctgcggtgcgggcggctgcgcagcggtgggcgagaatgaggagacggtgatcatcgggctgcgactggaggacacgaacgacgtgtcgttcatggaagggggggcgctgcgggtgagcgaacggacccgggtcaagctgcgggtgtacgggcagaacatcaataacgagacgtggtcccgcatcgccttcaccgagcacgagcggcggcgccacagcccgggggagcgcgggctggggggccccgcgccgccagagccggacagcggcccccagcgatgcggcatccgcacctcagacatcatcatcttgccccacatcattctcaaccgccgcacctcgggcatcatcgagatcgagatcaaaccgctacgcaagatggagaagagcaagtcctattacctgtgcacgtcgctctccacgcccgccctgggcgccggcggctcggggtccacgggtggcgccgtcgggggcaagggtggctcgggggtggccgggctcccgccgcccccgtgggccgagaccacctggatttaccacgacggcgaggacaccaagatgatcgtaggcgaagagaagaagttcctgctgcccttctggctgcaggtgatcttcatttcgctgctgctgtgcctgtcgggcatgttcagcggcctcaacctggggctcatggccctggacccgatggagctgcgcatcgtgcagaactgcggcacggagaaggagaagaattacgccaagcgcatcgagccggtgcgcaggcagggcaactacctgctgtgctcactgctgctgggcaacgtgctggtcaacaccacgctcaccatcctgctcgacgacatcgccggctcgggcctcgtggccgtggtagtctccaccatcggtatcgtcatcttcggagagatcgtgccccaggccatctgctcccggcatggcctggctgtgggggccaacaccatcttcctcaccaagtttttcatgatgatgaccttccccgcttcctacccggtcagcaagctgctggactgcgtcctgggccaggagataggcaccgtctataaccgggaaaaactgctggagatgctccgggtcaccgatccctacaacgacctcgttaaggaggagctgaacatcatccaaggggcgctggagctccgcaccaagacggtggaggacgtgatgaccccactccgggactgcttcatgatcaccggcgaagccatcctggacttcaacaccatgtctgagatcatggagagcggctacacccgcattccagtgtttgaaggggagcgctccaatatcgtggacctgctgtttgtcaaagacttggccttcgtggatcccgatgactgtacccccctgaaaaccatcaccaaattttataaccaccccttgcactttgttttcaatgacaccaagttggacgctatgctggaagaatttaagaaagaacacacaaacaagaaacccaaatcataccaacactgaaaagaagagacaataagaagcattctttctttcaacatcacagacattggcaactctaggatgtctatacagagggataaaaaggggtggcagttggctgggcgtggtggctcatgcctgtaatcccggcactttgggaggcccagggaggtggatcacttgaggtcaggagttccagactgacagtctggccaccatggtgaaaccccgtttctaataaaaatacagaaaaatta

SEQ ID NO: 7174 - DNA, 4053 bp, Homo sapiens
  source 1..4053: mol_type = unassigned DNA
agtcagggaggcgaactgctgagcactggccgcggacgctccgttgcagtctcgcccaggggccggtacctgcgctcgcgccgccgggttgaaaggatgaagccgcagctggagcagccaccctatgattggctgtggcgcttgtgaacccaaagtaaagatggcgggcgggcaggcagccgccgcactgcccacttggaagatggcggcgcgccgcagcctcagcgctcgcggccgggggatcctgcaggcggctgcggggcggctgctgccgctgctcctgctgagctgctgctgcggtgcgggcggctgcgcagcggtgggcgagaatgaggagacggtgatcatcgggctgcgactggaggacacgaacgacgtgtcgttcatggaagggggggcgctgcgggtgagcgaacggacccgggtcaagctgcgggtgtacgggcagaacatcaataacgagacgtggtcccgcatcgccttcaccgagcacgagcggcggcgccacagcccgggggagcgcgggctggggggccccgcgccgccagagccggacagcggcccccagcgatgcggcatccgcacctcagacatcatcatcttgccccacatcattctcaaccgccgcacctcgggcatcatcgagatcgagatcaaaccgctacgcaagatggagaagagcaagtcctattacctgtgcacgtcgctctccacgcccgccctgggcgccggcggctcggggtccacgggtggcgccgtcgggggcaagggtggctcgggggtggccgggctcccgccgcccccgtgggccgagaccacctggatttaccacgacggcgaggacaccaagatgatcgtaggcgaagagaagaagttcctgctgcccttctggctgcaggtgatcttcatttcgctgctgctgtgcctgtcgggcatgttcagcggcctcaacctggggctcatggccctggacccgatggagctgcgcatcgtgcagaactgcggcacggagaaggagaagaattacgccaagcgcatcgagccggtgcgcaggcagggcaactacctgctgtgctcactgctgctgggcaacgtgctggtcaacaccacgctcaccatcctgctcgacgacatcgccggctcgggcctcgtggccgtggtagtctccaccatcggtatcgtcatcttcggagagatcgtgccccaggccatctgctcccggcatggcctggctgtgggggccaacaccatcttcctcaccaagtttttcatgatgatgaccttccccgcttcctacccggtcagcaagctgctggactgcgtcctgggccaggagataggcaccgtctataaccgggaaaaactgctggagatgctccgggtcaccgatccctacaacgacctcgttaaggaggagctgaacatcatccaaggggcgctggagctccgcaccaagacggtggaggacgtgatgaccccactccgggactgcttcatgatcaccggcgaagccatcctggacttcaacaccatgtctgagatcatggagagcggctacacccgcattccagtgtttgaaggggagcgctccaatatcgtggacctgctgtttgtcaaagacttggccttcgtggatcccgatgactgtacccccctgaaaaccatcaccaaattttataaccaccccttgcactttgttttcaatgacaccaagttggacgctatgctggaagaatttaagaaaggtaaatctcacctggctatcgtgcagcgggtaaacaatgagggagaaggggatccattttatgaagttctgggaatcgtcaccttagaagatgtgattgaagaaatcatcaaatctgagattcttgatgaaacagatttatacactgacaacagaacgaaaaagaaagtggctcaccgggaacgaaagcaagatttttctgcctttaagcagacagacagtgagatgaaggttaaaatatcaccacagctcctcctggccatgcaccgtttcctagcaacagaagtagaagcatttagcccatcccagatgtcagagaagatccttctaaggctgctaaagcaccccaatgtcatccaggaactgaaatatgatgagaagaacaagaaagcccccgaatactacctctaccagcgcaacaagccagtagactacttcgttctcattctgcaggggaaagtggaagttgaagctgggaaagaaggtatgaagtttgaagcgagcgccttctcatactatggcgtgatggccctgacagcctctccagttcctttgtccctgtctcgtacctttgttgtcagcagaacagagttgttagcagcaggttctccaggtgaaaataagtcccctcctcgcccatgtggcttgaatcactcagactctctcagtcgaagcgaccggattgacgccgtcacaccaacactggggagcagcaataaccagctcaattcttcgctcctccaagtctacatccccgattactcggtgcgagccctttcggatctgcagtttgttaagatctcaagacagcaataccaaaatgccttgatggcatcccggatggacaaaaccccccagtcttcagacagtgaaaacactaaaatcgaattgactcttacggagctgcatgacgggttgccagacgagacagccaacctgctcaacgaacagaactgtgtgacgcacagtaaggccaaccacagcctgcacaacgaaggcgccatctaggccgcgctggctgcacccgcccaggcccgcacccgcccagtcccgagggcccggccctgtctgcccatgacttcactggtgtgagcttgtccgccatgctgtaccctgcaacatcctgagaccaaagaccttgtgcccttcccaggagccgcggaggaggacagtgagggaggaatggaaacgagagatgtgaagttggcagccggggcatggcgttcaagattttggagatgaactgattccgcccaaatagaatcatgtttattttttcagctctcccttttatcattattcacactcctctgccctcgatttgcatgaagttgaaaattgttgcgatttattttttcaagagatcatgtttttaaagtgtcttttgcagagttttaagttgttctgtctgaactctgctgtgatcccatgatgtgaccctgatgggctggacttgcccctccggtagccttccttggccctcccagcgaggggcacccttcctctgtgccccagtgggcatcaccgtcgatctcgctggctgaatgaagaagaccgtgttactgcagaacctgccaagtctgtcatcactgtggggtgtagcctgcctcagagggacctgcaatcacctctctgagctcagtggtattttgagaatttaatgtttaactgtacccctttccctcaggaagatttaacatttgcttgggaatgtgattttgctcccaccctaaggaatttttatcaccaaaatgaatgttaatgaatttaaaacccatggtttatcattggcaagaggcaagttgacttcatcctgtcattccagcctggggtctgccagccagccctcctccccgacccagcgcctaagctcacagagtgtcgtcgcccacctccctggtccttgctcttgttaacccaagatgctgctacacagatgccaaatggaaatcttccacagggctttttcagtaaacacgtgatgtggagtgcaagctcctccccttcccactagaacatactttaacagaaaacgagtcggaccttctagctgcactctgtactgtgtgccgagaaggcatttctagacccgtgtttttaaaggagggaactttggggattgccagcccctgctcctcctcccagggagccaactgtccctcctcccctgtccctgggcccatggggcccggcagtggctgtgtcccctgcctgagggctctgtgcctcctgcctcagatgcggcctgtgccagagaggctgcctgtacagccagggtcagtttggccccaaacagggattcagaaacc

SEQ ID NO: 7175 - DNA, 3903 bp, Homo sapiens
  source 1..3903: mol_type = unassigned DNA
cgagcctcggggttcctcagctggctgaggtggagtcagtgtcagtcagggaggcgaactgctgagcactggccgcggacgctccgttgcagtctcgcccaggggccggtacctgcgctcgcgccgccgggttgaaaggatgaagccgcagctggagcagccaccctatgattggctgtggcgcttgtgaacccaaagtaaagatggcgggcgggcaggcagccgccgcactgcccacttggaagatggcggcgcgccgcagcctcagcgctcgcggccgggggatcctgcaggcggctgcggggcggctgctgccgctgctcctgctgagctgctgctgcggtgcgggcggctgcgcagcggtgggcgagaatgaggagacggtgatcatcgggctgcgactggaggacacgaacgacgtgtcgttcatggaagggggggcgctgcgggtgagcgaacggacccgggtcaagctgcgggtgtacgggcagaacatcaataacgagacgtggtcccgcatcgccttcaccgagcacgagcggcggcgccacagcccgggggagcgcgggctggggggccccgcgccgccagagccggacagcggcccccagcgatgcggcatccgcacctcagacatcatcatcttgccccacatcattctcaaccgccgcacctcgggcatcatcgagatcgagatcaaaccgctacgcaagatggagaagagcaagtcctattacctgtgcacgtcgctctccacgcccgccctgggcgccggcggctcggggtccacgggtggcgccgtcgggggcaagggtggctcgggggtggccgggctcccgccgcccccgtgggccgagaccacctggatttaccacgacggcgaggacaccaagatgatcgtaggcgaagagaagaagttcctgctgcccttctggctgcaggtgatcttcatttcgctgctgctgtgcctgtcgggcatgttcagcggcctcaacctggggctcatggccctggacccgatggagctgcgcatcgtgcagaactgcggcacggagaaggagaagaattacgccaagcgcatcgagccggtgcgcaggcagggcaactacctgctgtgctcactgctgctgggcaacgtgctggtcaacaccacgctcaccatcctgctcgacgacatcgccggctcgggcctcgtggccgtggtagtctccaccatcggtatcgtcatcttcggagagatcgtgccccaggccatctgctcccggcatggcctggctgtgggggccaacaccatcttcctcaccaagtttttcatgatgatgaccttccccgcttcctacccggtcagcaagctgctggactgcgtcctgggccaggagataggcaccgtctataaccgggaaaaactgctggagatgctccgggtcaccgatccctacaacgacctcgttaaggaggagctgaacatcatccaaggggcgctggagctccgcaccaagacggtggaggacgtgatgaccccactccgggactgcttcatgatcaccggcgaagccatcctggacttcaacaccatgtctgagatcatggagagcggctacacccgcattccagtgtttgaaggggagcgctccaatatcgtggacctgctgtttgtcaaagacttggccttcgtggatcccgatgactgtacccccctgaaaaccatcaccaaattttataaccaccccttgcactttgttttcaatgacaccaagttggacgctatgctggaagaatttaagaaaggtaaatctcacctggctatcgtgcagcgggtaaacaatgagggagaaggggatccattttatgaagttctgggaatcgtcaccttagaagatgtgattgaagaaatcatcaaatctgagattcttgatgaaacagatttatacactgacaacagaacgaaaaagaaagtggctcaccgggaacgaaagcaagatttttctgcctttaagcagacagacagtgagatgaaggttaaaatatcaccacagctcctcctggccatgcaccttgtgtttatatctatagaagtagaagcatttagcccatcccagatgtcagagaagatccttctaaggctgctaaagcaccccaatgtcatccaggaactgaaatatgatgagaagaacaagaaagcccccgaatactacctctaccagcgcaacaagccagtagactacttcgttctcattctgcaggggaaagtggaagttgaagctgggaaagaaggtatgaagtttgaagcgagcgccttctcatactatggcgtgatggccctgacagcctctccaggtgaaaataagtcccctcctcgcccatgtggcttgaatcactcagactctctcagtcgaagcgaccggattgacgccgtcacaccaacactggggagcagcaataaccagctcaattcttcgctcctccaagtctacatccccgattactcggtgcgagccctttcggatctgcagtttgttaagatctcaagacagcaataccaaaatgccttgatggcatcccggatggacaaaaccccccagtcttcagacagtgaaaacactaaaatcgaattgactcttacggagctgcatgacgggttgccagacgagacagccaacctgctcaacgaacagaactgtgtgacgcacagtaaggccaaccacagcctgcacaacgaaggcgccatctaggccgcgctggctgcacccgcccaggcccgcacccgcccagtcccgagggcccggccctgtctgcccatgacttcactggtgtgagcttgtccgccatgctgtaccctgcaacatcctgagaccaaagaccttgtgcccttcccaggagccgcggaggaggacagtgagggaggaatggaaacgagagatgtgaagttggcagccggggcatggcgttcaagattttggagatgaactgattccgcccaaatagaatcatgtttattttttcagctctcccttttatcattattcacactcctctgccctcgatttgcatgaagttgaaaattgttgcgatttattttttcaagagatcatgtttttaaagtgtcttttgcagagttttaagttgttctgtctgaactctgctgtgatcccatgatgtgaccctgatgggctggacttgcccctccggtagccttccttggccctcccagcgaggggcacccttcctctgtgccccagtgggcatcaccgtcgatctcgctggctgaatgaagaagaccgtgttactgcagaacctgccaagtctgtcatcactgtggggtgtagcctgcctcagagggacctgcaatcacctctctgagctcagtggtattttgagaatttaatgtttaactgtacccctttccctcaggaagatttaacatttgcttgggaatgtgattttgctcccaccctaaggaatttttatcaccaaaatgaatgttaatgaatttaaaacccatggtttatcattggcaagaggcaagttgacttcatcctgtcattccagcctggggtctgccagccagccctcctccccgacccagcgcctaagctcacagagtgtcgtcgcccacctccctggtccttgctcttgttaacccaagatgctgctacacagatgccaaatggaaatcttccacagggctttttcagtaaacacgtgatgtggagtgcaagctcctccccttcccactagaacatactttaacagaaaacgagtcggaccttctagctgcactctgtactgtgtgccgagaaggcatttctagacccgtgtttttaaaggagggaactttggggattgccagcccctgctcctcctcccagggagccaactgtccctcctcccctgtccctgggc

SEQ ID NO: 7176 - DNA, 4205 bp, Homo sapiens
  source 1..4205: mol_type = unassigned DNA
cgagcctcggggttcctcagctggctgaggtggagtcagtgtcagtcagggaggcgaactgctgagcactggccgcggacgctccgttgcagtctcgcccaggggccggtacctgcgctcgcgccgccgggttgaaaggatgaagccgcagctggagcagccaccctatgattggctgtggcgcttgtgaacccaaagtaaagatggcgggcgggcaggcagccgccgcactgcccacttggaagatggcggcgcgccgcagcctcagcgctcgcggccgggggatcctgcaggcggctgcggggcggctgctgccgctgctcctgctgagctgctgctgcggtgcgggcggctgcgcagcggtgggcgagaatgaggagacggtgatcatcgggctgcgactggaggacacgaacgacgtgtcgttcatggaagggggggcgctgcgggtgagcgaacggacccgggtcaagctgcgggtgtacgggcagaacatcaataacgagacgtggtcccgcatcgccttcaccgagcacgagcggcggcgccacagcccgggggagcgcgggctggggggccccgcgccgccagagccggacagcggcccccagcgatgcggcatccgcacctcagacatcatcatcttgccccacatcattctcaaccgccgcacctcgggcatcatcgagatcgagatcaaaccgctacgcaagatggagaagagcaagtcctattacctgtgcacgtcgctctccacgcccgccctgggcgccggcggctcggggtccacgggtggcgccgtcgggggcaagggtggctcgggggtggccgggctcccgccgcccccgtgggccgagaccacctggatttaccacgacggcgaggacaccaagatgatcgtaggcgaagagaagaagttcctgctgcccttctggctgcaggtgatcttcatttcgctgctgctgtgcctgtcgggcatgttcagcggcctcaacctggggctcatggccctggacccgatggagctgcgcatcgtgcagaactgcggcacggagaaggagaagaattacgccaagcgcatcgagccggtgcgcaggcagggcaactacctgctgtgctcactgctgctgggcaacgtgctggtcaacaccacgctcaccatcctgctcgacgacatcgccggctcgggcctcgtggccgtggtagtctccaccatcggtatcgtcatcttcggagagatcgtgccccaggccatctgctcccggcatggcctggctgtgggggccaacaccatcttcctcaccaagtttttcatgatgatgaccttccccgcttcctacccggtcagcaagctgctggactgcgtcctgggccaggagataggcaccgtctataaccgggaaaaactgctggagatgctccgggtcaccgatccctacaacgacctcgttaaggaggagctgaacatcatccaaggggcgctggagctccgcaccaagacggtggaggacgtgatgaccccactccgggactgcttcatgatcaccggcgaagccatcctggacttcaacaccatgtctgagatcatggagagcggctacacccgcattccagtgtttgaaggggagcgctccaatatcgtggacctgctgtttgtcaaagacttggccttcgtggatcccgatgactgtacccccctgaaaaccatcaccaaattttataaccaccccttgcactttgttttcaatgacaccaagttggacgctatgctggaagaatttaagaaaggtaaatctcacctggctatcgtgcagcgggtaaacaatgagggagaaggggatccattttatgaagttctgggaatcgtcaccttagaagatgtgattgaagaaatcatcaaatctgagattcttgatgaaacagatttatacactgacaacagaacgaaaaagaaagtggctcaccgggaacgaaagcaagatttttctgcctttaagcagacagacagtgagatgaaggttaaaatatcaccacagctcctcctggccatgcaccttgtgtttatatctatagaagtagaagcatttagcccatcccagatgtcagagaagatccttctaaggctgctaaagcaccccaatgtcatccaggaactgaaatatgatgagaagaacaagaaagcccccgaatactacctctaccagcgcaacaagccagtagactacttcgttctcattctgcaggggaaagtggaagttgaagctgggaaagaaggtatgaagtttgaagcgagcgccttctcatactatggcgtgatggccctgacagcctctccagttcctttgtccctgtctcgtacctttgttgtcagcagaacagagttgttagcagcaggttctccaggtgaaaataagtcccctcctcgcccatgtggcttgaatcactcagactctctcagtcgaagcgaccggattgacgccgtcacaccaacactggggagcagcaataaccagctcaattcttcgctcctccaagtctacatccccgattactcggtgcgagccctttcggatctgcagtttgttaagatctcaagacagcaataccaaaatgccttgatggcatcccggatggacaaaaccccccagtcttcagacagtgaaaacactaaaatcgaattgactcttacggagctgcatgacgggttgccagacgagacagccaacctgctcaacgaacagaactgtgtgacgcacagtaaggccaaccacagcctgcacaacgaaggcgccatctaggccgcgctggctgcacccgcccaggcccgcacccgcccagtcccgagggcccggccctgtctgcccatgacttcactggtgtgagcttgtccgccatgctgtaccctgcaacatcctgagaccaaagaccttgtgcccttcccaggagccgcggaggaggacagtgagggaggaatggaaacgagagatgtgaagttggcagccggggcatggcgttcaagattttggagatgaactgattccgcccaaatagaatcatgtttattttttcagctctcccttttatcattattcacactcctctgccctcgatttgcatgaagttgaaaattgttgcgatttattttttcaagagatcatgtttttaaagtgtcttttgcagagttttaagttgttctgtctgaactctgctgtgatcccatgatgtgaccctgatgggctggacttgcccctccggtagccttccttggccctcccagcgaggggcacccttcctctgtgccccagtgggcatcaccgtcgatctcgctggctgaatgaagaagaccgtgttactgcagaacctgccaagtctgtcatcactgtggggtgtagcctgcctcagagggacctgcaatcacctctctgagctcagtggtattttgagaatttaatgtttaactgtacccctttccctcaggaagatttaacatttgcttgggaatgtgattttgctcccaccctaaggaatttttatcaccaaaatgaatgttaatgaatttaaaacccatggtttatcattggcaagaggcaagttgacttcatcctgtcattccagcctggggtctgccagccagccctcctccccgacccagcgcctaagctcacagagtgtcgtcgcccacctccctggtccttgctcttgttaacccaagatgctgctacacagatgccaaatggaaatcttccacagggctttttcagtaaacacgtgatgtggagtgcaagctcctccccttcccactagaacatactttaacagaaaacgagtcggaccttctagctgcactctgtactgtgtgccgagaaggcatttctagacccgtgtttttaaaggagggaactttggggattgccagcccctgctcctcctcccagggagccaactgtccctcctcccctgtccctgggcccatggggcccggcagtggctgtgtcccctgcctgagggctctgtgcctcctgcctcagatgcggcctgtgccagagaggctgcctgtacagccagggtcagtttggccccaaacagggattcagaaaccaaatgtgtgttgtggccattttatgtgtgtctccgtcttattttaataccaaattcatcatgtagtgaaattatgtcaggaggtatatgagtgactgaattcttaa

SEQ ID NO: 7177 - DNA, 1849 bp, Homo sapiens
  source 1..1849: mol_type = unassigned DNA
agtcagggaggcgaactgctgagcactggccgcggacgctccgttgcagtctcgcccaggggccggtacctgcgctcgcgccgccgggttgaaaggatgaagccgcagctggagcagccaccctatgattggctgtggcgcttgtgaacccaaagtaaagatggcgggcgggcaggcagccgccgcactgcccacttggaagatggcggcgcgccgcagcctcagcgctcgcggccgggggatcctgcaggcggctgcggggcggctgctgccgctgctcctgctgagctgctgctgcggtgcgggcggctgcgcagcggtgggcgagaatgaggagacggtgatcatcgggctgcgactggaggacacgaacgacgtgtcgttcatggaagggggggcgctgcgggtgagcgaacggacccgggtcaagctgcgggtgtacgggcagaacatcaataacgagacgtggtcccgcatcgccttcaccgagcacgagcggcggcgccacagcccgggggagcgcgggctggggggccccgcgccgccagagccggacagcggcccccagcgatgcggcatccgcacctcagacatcatcatcttgccccacatcattctcaaccgccgcacctcgggcatcatcgagatcgagatcaaaccgctacgcaagatggagaagagcaagtcctattacctgtgcacgtcgctctccacgcccgccctgggcgccggcggctcggggtccacgggtggcgccgtcgggggcaagggtggctcgggggtggccgggctcccgccgcccccgtgggccgagaccacctggatttaccacgacggcgaggacaccaagatgatcgtaggcgaagagaagaagttcctgctgcccttctggctgcaggtgatcttcatttcgctgctgctgtgcctgtcgggcatgttcagcggcctcaacctggggctcatggccctggacccgatggagctgcgcatcgtgcagaactgcggcacggagaaggagaagaattacgccaagcgcatcgagccggtgcgcaggcagggcaactacctgctgtgctcactgctgctgggcaacgtgctggtcaacaccacgctcaccatcctgctcgacgacatcgccggctcgggcctcgtggccgtggtagtctccaccatcggtatcgtcatcttcggagagatcgtgccccaggccatctgctcccggcatggcctggctgtgggggccaacaccatcttcctcaccaagtttttcatgatgatgaccttccccgcttcctacccggtcagcaagctgctggactgcgtcctgggccaggagataggcaccgtctataaccgggaaaaactgctggagatgctccgggtcaccgatccctacaacgacctcgttaaggaggagctgaacatcatccaaggggcgctggagctccgcaccaagacggtggaggacgtgatgaccccactccgggactgcttcatgatcaccggcgaagccatcctggacttcaacaccatgtctgagatcatggagagcggctacacccgcattccagtgtttgaaggggagcgctccaatatcgtggacctgctgtttgtcaaagacttggccttcgtggatcccgatgactgtacccccctgaaaaccatcaccaaattttataaccaccccttgcactttgttttcaatgacaccaagttggacgctatgctggaagaatttaagaaagaacacacaaacaagaaacccaaatcataccaacactgcaacgaacagaactgtgtgacgcacagtaaggccaaccacagcctgcacaacgaaggcgccatctag

SEQ ID NO: 7178 - DNA, 3447 bp, Homo sapiens
  source 1..3447: mol_type = unassigned DNA
gcgagaggccgagagggggcagcaggcgatggcggcggcggtagctgcggcgggtcggttaggctggttgttcgccgcgctctgcctgggcaacgccgcgggggaggccgcgccgggcccgcgagtgctgggcttctgcctggaggaggatggagcggcgggcgcgggttgggtacgcggaggggcggcgcgggacacgccggacgccaccttcctcctgcgcctcttcggcccgggcttcgccaacagctcttggtcctgggtggccccggagggggcgggctgccgggaggaggcggcctcccccgcgggcgagtggcgcgcgctgctgcgcttgcgcctgcgggccgaggccgtgcgcccgcactcggcgctgctggcggtgcgcgtggagccgggtggcggggcggctgaggaggcggcgccgccctgggctctgggcctgggggcggccgggctgctggcgctggcagcgctggcgcgaggcctgcagctgagcgcgctggcgctggcgcctgccgaggtgcaggtgctgcgcgagagcggctcggaggcggagcgtgcggcggcgcggcgtttggagcccgcgcggcgctgggccggctgcgccttgggcgcgctgctgctgctggccagcctggcgcaggcggcgctggcggtgctgctgtaccgcgcggccggccagcgtgcggtgcccgccgtgttgggcagcgcggggctcgtgttcctggtgggagaggtggtgccggccgccgtgagcgggcgctggacgctggcgctggcgccgcgagcgctcggcctcagccgcctggccgtcctgctcactctgcccgtcgcgctgcccgtggggcagctgctggagctggcggcgcggcccgggcggctgcgggagcgggtgctggagctggcgcgcggcggcggcgacccctacagcgatctcagcaagggcgtgctgcgctgccggaccgtggaggacgtgctcacgcccctcgaagactgcttcatgctggacgccagcaccgtgctggacttcggcgtcctggccagcatcatgcagagcggccacacgcgcatcccggtgtacgaggaggagcgctccaacatcgtggacatgctctacctcaaggacttggccttcgtggatcccgaagactgcacgccgctcagcaccatcactcgtttctacaaccatccgctccacttcgtcttcaacgacaccaagctggacgctgtcctggaggaattcaagcgagggaagtcccacctggccatcgtgcagaaggtgaacaacgagggtgaaggcgaccccttctacgaggtcctgggcctggtcaccctggaggacgtgatcgaggagatcatcaggtccgagatcctggacgagtctgaagactaccgagacaccgtggtgaagaggaagcctgcttctctgatggcccctctgaagcggaaggaggagttctccttgttcaaggtgtctgatgatgaatataaagtaacaatctcgcctcagctgctcttggccacccagcgcttcctgtcccgagaagtggatgtattcagcccgctgcgcatctctgagaaggtcctgctgcacctgttgaagcatcccagtgtcaaccaggaagtgaggtttgacgagagcaaccggctggccacacaccactacctgtaccagcgcagccagccggtggattacttcattctcatcctgcagggcagggttgaagtggagatcgggaaagagggtctgaagtttgagaatggggccttcacgtactatggagtgtcggccctaactgtgccatcctcggttcaccagtccccggtgtcctcgctccagcccatccgccatgacctgcagcccgacccaggtgacggcacgcattcatctgcgtattgtcccgactacaccgtgagggcgctctctgatctgcagctcatcaaggttacgcgactgcagtacctcaatgcactcctggctacccgagcccagaacctgccacagtcccctgagaacaccgacctgcaggttattccaggcagccagaccaggctccttggtgagaagaccaccacagcggcagggtccagccacagcaggcccggcgtcccggtggaaggcagccctgggcggaacccaggcgtttaacggctcactaggcagccccagatctggggaacagatgagcacgtggggagctggagtgagctgagcagaagttttgtgcccgcctgcccccatcccctccaggccacgttttagatggcccttgtagttgcgggtcctgggtgtcctcagaactagacatcaatgcctggatccttcagccggccctgccctcctttaggagacaggagtcaccagggcacagccctccaggcccgcctcaggaaggaatgaaaggaatgccatcatctctagttcccagggcccagccttccccttctcccccggggcagggacagtgcggcatattcagattcagacctctttgggctgagccaccttgtgagtgcagttactgcctttgtgtggccgtgacctctatttgtttgcttttaatttgccaacctatcgctgctggcagcactttttgagcaagccgagagcacccattttggctgggggttcagatcgatggccttgtccatgttgtcctttctggcttccctgatggtgtcatgtttcagcgcatgcgccccagcctttcccatgtgccaaaccagaagctccactgcccgtaggctgtccctgtagccctgctccctccctggaggctgctcttctgattctgagagctggcctagtggtgctgagggcccctttctgcttctctgcccacctgctgagttgccactcgcagtgttgtcagttcccgtgttctgagaagaggtcatgcctgggaggaagggatcgtcatgctgcatcgaatcctctctccgccgtgtggcccccaggagagtagctgcctgttgcacctgctccacacctccccacagcctccctgcaggtgctgtgtggccgtgatgtgcagagagcagtgagggagggttcatgaaccaggtggatcctctttaaaaaaaaaaaagtttttgttatatctctagaacatttcaagtcttttcctttttttctgttcctagctatggggttttagagaagtgggaacaggaaggcatttgtctttttcttctagtttactacattttccttccgtagttcttcagctgtgtggaaacgggcatcacaaggacataggatcatagattgggtagggagggaggaggatttctggaacttttctcaaaggaatttggacccttataaatgggactgaaggtcaaaacaacagtgatatccttgcttagaaattgtcctcaaggaataaactctgagagcaagcccgggttggaaacagatgctttaaaatcctctctccagaa

SEQ ID NO: 7179 - DNA, 3308 bp, Homo sapiens
  source 1..3308: mol_type = unassigned DNA
gctgcgcgagaggccgagagggggcagcaggcgatggcggcggcggtagctgcggcgggtcggttaggctggttgttcgccgcgctctgcctgggcaacgccgcgggggaggccgcgccgggcccgcgagtgctgggcttctgcctggaggaggatggagcggcgggcgcgggttgggtacgcggaggggcggcgcgggacacgccggacgccaccttcctcctgcgcctcttcggcccgggcttcgccaacagctcttggtcctgggtggccccggagggggcgggctgccgggaggaggcggcctcccccgcgggcgagtggcgcgcgctgctgcgcttgcgcctgcgggccgaggccgtgcgcccgcactcggcgctgctggcggtgcgcgtggagccgggtggcggggcggctgaggaggcggcgccgccctgggctctgggcctgggggcggccgggctgctggcgctggcagcgctggcgcgaggcctgcagctgagcgcgctggcgctggcgcctgccgaggtgcaggtgctgcgcgagagcggctcggaggcggagcgtgcggcggcgcggcgtttggagcccgcgcggcgctgggccggctgcgccttgggcgcgctgctgctgctggccagcctggcgcaggcggcgctggcggtgctgctgtaccgcgcggccggccagcgtgcggtgcccgccgtgttgggcagcgcggggctcgtgttcctggtgggagaggtggtgccggccgccgtgagcgggcgctggacgctggcgctggcgccgcgagcgctcggcctcagccgcctggccgtcctgctcactctgcccgtcgcgctgcccgtggggcagctgctggagctggcggcgcggcccgggcggctgcgggagcgggtgctggagctggcgcgcggcggcggcgacccctacagcgatctcagcaagggcgtgctgcgctgccggaccgtggaggacgtgctcacgcccctcgaagactgcttcatgctggacgccagcaccgtgctggacttcggcgtcctggccagcatcatgcagagcggccacacgcgcatcccggtgtacgaggaggagcgctccaacatcgtggacatgctctacctcaaggacttggccttcgtggatcccgaagactgcacgccgctcagcaccatcactcgtttctacaaccatccgctccacttcgtcttcaacgacaccaagctggacgctgtcctggaggaattcaagcgaggagacaccgtggtgaagaggaagcctgcttctctgatggcccctctgaagcggaaggaggagttctccttgttcaaggtgtctgatgatgaatataaagtaacaatctcgcctcagctgctcttggccacccagcgcttcctgtcccgagaagtggatgtattcagcccgctgcgcatctctgagaaggtcctgctgcacctgttgaagcatcccagtgtcaaccaggaagtgaggtttgacgagagcaaccggctggccacacaccactacctgtaccagcgcagccagccggtggattacttcattctcatcctgcagggcagggttgaagtggagatcgggaaagagggtctgaagtttgagaatggggccttcacgtactatggagtgtcggccctaactgtgccatcctcggttcaccagtccccggtgtcctcgctccagcccatccgccatgacctgcagcccgacccaggtgacggcacgcattcatctgcgtattgtcccgactacaccgtgagggcgctctctgatctgcagctcatcaaggttacgcgactgcagtacctcaatgcactcctggctacccgagcccagaacctgccacagtcccctgagaacaccgacctgcaggttattccaggcagccagaccaggctccttggtgagaagaccaccacagcggcagggtccagccacagcaggcccggcgtcccggtggaaggcagccctgggcggaacccaggcgtttaacggctcactaggcagccccagatctggggaacagatgagcacgtggggagctggagtgagctgagcagaagttttgtgcccgcctgcccccatcccctccaggccacgttttagatggcccttgtagttgcgggtcctgggtgtcctcagaactagacatcaatgcctggatccttcagccggccctgccctcctttaggagacaggagtcaccagggcacagccctccaggcccgcctcaggaaggaatgaaaggaatgccatcatctctagttcccagggcccagccttccccttctcccccggggcagggacagtgcggcatattcagattcagacctctttgggctgagccaccttgtgagtgcagttactgcctttgtgtggccgtgacctctatttgtttgcttttaatttgccaacctatcgctgctggcagcactttttgagcaagccgagagcacccattttggctgggggttcagatcgatggccttgtccatgttgtcctttctggcttccctgatggtgtcatgtttcagcgcatgcgccccagcctttcccatgtgccaaaccagaagctccactgcccgtaggctgtccctgtagccctgctccctccctggaggctgctcttctgattctgagagctggcctagtggtgctgagggcccctttctgcttctctgcccacctgctgagttgccactcgcagtgttgtcagttcccgtgttctgagaagaggtcatgcctgggaggaagggatcgtcatgctgcatcgaatcctctctccgccgtgtggcccccaggagagtagctgcctgttgcacctgctccacacctccccacagcctccctgcaggtgctgtgtggccgtgatgtgcagagagcagtgagggagggttcatgaaccaggtggatcctctttaaaaaaaaaaaagtttttgttatatctctagaacatttcaagtcttttcctttttttctgttcctagctatggggttttagagaagtgggaacaggaaggcatttgtctttttcttctagtttactacattttccttccgtagttcttcagctgtgtggaaacgggcatcacaaggacataggatcatagattgggtagggagggaggaggatttctggaacttttctcaaaggaatttggacccttataaatgggactgaaggtcaaaacaacagtgatatccttgcttagaaattgtcctcaaggaataaactctgagagcaagcccgggttggaaacagatgctttaaaatcctctctccagaa

SEQ ID NO: 7180 - DNA, 2073 bp, Homo sapiens
  source 1..2073: mol_type = unassigned DNA
gcgcgagaggccgagagggggcagcaggcgatggcggcggcggtagctgcggcgggtcggttaggctggttgttcgccgcgctctgcctgggcaacgccgcgggggaggccgcgccgggcccgcgagtgctgggcttctgcctggaggaggatggagcggcgggcgcgggttgggtacgcggaggggcggcgcgggacacgccggacgccaccttcctcctgcgcctcttcggcccgggcttcgccaacagctcttggtcctgggtggccccggagggggcgggctgccgggaggaggcggcctcccccgcgggcgagtggcgcgcgctgctgcgcttgcgcctgcgggccgaggccgtgcgcccgcactcggcgctgctggcggtgcgcgtggagccgggtggcggggcggctgaggaggcggcgccgccctgggctctgggcctgggggcggccgggctgctggcgctggcagcgctggcgcgaggcctgcagctgagcgcgctggcgctggcgcctgccgaggtgcaggtgctgcgcgagagcggctcggaggcggagcgtgcggcggcgcggcgtttggagcccgcgcggcgctgggccggctgcgccttgggcgcgctgctgctgctggccagcctggcgcaggcggcgctggcggtgctgctgtaccgcgcggccggccagcgtgcggtgcccgccgtgttgggcagcgcggggctcgtgttcctggtgggagaggtggtgccggccgccgtgagcgggcgctggacgctggcgctggcgccgcgagcgctcggcctcagccgcctggccgtcctgctcactctgcccgtcgcgctgcccgtggggcagctgctggagctggcggcgcggcccgggcggctgcgggagcgggtgctggagctggcgcgcggcggcggcgacccctacagcgatctcagcaagggcgtgctgcgctgccggaccgtggaggacgtgctcacgcccctcgaagactgcttcatgctggacgccagcaccgtgctggacttcggcgtcctggccagcatcatgcagagcggccacacgcgcatcccggtgtacgaggaggagcgctccaacatcgtggacatgctctacctcaaggacttggccttcgtggatcccgaagactgcacgccgctcagcaccatcactcgtttctacaaccatccgctccacttcgtcttcaacgacaccaagctggacgctgtcctggaggaattcaagcgaggagacaccgtggtgaagaggaagcctgcttctctgatggcccctctgaagcggaaggaggagttctccttgttcaaggtgtctgatgatgaatataaagtaacaatctcgcctcagctgctcttggccacccagcgcttcctgtcccgagaagtggatgtattcagcccgctgcgcatctctgagaaggtcctgctgcacctgttgaagcatcccagtgtcaaccaggaagtgaggtttgacgagagcaaccggctggccacacaccactacctgtaccagcgcagccagccggtggattacttcattctcatcctgcagggcagggttgaagtggagatcgggaaagagggtctgaagtttgagaatggggccttcacgtactatggagtgtcggccctaactgtgccatcctcggttcaccagtccccggtgtcctcgctccagcccatccgccatgacctgcagcccgacccaggtgacggcacgcattcatctgcgtattgtcccgactacaccgtgagggcgctctctgatctgcagctcatcaaggttacgcgactgcagtacctcaatgcactcctggctacccgagcccagaacctgccacagtcccctgagaacaccgacctgcaggttattccaggcagccagaccaggctccttggtgagaagaccaccacagcggcagggtccagccacagcaggcccagccttccccttctcccccggggcagggacagtgcggcatattcagattcagacctctttgggctgagccaccttgtgagtgcagttactgcctttgtgtggccgtga

SEQ ID NO: 7181 - DNA, 4800 bp, Homo sapiens
  source 1..4800: mol_type = unassigned DNA
agttggctcggcggcagcggagcggccggagctgcggtgcggaccggggccgcgcggcgtggcgcggggagcggcggcggcggcagagccagagcaacatggcgccggtgggcgggggcgggcgcccggtcggcggaccggcccgcgggcgcctcctcctggcggcgccggtgctgctggtgctgctgtgggcgctgggggcccggggccagggcagcccccagcagggcacgatcgtgggcatgaggctggcgagctgcaacaagtcgtgtgggacgaacccggatggcatcatcttcgtgtccgagggcagcaccgtgaacctgaggctgtacggctacagcctgggcaacatctccagcaacctgatctccttcaccgaggtggacgatgccgagaccctccacaagtccaccagctgcctcgagctcaccaaggacctggtcgtccagcagctggtcaacgtgagccgcgggaacacgtccggcgtgctggtggtgctcaccaagttcctccggaggagcgagagcatgaagctgtatgcactgtgcacccgggcccagcccgacgggccctggctgaagtggacggacaaggactcactgctcttcatggtggaggagcctgggaggttcctgcctctctggctgcacattctcctaattacggtgctgctggtgctgtcgggcatattttctggcctcaacctcgggcttatggccctggaccccatggagctgcgcatcgtgcagaactgtggcaccgagaaggagaggcgctatgcccgcaagattgagcccatccggcgcaagggcaactaccttctctgctcgttgctcctagggaacgtgctggtcaacacctccctcacaatccttctagacaacctcatcgggtccggcctcatggcggtggcctcctccaccattggcattgtcatctttggggagatcctacctcaggccctgtgctcccgacatgggctggctgtgggtgccaacaccatccttctcaccaaattctttatgctactcaccttccccctcagttttcccattagcaagctcctggacttttttctgggccaggagattcgcactgtttacaaccgggagaagctgatggagatgttgaaggtgacggagccctataatgacctcgtgaaagaggagctcaatatgatccagggtgccctggaactacggaccaaaactgtagaggatatcatgacccagctccaggactgcttcatgatccgcagcgatgccatcctggacttcaacaccatgtcggagataatggaaagcggctatactcgcatcccggtgttcgaagacgagcagtccaatattgtagatattctctacgtcaaagacttggcctttgtggaccccgatgactgcacccccctcaagactatcactcgcttctataaccacccggtgcactttgtcttccatgacaccaagttggatgccatgctggaggagttcaagaaggggaagtcccacctggccatcgtgcagaaggtaaacaacgagggtgagggtgaccccttctacgaggtcctgggcctggtcaccctggaggacgtgatcgaggagatcatcaagtcggagatcctggacgagtccgacatgtacactgacaaccgaagccggaagcgggtgtctgagaagaacaagcgtgacttctctgccttcaaggatgcggacaatgagctcaaagtgaaaatctccccgcagctcctcctggccgctcatcgcttcctagccacagaggtctctcagtttagcccctccctgatatcagagaagatcctgctgcggctactcaagtacccagatgtcattcaggaactcaagtttgacgagcacaataagtactacgcccgccattacctgtacacccgaaataagccggccgactacttcatcctcatcctgcaggggaaggtggaggtggaggcagggaaggagaacatgaagtttgagacgggcgccttctcctactatgggactatggccctgacctcggtcccctccgaccgttccccagcacaccccaccccactcagccgctcagcctccctcagttacccagaccgcacagacgtctcaactgcagcaaccttggcaggcagcagcaaccagtttggcagctctgtcctgggccagtacatctctgacttcagcgtccgggcactcgtggacttgcagtacatcaagatcactcggcagcagtaccagaacgggctgctggcttctcgcatggagaacagccctcagtttcccatagacgggtgcaccacccacatggagaacttggccgagaagtctgagctgcctgtggtggacgagaccacaactcttctcaacgagcgtaactccttgctgcacaaagcctcccacgagaatgccatctgacaggagggcccggggccccctgcccaccctgcgggggcctccccagtgggcccacatgaagagagggaacctgttagtccagaaaggatacggatagatagcctgtctgactgaacagccagatggcccccagcctatgggggatctggcctctgccagggacctctgagtagctctgaggtggcactgtccagccctggatagggggggcagtgggccagctaccgtaagcaaaggctgttttttactgagagaatttctaaagtaggctcatcacttttttttaaatatcattttgggaagggaagacagggttaaggaactttatttaaaaaaaaaatatttttttcctaaaaactataaaagaggaagggtttcttgtcccgggaagcaacggacataatctgttcccagccatggccttccagcttgtgtccctgattcagggagctctcccttcctcctcctcctcctcctccggaggtgggatcccagagcctgccagtggaggcttatctgttgggaggaagacagctcttcacagaagcaaagaacaaaatggcatggagatcagctgcctgagcacctgcgctgtagcttatctgacaacgctgaggccacgagctcctgggtagctgtgatcagggacatgataatctgagctatgcagaggagcacatctgttgtcaactgctgtacccagaaatctagaactctgccgacagcctctcctggtgagtcgggactcagctgaggacacatccccaccctgcctcccatctggccctttggacaactggccctttgtgacagggctgactcaagtgttaggcagggtctcaggcctttgattgctcacccctgctccccaggccctgccctcacttttaccaaaggttctccctcggcgggagggcatctgtgttggaggtgatttgtctgggttcttccttttggttccagaaggaactgtcagtcatcagcatctgcgttgttagcagtcagtaccacccccgccccacaatgacagtcaaggctgacttgttgactgaagcctttttcccagaccccttatttcgaatccccaagcttcagtccctcttgggggtggagacaagaggacatgtgggaagccacggaagcaggttctttatgtcctctcctctgtggctggcaaggctcacctggccttatccacccacttatggaacctcaggagaggagggctcctcctaaaggcatgcagcttgcagcccctctttctcacacgtgtgatcctagcgtgagaggtcatcctgcccttgctgaagttagtagtactgtactaagagctctgccctcatgtgaattcctgccctggcgcctcttccctggggctgaatcaggccctgctgcaaaactccaggcttcccagggttggggaggctgtgggaccaaggtccatgttggtccttccactgggtgcagcaggagctgggtcccgagagcctggcaggtgaaactctgcaggccttccgcctgattattatttattcactcctttcctcaccccaagtgccctgctctccaggtgcctagagtatcctaactcttaggaccagggattgtcttgcaccaagtatgcctacccctggccagtctgaggtctcctagccatagaactgactcctggaagcctggagagaaggtggtgacacccatgggttctcaactgtaaggaaaaaagacaccagacttttgttccctagtgggggaaagcccttagtcttgtacaggagcagcttgctcccaagtccttttggaagctggcagagctatattcctgacagccctgactgccaggtagagcaaaagacattggtgggggtatgtgaagcaaaaggggcaggtgcacacacctccacagtgacctctgtgcacacggttaccaccaactggctggccctcctcctcttccctggcccattgatcatcccttctcacagagggtcatcattatttccaaatattgtttgtctgatgacttcctcttcccagtgcaatttttcccttcctatttcaacctctggttcctgggatgagccataccctggaactggcccacccactgtgtcttccacgtaagggagacctttgcaaagggcatccaaatgggtaggcaggtgacagccgccgtatttattttgcataatattttaatttgtatatttttgtgatttattttggcgttatgagtttgactctcggggagttttgttgttatgactcttgtgtcttttgtcacaaaacaatgatatttgctaaacgatatatggaatttatttttgattggtaataaaaaatcaaatatgtataaatcctggtgaatctacaa

SEQ ID NO: 7182 - DNA, 1591 bp, Homo sapiens
  source 1..1591: mol_type = unassigned DNA
agcttaatcctgcgggagcttgggtgaagggaggaaagagcagagaatcgccaagaaatcagggtgctcagctatctgcaggtgtggacccagggcccaagcctgtggcttccagtcagtccagcccgcacctctcccatgggagggcctgagagcgcgggaacatcctgggcccctgggatctcagaggctggaccttcctgggagactcattgagtaagatgcagaggactccttcttgggtggtgggagtccctggtctgctctggggcccctggcttttccccatgagaaaaagcagctggagctgggaagtcccacctggccatcgtgcagaaggtaaacaacgagggtgagggtgaccccttctacgaggtcctgggcctggtcaccctggaggacgtgatcgaggagatcatcaagtcggagatcctggacgagtccgacatgtacactgacaaccgaagccggaagcgggtgtctgagaagaacaagcgtgacttctctgccttcaaggatgcggacaatgagctcaaagtgaaaatctccccgcagctcctcctggccgctcatcgcttcctagccacagaggtctctcagtttagcccctccctgatatcagagaagatcctgctgcggctactcaagtacccagatgtcattcaggaactcaagtttgacgagcacaataagtactacgcccgccattacctgtacacccgaaataagccggccgactacttcatcctcatcctgcaggggaaggtggaggtggaggcagggaaggagaacatgaagtttgagacgggcgccttctcctactatgggactatggccctgacctcggtcccctccgaccgttccccagcacaccccaccccactcagccgctcagcctccctcagttacccagaccgcacagacgtctcaactgcagcaaccttggcaggcagcagcaaccagtttggcagctctgtcctgggccagtacatctctgacttcagcgtccgggcactcgtggacttgcagtacatcaagcctcaatcctggccctgtttctccaggcctggtgatagggtctgcctcccagcccctccctccatgaactcatcccttcctcatgcagatcactcggcagcagtaccagaacgggctgctggcttctcgcatggagaacagccctcagtttcccatagacgggtgcaccacccacatggagaacttggccgagaagtctgagctgcctgtggtggacgagaccacaactcttctcaacgagcgtaactccttgctgcacaaagcctcccacgagaatgccatctgacaggagggcccggggccccctgcccaccctgcgggggcctccccagtgggcccacatgaagagagggaacctgttagtccagaaaggatacggatagatagcctgtctgactgaacagccagatggcccccagcctatgggggatctggcctctgccagggacctctgagtagctctgaggtggcactgtccagccctggatagggggggcagtgggccagctaccgtaagcaaaggctgttttttactgagagaatttctaaagta

SEQ ID NO: 7183 - DNA, 6917 bp, Homo sapiens
  source 1..6917: mol_type = unassigned DNA
aatgaaggagcgggcggaggaggaagtgtcatggcgtcgggccgtggagcttcttctcgctggttctttactcgggaacagctggagaacacgccgagccgccgctgcggagtggaggcggataaagagctctcgtgccgccagcaggcggccaacctcatccaggagatgggacagcgtctcaatgtctctcagcttacaataaacactgcgattgtttatatgcacaggttttatatgcaccattctttcaccaaattcaacaaaaatataatatcgtctactgcattatttttggctgcaaaagtggaagaacaggctcgaaaacttgaacatgttatcaaagtagcacatgcttgtcttcatcctctagagccactgctggatactaaatgtgatgcttaccttcaacagactcaagaactggttatacttgaaaccataatgctacaaactctaggttttgagatcaccattgaacacccacacacagatgtggtgaaatgtacccagttagtaagagcaagcaaggatttggcacagacatcctatttcatggctaccaacagtctgcatcttacaaccttctgtcttcagtacaaaccaacagtgatagcatgtgtatgcattcatttggcttgcaaatggtccaattgggagatccctgtatcaactgatggaaagcattggtgggaatatgtggatcctacagttactctagaattattagatgagctaacacatgagtttctacaaatattggagaaaacgcctaataggttgaagaagattcgaaactggagggctaatcaggcagctaggaaaccaaaagtagatggacaggtatcagagacaccacttcttggttcatctttggtccagaattccattttagtagatagtgtcactggtgtgcctacaaacccaagttttcagaaaccatctacatcagcattccctgcgccagtacctctaaattcaggaaatatttctgttcaagacagccatacatctgataatttgtcaatgctagcaacaggaatgccaagtacttcatacggtttatcatcacaccaggaatggcctcaacatcaagactcagcaaggacagaacagctatattcacagaaacaggagacatctttgtctggtagccagtacaacatcaacttccagcagggaccttctatatcactgcattcaggattacatcacagacctgacaaaatttcagatcattcttctgttaagcaagaatatactcataaagcagggagcagtaaacaccatgggccaatttccactactccaggaataattcctcagaaaatgtctttagataaatatagagaaaagcgtaaactagaaactcttgatctcgatgtaagggatcattatatagctgcccaggtagaacagcagcacaaacaagggcagtcacaggcagccagcagcagttctgttacttctcccattaaaatgaaaatacctatcgcaaatactgaaaaatacatggcagacaaaaaggaaaagagtgggtcactgaaattacggattccaataccacccactgataaaagcgccagtaaagaagaactgaaaatgaaaataaaagtttcttcttcagaaagacacagctcttctgatgaaggcagtgggaagagcaaacattcaagcccacatattagcagagaccataaggagaagcacaaggagcatccttcaagccgccaccacaccagcagccacaagcattcccactcgcatagtggcagcagcagcggtggcagtaaacacagtgccgacggaataccacccactgttctgaggagtcctgttggcctgagcagtgatggcatttcctctagctccagctcttcaaggaagaggctgcatgtcaatgatgcatctcacaaccaccactccaaaatgagcaaaagttccaaaagttcaggtagttcatctagttcttcctcctctgttaagcagtatatatcctctcacaactctgtttttaaccatcccttaccccctcctccccctgtcacataccaggtgggctacggacatctcagcaccctcgtgaaactggacaagaagccagtggagaccaacggtcctgatgccaatcacgagtacagtacaagcagccagcatatggactacaaagacacattcgacatgctggactcactgttaagtgcccaaggaatgaacatgtaataatttgtttaggtcaatttttcctttacttttttaatttaaaaattgttagaatggaaaaattccttctgatctagcagtggtaacccctgctgttgctgccactgcttcaatatttgtaagtgctgctttattcttcattctgaaaagaagagattatagtaaacaagtctttatctccacatatgatagtgttataaatactgtaaaagcatggaaggtgcaaaactcagtatttctacaattgcagctaagaacattaggatgaatggctggctgcttctaggaatataagatgcctcaagcattcattatttatgatttgaatactgtagctattttttgttgcttggcttttgaatgagtgtaaattgttttcttttgtgtatttatacttgtatgtatgatttgcatgtttcaatgataaagggataaaacagtatactgacaactgtttacaagaaagtggagaaaaatgtacatacatttttgtatgtttagatattaccgtaaatactcaggattggagctgcttgtaagtataacaatatacagaataactttattttatcttgtcagagtccatcactaatctaaaacaaaggtggcacttttttatgttaaccttaaactctaggccttactggaagccactgataggggacacttcactaccagatgtgtgcagtgcaacagatggtcatatacactgtgaggcactgaaattttgccttcagaggttctgaccagattggctgctgaaatagcccctaactttctgaaggcttgaagaggaaaaaataaagtttacatactcttgatgtgaagtgcatttaaatgtttgttggcttgttgcagttctatgaaacagagctgttaataatggttatgtggattactgtgatttgaaaactaaattcacaataacttacctagtagagatttagtgagttgtttcctttaaagaattttacactacatattttaatagtaaacagggatcacttttcctttagcattcagaatgacaccatattcttaaatatactccttccctgaagcgtgtttgtgtgtgatgccatatttctttttcaggtaaatgtagtcttccttataaaaatgaaattaaacctatgctctcaattcttttatattctaacaataaataaaaaagaaaagattactgactgtgcattgtacctgtatttatagtttatggttatcaggaagctctgtaagaaagaaaaggtcagcctcccaggcaaaccagtagtggaggttttacatttgtttgcacatctcagtatatttctgttgaggtaaagtttgcacagtcatctgacttctgatcaagcattagattttaacttgtttagattttgtcttaaacaccagtaatatggctcttgtttatcagctaatcttgaatttattctgtggtaaatcttttgagttgttgagtatatttgagattgattggattcgacctcttgttgaactgaaaacttaattttttctctgtatttttgttacaaagccactgatacgtgcacaattgtaattaagtatgttgcagttgtaaatattagagtttaatctcatgctctacctttatttagcaattacctaatttgccagtagctttataatttttaaagataattgttcattattttgtcaatgttatttgaacttggggtacttaggagcctctttgtagggactgtgcctaggtagcatgtcctaacatttgttctggtcttgcataacttcagtaatctttgtcattatatgtaactttgttgctctgtatggcataatattgtatccataaacatggtaattttgatacagttatacttttacagtggtacataatccaaggactagtatagaattaagctgagtgcaagatgagggagggaagggctttcttggtaatttagatgtgaaacctctacagagctatcatgtaaaaactacataaggtggttgtgctactgtataattgggggtgataataccaggaattttaataagattttgtaaagaatatccagaaaagtagtgaacttattttcagtagacatagaaaacaatgtgaatatttaaggtctgtgactatagttaaacttcactaagaatttgcagaattgttttgagatgtgtgaataaaggtaattttattgaatcttcattggtgctaatgatggacagttaaaaagatagctagtgtatattgttatgggtcagtacttattagtacttccaaaattgaatttgaaatgctatgtattcacttttcactctgtaaatgtaattctttacaatgactttatttattaaagggcagccagttgtcatttttacaggattgtgtgagctattcaaactcttcaacccctgaacagggtattaagcttccaaaataatgatggggataaatatggaaatcctttttaagttgtatttccattaaacaaaaacccttataattcatactatcatgaatttgctttatccatctcatttgcataacagttcatctgtctggtcccattaggctctaccaaagaaagactctgatgagtggacattattactgtgactcttgtaagtagccataaataaaccaaaatagtatcaaatttaggtatgaaattccacatgtgcaaagtactgttaaggtgataacatttttgatgagatttaaaaaaatatttgaaatattaaaaagcattatctttaaacatcctataaaagagtgagtcatttttaagttgtgttttccctagatcactgatttgttacctttacacagaagcacattgcaaagaaaggctttatttctacctcttccattcagttttccaatattgagctgtgtccctctgaatatttgccttagctatttcaaaataggtattttcagaaccaaagcaaagggtggtttgttcactgaaacattcttagaggcctacttaacgggcggcagtatccggtagtggtaaaacctcacagtttcctaattgcaggtatgtaaataccaaaaaagtcctgttgtcagccctaggtttatctttgaaagcagttaaatgtgcaccttggtcttcctccgtgtgttcagattccttctggttaaagttcttattcagagtcatctaaaagaaatttctaacatgatgtatggtttcttgaatgtcatgagtggctgcgtatattgctttgtagcaacagattgtattaataattaatagaatacctaatttttttggcctatcctctttgaactagaaatgactacttgagggctatttcagagaaccaatatgaaatgtttttgttagtacaaaataccattgccttaaaaggtttcaagcacattttcttttctatttgagaacttaaattgctgacttgtattcgttaagcaaccttagaaataaaccactgcttatatctgcatgaatattatgcatttcatgagtacagttagttgattagatatttcagggttttgcattttctatagacatggggacttttttaacatggtaacgtcttaggaaaaccattctctcaaggtattacaccatttccaattttatccaaatgaaaagcatatctgcttaaatttaggatgtctttgctgagaatatttggaggctcttgttaggaagaatcatggattcagtatttctaacctgattactgcctcagaggctgtcttgaagggagacagtaggattcactgactacctttacccagatgagggatcaacaaatctcacacttaaactaaatgagttgacaggacaataggtgctaatctcatgtgccctaagatggacttatttagatagggatttttgcattggaaaagcagcacattctctgaccttgggtaccaagctatgatactaatttgagaatcacattctgatacgttaatatcagaaatcagtgagcaacctaattgctgtaagctgacatacatggaagccgaaatcaaaaggttgcttttgttagtttccctggagcatctatttttgtaatacattttgccagtgggactgaaaagctcaaaatgttttagacctaatatcatacattaattttctgctctgcagtgtcaatttgggcacagccagtttttacctctgtggcaccttctttataatttactgttacctattctgcctgacagattgattaagtaggttgataagatccatcgaagattgaatggctaggagtaattctgttctcgtataggcaacttaacttcactgtggaatccatttatctcaaagtttgagggctgtctactttattttcaagtttggggcggaaactcaaaatcccgagcattgccactttagtagtttgtttgatttgcctattgtttaataatgagtacattcttattaagtgatgagtacattcttaattttaaggtatgtttttttcaagcagcttcattttattaggaaaaatacatactcatttgttgtaaacagtgattgtggggtttcattttctgaatgtactcaaaactcccaacaacaattgaacaggatgtttgctaatagaaaatctaaaacaggaatatgtgtatatggcatgaattagtcattgactttaagcttcttatccatacaaggaactaataaaatgtttattgacaacataaa

SEQ ID NO: 7184 - DNA, 4491 bp, Homo sapiens
  source 1..4491: mol_type = unassigned DNA
aatgaaggagcgggcggaggaggaagtgtcatggcgtcgggccgtggagcttcttctcgctggttctttactcgggaacagctggagaacacgccgagccgccgctgcggagtggaggcggataaagagctctcgtgccgccagcaggcggccaacctcatccaggagatgggacagcgtctcaatgtctctcagcttacaataaacactgcgattgtttatatgcacaggttttatatgcaccattctttcaccaaattcaacaaaaatataatatcgtctactgcattatttttggctgcaaaagtggaagaacaggctcgaaaacttgaacatgttatcaaagtagcacatgcttgtcttcatcctctagagccactgctggatactaaatgtgatgcttaccttcaacagactcaagaactggttatacttgaaaccataatgctacaaactctaggttttgagatcaccattgaacacccacacacagatgtggtgaaatgtacccagttagtaagagcaagcaaggatttggcacagacatcctatttcatggctaccaacagtctgcatcttacaaccttctgtcttcagtacaaaccaacagtgatagcatgtgtatgcattcatttggcttgcaaatggtccaattgggagatccctgtatcaactgatggaaagcattggtgggaatatgtggatcctacagttactctagaattattagatgagctaacacatgagtttctacaaatattggagaaaacgcctaataggttgaagaagattcgaaactggagggctaatcaggcagctaggaaaccaaaagtagatggacaggtatcagagacaccacttcttggttcatctttggtccagaattccattttagtagatagtgtcactggtgtgcctacaaacccaagttttcagaaaccatctacatcagcattccctgcgccagtacctctaaattcaggaaatatttctgttcaagacagccatacatctgataatttgtcaatgctagcaacaggaatgccaagtacttcatacggtttatcatcacaccaggaatggcctcaacatcaagactcagcaaggacagaacagctatattcacagaaacaggagacatctttgtctggtagccagtacaacatcaacttccagcagggaccttctatatcactgcattcaggattacatcacagacctgacaaaatttcagatcattcttctgttaagcaagaatatactcataaagcagggagcagtaaacaccatgggccaatttccactactccaggaataattcctcagaaaatgtctttagataaatatagagaaaagcgtaaactagaaactcttgatctcgatgtaagggatcattatatagctgcccaggtagaacagcagcacaaacaagggcagtcacaggcagccagcagcagttctgttacttctcccattaaaatgaaaatacctatcgcaaatactgaaaaatacatggcagacaaaaaggaaaagagtgggtcactgaaattacggattccaataccacccactgataaaagcgccagtaaagaagaactgaaaatgaaaataaaagtttcttcttcagaaagacacagctcttctgatgaaggcagtgggaagagcaaacattcaagcccacatattagcagagaccataaggagaagcacaaggagcatccttcaagccgccaccacaccagcagccacaagcattcccactcgcatagtggcagcagcagcggtggcagtaaacacagtgccgacggaataccacccactgttctgaggagtcctgttggcctgagcagtgatggcatttcctctagctccagctcttcaaggaagaggctgcatgtcaatgatgcatctcacaaccaccactccaaaatgagcaaaagttccaaaagttcaggtgggctacggacatctcagcaccctcgtgaaactggacaagaagccagtggagaccaacggtcctgatgccaatcacgagtacagtacaagcagccagcatatggactacaaagacacattcgacatgctggactcactgttaagtgcccaaggaatgaacatgtaataatttgtttaggtcaatttttcctttacttttttaatttaaaaattgttagaatggaaaaattccttctgatctagcagtggtaacccctgctgttgctgccactgcttcaatatttgtaagtgctgctttattcttcattctgaaaagaagagattatagtaaacaagtctttatctccacatatgatagtgttataaatactgtaaaagcatggaaggtgcaaaactcagtatttctacaattgcagctaagaacattaggatgaatggctggctgcttctaggaatataagatgcctcaagcattcattatttatgatttgaatactgtagctattttttgttgcttggcttttgaatgagtgtaaattgttttcttttgtgtatttatacttgtatgtatgatttgcatgtttcaatgataaagggataaaacagtatactgacaactgtttacaagaaagtggagaaaaatgtacatacatttttgtatgtttagatattaccgtaaatactcaggattggagctgcttgtaagtataacaatatacagaataactttattttatcttgtcagagtccatcactaatctaaaacaaaggtggcacttttttatgttaaccttaaactctaggccttactggaagccactgataggggacacttcactaccagatgtgtgcagtgcaacagatggtcatatacactgtgaggcactgaaattttgccttcagaggttctgaccagattggctgctgaaatagcccctaactttctgaaggcttgaagaggaaaaaataaagtttacatactcttgatgtgaagtgcatttaaatgtttgttggcttgttgcagttctatgaaacagagctgttaataatggttatgtggattactgtgatttgaaaactaaattcacaataacttacctagtagagatttagtgagttgtttcctttaaagaattttacactacatattttaatagtaaacagggatcacttttcctttagcattcagaatgacaccatattcttaaatatactccttccctgaagcgtgtttgtgtgtgatgccatatttctttttcaggtaaatgtagtcttccttataaaaatgaaattaaacctatgctctcaattcttttatattctaacaataaataaaaaagaaaagattactgactgtgcattgtacctgtatttatagtttatggttatcaggaagctctgtaagaaagaaaaggtcagcctcccaggcaaaccagtagtggaggttttacatttgtttgcacatctcagtatatttctgttgaggtaaagtttgcacagtcatctgacttctgatcaagcattagattttaacttgtttagattttgtcttaaacaccagtaatatggctcttgtttatcagctaatcttgaatttattctgtggtaaatcttttgagttgttgagtatatttgagattgattggattcgacctcttgttgaactgaaaacttaattttttctctgtatttttgttacaaagccactgatacgtgcacaattgtaattaagtatgttgcagttgtaaatattagagtttaatctcatgctctacctttatttagcaattacctaatttgccagtagctttataatttttaaagataattgttcattattttgtcaatgttatttgaacttggggtacttaggagcctctttgtagggactgtgcctaggtagcatgtcctaacatttgttctggtcttgcataacttcagtaatctttgtcattatatgtaactttgttgctctgtatggcataatattgtatccataaacatggtaattttgatacagttatacttttacagtggtacataatccaaggactagtatagaattaagctgagtgcaagatgagggagggaagggctttcttggtaatttagatgtgaaacctctacagagctatcatgtaaaaactacataaggtggttgtgctactgtataattgggggtgataataccaggaattttaataagattttgtaaagaatatccagaaaagtagtgaacttattttcagtagacatagaaaacaatgtgaatatttaaggtctgtgactatagttaaacttcactaagaatttgcagaattgttttgagatgtgtgaataaaggtaattttattgaatcttcattggtgctaatgatggacagttaaaaagatagctagtgtatattgttatgggtcagtacttattagtacttccaaaattgaatttgaaatgctatgtattcacttttcactctgtaaatgtaattctttacaatgactttatttattaaagggcagccagttgtcattttta

SEQ ID NO: 7185 - DNA, 2363 bp, Homo sapiens
  source 1..2363: mol_type = unassigned DNA
gtgaatgaaggagcgggcggaggaggaagtgtcatggcgtcgggccgtggagcttcttctcgctggttctttactcgggaacagctggagaacacgccgagccgccgctgcggagtggaggcggataaagagctctcgtgccgccagcaggcggccaacctcatccaggagatgggacagcgtctcaatgtctctcagcttacaataaacactgcgattgtttatatgcacaggttttatatgcaccattctttcaccaaattcaacaaaaatataatatcgtctactgcattatttttggctgcaaaagtggaagaacaggctcgaaaacttgaacatgttatcaaagtagcacatgcttgtcttcatcctctagagccactgctggatactaaatgtgatgcttaccttcaacagactcaagaactggttatacttgaaaccataatgctacaaactctaggttttgagatcaccattgaacacccacacacagatgtggtgaaatgtacccagttagtaagagatctttgggggatagcaagaaacatttgagtgaatgttgttgaagattttcagtagtatagaaaatgatggcgctcttgtgatatttcaagcaaggatttggcacagacatcctatttcatggctaccaacagtctgcatcttacaaccttctgtcttcagtacaaaccaacagtgatagcatgtgtatgcattcatttggcttgcaaatggtccaattgggagatccctgtatcaactgatggaaagcattggtgggaatatgtggatcctacagttactctagaattattagatgagctaacacatgagtttctacaaatattggagaaaacgcctaataggttgaagaagattcgaaactggagggctaatcaggcagctaggaaaccaaaagtagatggacaggtatcagagacaccacttcttggttcatctttggtccagaattccattttagtagatagtgtcactggtgtgcctacaaacccaagttttcagaaaccatctacatcagcattccctgcgccagtacctctaaattcaggaaatatttctgttcaagacagccatacatctgataatttgtcaatgctagcaacaggaatgccaagtacttcatacggtttatcatcacaccaggaatggcctcaacatcaagactcagcaaggacagaacagctatattcacagaaacaggagacatctttgtctggtagccagtacaacatcaacttccagcagggaccttctatatcactgcattcaggattacatcacagacctgacaaaatttcagatcattcttctgttaagcaagaatatactcataaagcagggagcagtaaacaccatgggccaatttccactactccaggaataattcctcagaaaatgtctttagataaatatagagaaaagcgtaaactagaaactcttgatctcgatgtaagggatcattatatagctgcccaggtagaacagcagcacaaacaagggcagtcacaggcagccagcagcagttctgttacttctcccattaaaatgaaaatacctatcgcaaatactgaaaaatacatggcagacaaaaaggaaaagagtgggtcactgaaattacggattccaataccacccactgataaaagcgccagtaaagaagaactgaaaatgaaaataaaagtttcttcttcagaaagacacagctcttctgatgaaggcagtgggaagagcaaacattcaagcccacatattagcagagaccataaggagaagcacaaggagcatccttcaagccgccaccacaccagcagccacaagcattcccactcgcatagtggcagcagcagcggtggcagtaaacacagtgccgacggaataccacccactgttctgaggagtcctgttggcctgagcagtgatggcatttcctctagctccagctcttcaaggaagaggctgcatgtcaatgatgcatctcacaaccaccactccaaaatgagcaaaagttccaaaagttcaggtgggctacggacatctcagcaccctcgtgaaactggacaagaagccagtggagaccaacggtcctgatgccaatcacgagtacagtacaagcagccagcatatggactacaaagacacattcgacatgctggactcactgttaagtgcccaaggaatgaacatgtaataatttgtttaggtcaatttttcctttacttttttaatttaaaaattgttagaatggaaaaattccttctgatctagcagtggtaacccctgctgttgctgccactgcttcaatatttgtaagtgctgctttattcttcattctgaaaaga

SEQ ID NO: 7186 - DNA, 3948 bp, Homo sapiens
  source 1..3948: mol_type = unassigned DNA
aggccccgccgccgccgccgctgctgacccggcggccggccgccgttccgccccctcccgtggcggcgagcgggcgggcctccccacacgcccccgccgcccgcgccccgcgtccacccgcgccccgctcccggggactgggagaacaggatagcagcaggagtcggggggccgccgaagatggggaacactacctcgtgctgcgtgtcgtccagtcccaagctccggaggaatgcccactcccggctggagtcctaccggccagacacggacctgagccgcgaggacacgggctgcaacctgcagcacatcagcgaccgggagaacatagacgatttgaacatggaattcaatccttcagatcatcctcgggccagcacaatattcctcagtaaatctcagacggacgtgagagaaaaacgcaagagtctcttcattaaccatcatcctccaggacaaatagcaaggaaatacagttcctgctccaccattttcctagatgatagcacagtcagtcaaccaaacctcaagtatacaattaaatgtgtcgctcttgcaatatattatcacatcaaaaacagggacccagatggaaggatgctcttagatatttttgatgaaaatcttcaccctctttcgaaatccgaagtgccaccagattatgacaaacacaacccagagcagaagcagatttaccggttcgttcggacactgttcagtgctgctcagctgacggctgaatgtgccatcgtcaccctggtgtaccttgaaagacttttaacatacgcagagatagatatctgtccggccaactggaagcggattgttttaggggcgatcctgctggcctccaaggtgtgggatgaccaggctgtatggaatgtggattactgccagatcctgaaagacatcacggtggaggacatgaacgagctagagcgacagtttcttgaattgctgcagttcaacatcaatgttccttccagtgtctatgccaagtattattttgatcttcgttctctggcagaagcgaacaacctgagctttcccttggagcccctgagcagggagagggctcacaagcttgaggccatctctcgcctctgcgaggacaagtacaaggacctaagaagatccgcgaggaagcgctcagccagtgcagacaacctgactctgccccggtggtccccagccatcatctcttaactacggaggcccgccggaggccacaccatcccttagtttctcctttagtttgagaaaagacagacttggggtgggtttgtttttgttttttctttccttttctttttttacgcatagctccgtcaagctgcctggatgagcgcccatgcagcaaggcttggaggaagcgtcagtgccctggagatcccagctcgctctccccactgtcagcaacagcacttccttcgtggaggaagtggactcgaatcctggaggaggaaataaagggaaagggaagtcgtggagaggcagggaaaatggttaagcagcccggccctctggagtccccatgggggcggtagctgaagttggcgagcgcagcggtggatgcagagctggctgcacccagggctgggccagtgtgtcctgtaagacttcttgcattccttctgctgcttttttgggatgggggtatttttgttcatttgtttttgccctgttttgattttggtcccacagagcaggggatgtagtttgtacccaccatggcgcagacttccaaataaatagtactggtcatttctctctgcactatttctgcgcgctgtcttctgagctttcttcctcaccagtgggctgtgcttgttccatttctgtacacccttattttataccgtttttcttcaacaatggcgaaattgactgtagtgctgaaccaaaagtatccctttccctccttattcctcaccccaagaacattctagatcacatgggtgcttgtgccttccgattttcttgcatttgtttttttcctgacctgaagttgttgttacaaaatcagtcagactttgtgggctgaaggacacggtgcagcagagggtgtccctgtgagagttctgcagagtgctgggcatgtgcctggaactaccgagtaggagccatttctttgtacccctgcctaatccattcctctccttccaagtccattgttgcaagcaatattcttctcaatttttatatgtttactttaaatcaaagttagtctatttgtataaaatttttaaaaaatctaaaagaaaaagaaaaaaaacaagggtgggttgggtattccagtgggaagatcattgaagggaaaaatgttactatttactgaggtatttttcacagaatgattgaattaaaaaaaactcaacttgcattttcattgtgggtgcttagagaagttctacaaaattcaaactgtgaaggtttatgcttcattaattatgaccatactttttcattttctgacgatccctgatttccttatggactcaataagaatcttttatatcaagtaaaatgaaagttgatgatagaatatcaaatagtgaatttgatatgaaatctaagagtgtgagtcacttgcatatgtaatgctttgggtttttgcatattttcttaggtcacagtgacaggtttctgagttgtttcccttttcaagtctctgggaggccagtggcagcagcaggtctgtgtttcaccttcttcccatgtgagcttggaaaactttggcatcttaattagtcttgaatcatacacctgatccccaaacattgcctgctctcaatgaaacatgctttggaaatggaagggactcagaaagtcgaaatcccaagaactccaagccaaaagtgttaggttttagtgaaatttgtgtcaggtataagcatacctgtttgggccagaattattatcacagcctttctgacccaaactttcaaaagcaaataaacagcatataaaacgttaattatctttccattgtaattgtgatgatctactctgtatgggtaccaaaatcaccttctctcttcaagtcaaagttgaatttagaactttgaatacaggtcaaaaaatgtagaaaatatcattttatattccctaatctatatagctgaaaaagggttgtattttcttagctgaatatgaatacctcttaaacataaattagttcctctccagtgaagtatcttattttaccaatccatttcaggaaagaggttctgctgccgtaaaggcagaaattttatttttatcccttttatttgaatgagagatttgaaaatcgaattatgtaaatatttcaatgcatctgctattattttgtggagtttattaaactactttaaaaaaattgtatagtctatttattgtatgtatgtacatacagtctgatacctaaaatttaaagtggattccataaaaccagactcaagtcttgtttagactactgaatactgttttagcctgtgccctggattctacctctgtataggaaaattttccatattcattaattagtgttgatctgtattaattggttatgtttcttgcactaaggatgtttaaaactccgctgtaagtgtagattttagttttactggcaggatgaatcacttgacacataggtagatacttgaggttcattttcttttctttttctacatgatgatgaatagttatgttttcttctctgatttgttcaaagtttgccaaaagaaaacacaaaaccagtacagtacttactgataaatcgtagtgactgtaatttgtttgtaaggcgaattaatgctctacaattaaagctggattactattgaggaacacattgtcttagtgtagtttttgaatggaaagtttttgtcattaaggatgaaggaaacgacacaatttgttactttaattttatatttgatttaaacaacaaataaagtcattggg

SEQ ID NO: 7187 - DNA, 3873 bp, Homo sapiens
  source 1..3873: mol_type = unassigned DNA
aggccccgccgccgccgccgctgctgacccggcggccggccgccgttccgccccctcccgtggcggcgagcgggcgggcctccccacacgcccccgccgcccgcgccccgcgtccacccgcgccccgctcccggggactgggagaacaggatagcagcaggagtcggggggccgccgaagatggggaacactacctcgtgctgcgtgtcgtccagtcccaagctccggaggaatgcccactcccggctggagtcctaccggccagacacggacctgagccgcgaggacacgggctgcaacctgcagcacatcagcgaccgggagaacatagacgtgagagaaaaacgcaagagtctcttcattaaccatcatcctccaggacaaatagcaaggaaatacagttcctgctccaccattttcctagatgatagcacagtcagtcaaccaaacctcaagtatacaattaaatgtgtcgctcttgcaatatattatcacatcaaaaacagggacccagatggaaggatgctcttagatatttttgatgaaaatcttcaccctctttcgaaatccgaagtgccaccagattatgacaaacacaacccagagcagaagcagatttaccggttcgttcggacactgttcagtgctgctcagctgacggctgaatgtgccatcgtcaccctggtgtaccttgaaagacttttaacatacgcagagatagatatctgtccggccaactggaagcggattgttttaggggcgatcctgctggcctccaaggtgtgggatgaccaggctgtatggaatgtggattactgccagatcctgaaagacatcacggtggaggacatgaacgagctagagcgacagtttcttgaattgctgcagttcaacatcaatgttccttccagtgtctatgccaagtattattttgatcttcgttctctggcagaagcgaacaacctgagctttcccttggagcccctgagcagggagagggctcacaagcttgaggccatctctcgcctctgcgaggacaagtacaaggacctaagaagatccgcgaggaagcgctcagccagtgcagacaacctgactctgccccggtggtccccagccatcatctcttaactacggaggcccgccggaggccacaccatcccttagtttctcctttagtttgagaaaagacagacttggggtgggtttgtttttgttttttctttccttttctttttttacgcatagctccgtcaagctgcctggatgagcgcccatgcagcaaggcttggaggaagcgtcagtgccctggagatcccagctcgctctccccactgtcagcaacagcacttccttcgtggaggaagtggactcgaatcctggaggaggaaataaagggaaagggaagtcgtggagaggcagggaaaatggttaagcagcccggccctctggagtccccatgggggcggtagctgaagttggcgagcgcagcggtggatgcagagctggctgcacccagggctgggccagtgtgtcctgtaagacttcttgcattccttctgctgcttttttgggatgggggtatttttgttcatttgtttttgccctgttttgattttggtcccacagagcaggggatgtagtttgtacccaccatggcgcagacttccaaataaatagtactggtcatttctctctgcactatttctgcgcgctgtcttctgagctttcttcctcaccagtgggctgtgcttgttccatttctgtacacccttattttataccgtttttcttcaacaatggcgaaattgactgtagtgctgaaccaaaagtatccctttccctccttattcctcaccccaagaacattctagatcacatgggtgcttgtgccttccgattttcttgcatttgtttttttcctgacctgaagttgttgttacaaaatcagtcagactttgtgggctgaaggacacggtgcagcagagggtgtccctgtgagagttctgcagagtgctgggcatgtgcctggaactaccgagtaggagccatttctttgtacccctgcctaatccattcctctccttccaagtccattgttgcaagcaatattcttctcaatttttatatgtttactttaaatcaaagttagtctatttgtataaaatttttaaaaaatctaaaagaaaaagaaaaaaaacaagggtgggttgggtattccagtgggaagatcattgaagggaaaaatgttactatttactgaggtatttttcacagaatgattgaattaaaaaaaactcaacttgcattttcattgtgggtgcttagagaagttctacaaaattcaaactgtgaaggtttatgcttcattaattatgaccatactttttcattttctgacgatccctgatttccttatggactcaataagaatcttttatatcaagtaaaatgaaagttgatgatagaatatcaaatagtgaatttgatatgaaatctaagagtgtgagtcacttgcatatgtaatgctttgggtttttgcatattttcttaggtcacagtgacaggtttctgagttgtttcccttttcaagtctctgggaggccagtggcagcagcaggtctgtgtttcaccttcttcccatgtgagcttggaaaactttggcatcttaattagtcttgaatcatacacctgatccccaaacattgcctgctctcaatgaaacatgctttggaaatggaagggactcagaaagtcgaaatcccaagaactccaagccaaaagtgttaggttttagtgaaatttgtgtcaggtataagcatacctgtttgggccagaattattatcacagcctttctgacccaaactttcaaaagcaaataaacagcatataaaacgttaattatctttccattgtaattgtgatgatctactctgtatgggtaccaaaatcaccttctctcttcaagtcaaagttgaatttagaactttgaatacaggtcaaaaaatgtagaaaatatcattttatattccctaatctatatagctgaaaaagggttgtattttcttagctgaatatgaatacctcttaaacataaattagttcctctccagtgaagtatcttattttaccaatccatttcaggaaagaggttctgctgccgtaaaggcagaaattttatttttatcccttttatttgaatgagagatttgaaaatcgaattatgtaaatatttcaatgcatctgctattattttgtggagtttattaaactactttaaaaaaattgtatagtctatttattgtatgtatgtacatacagtctgatacctaaaatttaaagtggattccataaaaccagactcaagtcttgtttagactactgaatactgttttagcctgtgccctggattctacctctgtataggaaaattttccatattcattaattagtgttgatctgtattaattggttatgtttcttgcactaaggatgtttaaaactccgctgtaagtgtagattttagttttactggcaggatgaatcacttgacacataggtagatacttgaggttcattttcttttctttttctacatgatgatgaatagttatgttttcttctctgatttgttcaaagtttgccaaaagaaaacacaaaaccagtacagtacttactgataaatcgtagtgactgtaatttgtttgtaaggcgaattaatgctctacaattaaagctggattactattgaggaacacattgtcttagtgtagtttttgaatggaaagtttttgtcattaaggatgaaggaaacgacacaatttgttactttaattttatatttgatttaaacaacaaataaagtcattggg

SEQ ID NO: 7188 - DNA, 3960 bp, Homo sapiens
  source 1..3960: mol_type = unassigned DNA
aggccccgccgccgccgccgctgctgacccggcggccggccgccgttccgccccctcccgtggcggcgagcgggcgggcctccccacacgcccccgccgcccgcgccccgcgtccacccgcgccccgctcccggggactgggagaacaggatagcagcaggagtcggggggccgccgaagatggggaacactacctcgtgctgcgtgtcgtccagtcccaagctccggaggaatgcccactcccggctggagtcctaccggccagacacggacctgagccgcgaggacacgggctgcaacctgcagcacatcagcgaccgggagaacatagacgatttgaacatggaattcaatccttcagatcatcctcgggccagcacaatattcctcagtaaatctcagacggacgtgagagaaaaacgcaagagtctcttcattaaccatcatcctccaggacaaatagcaaggaaatacagttcctgctccaccattttcctagatgatagcacagtcagtcaaccaaacctcaagtatacaattaaatgtgtcgctcttgcaatatattatcacatcaaaaacagggacccagatggaaggatgctcttagatatttttgatgaaaatcttcaccctctttcgaaatccgaagtgccaccagattatgacaaacacaacccagagcagaagcagatttaccggttcgttcggacactgttcagtgctgctcagctgacggctgaatgtgccatcgtcaccctggtgtaccttgaaagacttttaacatacgcagagatagatatctgtccggccaactggaagcggattgttttaggggcgatcctgctggcctccaaggtgtgggatgaccaggctgtatggaatgtggattactgccagatcctgaaagacatcacggtggaggacatgaacgagctagagcgacagtttcttgaattgctgcagttcaacatcaatgttccttccagtgtctatgccaagtattattttgatcttcgttctctggcagaagcgaacaacctgagctttcccttggagcccctgagcagggagagggctcacaagcttgaggccatctctcgcctctgcgaggacaagtacaaggacctaagaagatccgcgaggaagcgctcagccagtgcagacaacctgactctgccccggtggtccccagccatcatctcttaactacggaggcccgccggaggccacaccatcccttagtttctcctttagtttgagaaaagacagacttggggtgggtttgtttttgttttttctttccttttctttttttacgcatagctccgtcaagctgcctggatgagcgcccatgcagcaaggcttggaggaagcgtcagtgccctggagatcccagctcgctctccccactgtcagcaacagcacttccttcgtggaggaagtggactcgaatcctggaggaggaaataaagggaaagggaagtcgtggagaggcagggaaaatggttaagcagcccggccctctggagtccccatgggggcggtagctgaagttggcgagcgcagcggtggatgcagagctggctgcacccagggctgggccagtgtgtcctgtaagacttcttgcattccttctgctgcttttttgggatgggggtatttttgttcatttgtttttgccctgttttgattttggtcccacagagcaggggatgtagtttgtacccaccatggcgcagacttccaaataaatagtactggtcatttctctctgcactatttctgcgcgctgtcttctgagctttcttcctcaccagtgggctgtgcttgttccatttctgtacacccttattttataccgtttttcttcaacaatggcgaaattgactgtagtgctgaaccaaaagtatccctttccctccttattcctcaccccaagaacattctagatcacatgggtgcttgtgccttccgattttcttgcatttgtttttttcctgacctgaagttgttgttacaaaatcagtcagactttgtgggctgaaggacacggtgcagcagagggtgtccctgtgagagttctgcagagtgctgggcatgtgcctggaactaccgagtaggagccatttctttgtacccctgcctaatccattcctctccttccaagtccattgttgcaagcaatattcttctcaatttttatatgtttactttaaatcaaagttagtctatttgtataaaatttttaaaaaatctaaaagaaaaagaaaaaaaacaagggtgggttgggtattccagtgggaagatcattgaagggaaaaatgttactatttactgaggtatttttcacagaatgattgaattaaaaaaaactcaacttgcattttcattgtgggtgcttagagaagttctacaaaattcaaactgtgaaggtttatgcttcattaattatgaccatactttttcattttctgacgatccctgatttccttatggactcaataagaatcttttatatcaagtaaaatgaaagttgatgatagaatatcaaatagtgaatttgatatgaaatctaagagtgtgagtcacttgcatatgtaatgctttgggtttttgcatattttcttaggtcacagtgacaggtttctgagttgtttcccttttcaagtctctgggaggccagtggcagcagcaggtctgtgtttcaccttcttcccatgtgagcttggaaaactttggcatcttaattagtcttgaatcatacacctgatccccaaacattgcctgctctcaatgaaacatgctttggaaatggaagggactcagaaagtcgaaatcccaagaactccaagccaaaagtgttaggttttagtgaaatttgtgtcaggtataagcatacctgtttgggccagaattattatcacagcctttctgacccaaactttcaaaagcaaataaacagcatataaaacgttaattatctttccattgtaattgtgatgatctactctgtatgggtaccaaaatcaccttctctcttcaagtcaaagttgaatttagaactttgaatacaggtcaaaaaatgtagaaaatatcattttatattccctaatctatatagctgaaaaagggttgtattttcttagctgaatatgaatacctcttaaacataaattagttcctctccagtgaagtatcttattttaccaatccatttcaggaaagaggttctgctgccgtaaaggcagaaattttatttttatcccttttatttgaatgagagatttgaaaatcgaattatgtaaatatttcaatgcatctgctattattttgtggagtttattaaactactttaaaaaaattgtatagtctatttattgtatgtatgtacatacagtctgatacctaaaatttaaagtggattccataaaaccagactcaagtcttgtttagactactgaatactgttttagcctgtgccctggattctacctctgtataggaaaattttccatattcattaattagtgttgatctgtattaattggttatgtttcttgcactaaggatgtttaaaactccgctgtaagtgtagattttagttttactggcaggatgaatcacttgacacataggtagatacttgaggttcattttcttttctttttctacatgatgatgaatagttatgttttcttctctgatttgttcaaagtttgccaaaagaaaacacaaaaccagtacagtacttactgataaatcgtagtgactgtaatttgtttgtaaggcgaattaatgctctacaattaaagctggattactattgaggaacacattgtcttagtgtagtttttgaatggaaagtttttgtcattaaggatgaaggaaacgacacaatttgttactttaattttatatttgatttaaacaacaaataaagtcattgggacaataaatata

SEQ ID NO: 7189 - DNA, 3940 bp, Homo sapiens
  source 1..3940: mol_type = unassigned DNA
aggagagatgtgagcctcgtaccaggaagatcatactgaggccaccaggttgagagccgcctggctggggggcttgtccggggacagcaggggcagaggcatggaggttcacagccaggaaatcgtgcagtgaacctgtcccctccggtcacaacatcaagagctgaactgggactagaagtcatcgccccagagctttttgctaccagaactgccgggtgaaaatctttggaagagaagtttgagaacctgttaaacaagctctctaggtaattctgtgcacgttcagtctgagaactgctgcatctgaagagatttgaacatggaattcaatccttcagatcatcctcgggccagcacaatattcctcagtaaatctcagacggacgtgagagaaaaacgcaagagtctcttcattaaccatcatcctccaggacaaatagcaaggaaatacagttcctgctccaccattttcctagatgatagcacagtcagtcaaccaaacctcaagtatacaattaaatgtgtcgctcttgcaatatattatcacatcaaaaacagggacccagatggaaggatgctcttagatatttttgatgaaaatcttcaccctctttcgaaatccgaagtgccaccagattatgacaaacacaacccagagcagaagcagatttaccggttcgttcggacactgttcagtgctgctcagctgacggctgaatgtgccatcgtcaccctggtgtaccttgaaagacttttaacatacgcagagatagatatctgtccggccaactggaagcggattgttttaggggcgatcctgctggcctccaaggtgtgggatgaccaggctgtatggaatgtggattactgccagatcctgaaagacatcacggtggaggacatgaacgagctagagcgacagtttcttgaattgctgcagttcaacatcaatgttccttccagtgtctatgccaagtattattttgatcttcgttctctggcagaagcgaacaacctgagctttcccttggagcccctgagcagggagagggctcacaagcttgaggccatctctcgcctctgcgaggacaagtacaaggacctaagaagatccgcgaggaagcgctcagccagtgcagacaacctgactctgccccggtggtccccagccatcatctcttaactacggaggcccgccggaggccacaccatcccttagtttctcctttagtttgagaaaagacagacttggggtgggtttgtttttgttttttctttccttttctttttttacgcatagctccgtcaagctgcctggatgagcgcccatgcagcaaggcttggaggaagcgtcagtgccctggagatcccagctcgctctccccactgtcagcaacagcacttccttcgtggaggaagtggactcgaatcctggaggaggaaataaagggaaagggaagtcgtggagaggcagggaaaatggttaagcagcccggccctctggagtccccatgggggcggtagctgaagttggcgagcgcagcggtggatgcagagctggctgcacccagggctgggccagtgtgtcctgtaagacttcttgcattccttctgctgcttttttgggatgggggtatttttgttcatttgtttttgccctgttttgattttggtcccacagagcaggggatgtagtttgtacccaccatggcgcagacttccaaataaatagtactggtcatttctctctgcactatttctgcgcgctgtcttctgagctttcttcctcaccagtgggctgtgcttgttccatttctgtacacccttattttataccgtttttcttcaacaatggcgaaattgactgtagtgctgaaccaaaagtatccctttccctccttattcctcaccccaagaacattctagatcacatgggtgcttgtgccttccgattttcttgcatttgtttttttcctgacctgaagttgttgttacaaaatcagtcagactttgtgggctgaaggacacggtgcagcagagggtgtccctgtgagagttctgcagagtgctgggcatgtgcctggaactaccgagtaggagccatttctttgtacccctgcctaatccattcctctccttccaagtccattgttgcaagcaatattcttctcaatttttatatgtttactttaaatcaaagttagtctatttgtataaaatttttaaaaaatctaaaagaaaaagaaaaaaaacaagggtgggttgggtattccagtgggaagatcattgaagggaaaaatgttactatttactgaggtatttttcacagaatgattgaattaaaaaaaactcaacttgcattttcattgtgggtgcttagagaagttctacaaaattcaaactgtgaaggtttatgcttcattaattatgaccatactttttcattttctgacgatccctgatttccttatggactcaataagaatcttttatatcaagtaaaatgaaagttgatgatagaatatcaaatagtgaatttgatatgaaatctaagagtgtgagtcacttgcatatgtaatgctttgggtttttgcatattttcttaggtcacagtgacaggtttctgagttgtttcccttttcaagtctctgggaggccagtggcagcagcaggtctgtgtttcaccttcttcccatgtgagcttggaaaactttggcatcttaattagtcttgaatcatacacctgatccccaaacattgcctgctctcaatgaaacatgctttggaaatggaagggactcagaaagtcgaaatcccaagaactccaagccaaaagtgttaggttttagtgaaatttgtgtcaggtataagcatacctgtttgggccagaattattatcacagcctttctgacccaaactttcaaaagcaaataaacagcatataaaacgttaattatctttccattgtaattgtgatgatctactctgtatgggtaccaaaatcaccttctctcttcaagtcaaagttgaatttagaactttgaatacaggtcaaaaaatgtagaaaatatcattttatattccctaatctatatagctgaaaaagggttgtattttcttagctgaatatgaatacctcttaaacataaattagttcctctccagtgaagtatcttattttaccaatccatttcaggaaagaggttctgctgccgtaaaggcagaaattttatttttatcccttttatttgaatgagagatttgaaaatcgaattatgtaaatatttcaatgcatctgctattattttgtggagtttattaaactactttaaaaaaattgtatagtctatttattgtatgtatgtacatacagtctgatacctaaaatttaaagtggattccataaaaccagactcaagtcttgtttagactactgaatactgttttagcctgtgccctggattctacctctgtataggaaaattttccatattcattaattagtgttgatctgtattaattggttatgtttcttgcactaaggatgtttaaaactccgctgtaagtgtagattttagttttactggcaggatgaatcacttgacacataggtagatacttgaggttcattttcttttctttttctacatgatgatgaatagttatgttttcttctctgatttgttcaaagtttgccaaaagaaaacacaaaaccagtacagtacttactgataaatcgtagtgactgtaatttgtttgtaaggcgaattaatgctctacaattaaagctggattactattgaggaacacattgtcttagtgtagtttttgaatggaaagtttttgtcattaaggatgaaggaaacgacacaatttgttactttaattttatatttgatttaaacaacaaataaagtcattgggacaataaatata

SEQ ID NO: 7190 - DNA, 1380 bp, Homo sapiens
  source 1..1380: mol_type = unassigned DNA
caggatagcagcaggagtcggggggccgccgaagatggggaacactacctcgtgctgcgtgtcgtccagtcccaagctccggaggaatgcccactcccggctggagtcctaccggccagacacggacctgagccgcgaggacacgggctgcaacctgcagcacatcagcgaccgggagaacatagacgatttgaacatggaattcaatccttcagatcatcctcgggccagcacaatattcctcagtaaatctcagacggacgtgagagaaaaacgcaagagtctcttcattaaccatggacccagatggaaggatgctcttagatatttttgatgaaaatcttcaccctctttcgaaatccgaagtgccaccagattatgacaaacacaacccagagcagaagcagatttaccggttcgttcggacactgttcagtgctgctcagctgacggctgaatgtgccatcgtcaccctggtgtaccttgaaagacttttaacatacgcagagatagatatctgtccggccaactggaagcggattgttttaggggcgatcctgctggcctccaaggtgtgggatgaccaggctgtatggaatgtggattactgccagatcctgaaagacatcacggtggaggacatgaacgagctagagcgacagtttcttgaattgctgcagttcaacatcaatgttccttccagtgtctatgccaagtattattttgatcttcgttctctggcagaagcgaacaacctgagctttcccttggagcccctgagcagggagagggctcacaagcttgaggccatctctcgcctctgcgaggacaagtacaaggacctaagaagatccgcgaggaagcgctcagccagtgcagacaacctgactctgccccggtggtccccagccatcatctcttaactacggaggcccgccggaggccacaccatcccttagtttctcctttagtttgagaaaagacagacttggggtgggtttgtttttgttttttctttccttttctttttttacgcatagctccgtcaagctgcctggatgagcgcccatgcagcaaggcttggaggaagcgtcagtgccctggagatcccagctcgctctccccactgtcagcaacagcacttccttcgtggaggaagtggactcgaatcctggaggaggaaataaagggaaagggaagtcgtggagaggcagggaaaatggttaagcagcccggccctctggagtccccatgggggcggtagctgaagttggcgagcgcagcggtggatgcagagctggctgcacccagggctgggccagtgtgtcctgtaagacttcttgcattccttctgctgcttttttgggatgggggtatttt

SEQ ID NO: 7191 - DNA, 1245 bp, Homo sapiens
  source 1..1245: mol_type = unassigned DNA
gcaccgcgccgcgaggagtccgggggctgcgcccacgcccgctgcccgcccgctcgtcggctagtcccgccgtccggcgcggacacgcgtgcccccggcttgaaccggaacctcttgccgaggcggccgccgtcgccgcccgcgccccgcgtccacccgcgccccgctcccggggactgggagaacaggatagcagcaggagtcggggggccgccgaagatggggaacactacctcgtgctgcgtgtcgtccagtcccaagctccggaggaatgcccactcccggctggagtcctaccggccagacacggacctgagccgcgaggacacgggctgcaacctgcagcacatcagcgaccgggagaacatagacgatttgaacatggaattcaatccttcagatcatcctcgggccagcacaatattcctcagtaaatctcagacggacgtgagagaaaaacgcaagagtctcttcattaaccatcatcctccaggacaaatagcaaggaaatacagttcctgctccaccattttcctagatgatagcacagtcagtcaaccaaacctcaagtatacaattaaatgtgtcgctcttgcaatatattatcacatcaaaaacagggacccagatggaaggatgctcttagatatttttgatgaaaatcttcaccctctttcgaaatccgaagtgccaccagattatgacaaacacaacccagagcagaagcagatttaccggttcgttcggacactgttcagtgctgctcagctgacggctgaatgtgccatcgtcaccctggtgtaccttgaaagacttttaacatacgcagagatagatatctgtccggccaactggaagcggattgttttaggggcgatcctgctggcctccaaggtgtgggatgaccaggctgtatggaatgtggattactgccagatcctgaaagacatcacggtggaggacatgaacgagctagagcgacagtttcttgaattgctgcagttcaacatcaatgttccttccagtgtctatgccaagtattattttgatcttcgttctctggcagaagcgaacaacctgagctttcccttggagcccctgagcagggagagggctcacaagcttgaggccatctctcgcctctgcgaggacaagtacaaggacctaagaagatccgcgaggaagcgctcagccagtgcagacaacctgactctgccccggtggtccccagccatcatctcttaa

SEQ ID NO: 7192 - DNA, 3344 bp, Homo sapiens
  source 1..3344: mol_type = unassigned DNA
gttgtatgccacataagtaaccaaatttgcttgtcaattatgtcttttttttttcttttttctgagacagagtcttgctctgtggcccaggctggagtgcagtggtacagtcttggctcactgcaacctctgcctcccaggttcaagcgattctcatacctcagcctccagagtagctggactgcaggcgcatgctaccacggccagataatttttgtatttttaatagagacggggtttcttttttttttttttccctgacagagttttgcttttgttgcccaggcttggagtgcaatggcgcgatcttggctcactgcaacctccacttcctgggttcaagcaattcttctgcctcagcctcccaagtagctgggattacaggtgtacaccaccatgcctggctaattttgcatttttttagtagagacatggtttcaccatgttgatcagggtcgtctcaaactcctgacctcaagtgatccacccgcctcagtctcccaaagttttgggattataaatgtgcgccactgcacccggtcaagacagggttttgccatgttagccagggaggtctcaaactcctgacctcaagttatccgccctgcttggtctcccaaagtgctgggattgcacacatgagccactgtgcctggcctcaattatgtctttaactgtggctgttctaagacttttgtcatccacaattgttgttttacttttatcctttcacagagcagtttataatcagctatagaactctgaggtactcttcaatctaagtttctgatcacttttgagattgtgccattggaatagagcaaaaaacttccaagactctcattgagagctgctatattcatgaggattgttcatccaatattgggcaaaatgagagttaattttatggactaaactaatataagactgaaataatctttttatgtttttgcttaaaacattactgattctttctgttctttcagaaccaagaaaacttttttttttttttttttgagacagaatctcactctgtcgcccaggctggagtgcagtggcgccatctcggctcactgcaagctccgcctcccaggttcacaccattctcctgcttcagcctcccaagtagctgggactacaggcgcccaccaccgcgcccggctaattttttgtatttttagtagagacagggtttcaccgtgttagccaggatggtctcaatctcctgaccttgtgatccgcccacctcggcctcccagagtgctgggattacaggcgtgagccacggtgcccggctggtaacttttttaactttgagctatttgcagcttttagcaattgagtaaagtacactcctgtgaggaagatttggaacatatttctgttttcttttttgttttttatattttgcttgggtagcatatttctttctgatttctccaaaaattgggaactatctgtgagcactatttaaaaaaaaaaaaaaaacttttccctctcccttcccctatttgtattctaatgtcaatataatgatgtgtgcacgtgcagtaacaatctgttttctcttgtaataggacatagagacactgcatattttaccaaggctttgactggaatggcatgctttcaaatataaacagacggctttaaggaatcagagttgacctatagtgcccatcaaagcccttgggaaaactggcttcatactgtatccacccagtggattcttcttgcccagatggagcccatgtatcaagatcgggcccgggacacccagacagatgagattgtcgcactgaagaaggtgcggatggacaaggagaaggatggcatccccatcagcagcttgcgggagatcacgctgctgctccgcctgcgtcatccgaacatcgtggagctgaaggaggtggttgtggggaaccacctggagagcatcttcctggtgatgggttactgtgagcaggacctggccagcctcctggagaatatgccaacacccttctcggaggctcaggtcaagtgcatcgtgctgcaggtgctccggggcctccagtatctgcacaggaacttcattatccacagggacctgaaggtttccaacttgctcatgaccgacaagggttgtgtgaagacagcggatttcggcctggcccgggcctatggtgtcccagtaaagccaatgacccccaaggtggtcactctctggtaccgagcccctgaactgctgttgggaaccaccacgcagaccaccagcatcgacatgtgggctgtgggctgcatactggccgagctgctggcgcacaggcctcttctccccggcacttccgagatccaccagatcgacttgatcgtgcagctgctgggcacgcccagtgagaacatctggccgggcttttccaagctgccactggtcggccagtacagcctccggaagcagccctacaacaacctgaagcacaagttcccatggctgtcggaggccgggctgcgcctgctgcacttcctgttcatgtacgaccctaagaaaagggcgacggccggggactgcctggagagctcctatttcaaggagaagcccctaccctgtgagccggagctcatgccgacctttccccaccaccgcaacaagcgggccgccccagccacctccgagggccagagcaagcgctgtaaaccctgacggtgggcctggcacacgcctgtattcccacaccaggtcttccgatcagtggtgtctgtgaagggtgccgcgagccaggctgaccaggcgcccgggatccagctcatccccttggctgggaacatcctccactgacttcctcccactgtctgccctgaacccactgctgcccccagaaaaaggccgggtgacaccggggggctcccagcccgtgcaccctggaagggcaggtctggcggctccatccgtggctgcaggggtctcatgtggtcctcctcgctatgttggaaatgtgcaaccactgcttcttgggaggagtggtgggtgcagtccccccgctgtctttgagttgtggtggacgctggcctgggatgagagggcccagaagaccttcgtatcccctctcagtcgcccggggctgtcccgtgcatgggttggctgtggggaccccaggtgggcctggcaggactccagatgaggacaagagggacaaggtatggggtgggagccacaattgaggataccccgagactaccaggagagccctgggctggaggctgagctgcatccctgctccccacatggaggacccaacaggaggccgtggctctgatgctgagcgaagctataggctcttgttggataaaagcttttttaacag

SEQ ID NO: 7193 - DNA, 1780 bp, Homo sapiens
  source 1..1780: mol_type = unassigned DNA
aagagaggcggggccagcgctcggcatggcggagccagatctggagtgcgagcagatccgtctgaagtgtattcgtaaggagggcttcttcacggtgcctccggaacacaggctgggacgatgccggagtgtgaaggagtttgagaagctgaaccgcattggagagggtacctacggcattgtgtatcgggcccgggacacccagacagatgagattgtcgcactgaagaaggtgcggatggacaaggagaaggatggcatccccatcagcagcttgcgggagatcacgctgctgctccgcctgcgtcatccgaacatcgtggagctgaaggaggtggttgtggggaaccacctggagagcatcttcctggtgatgggttactgtgagcaggacctggccagcctcctggagaatatgccaacacccttctcggaggctcaggtcaagtgcatcgtgctgcaggtgctccggggcctccagtatctgcacaggaacttcattatccacagggacctgaaggtttccaacttgctcatgaccgacaagggttgtgtgaagacagcggatttcggcctggcccgggcctatggtgtcccagtaaagccaatgacccccaaggtggtcactctctggtaccgagcccctgaactgctgttgggaaccaccacgcagaccaccagcatcgacatgtgggctgtgggctgcatactggccgagctgctggcgcacaggcctcttctccccggcacttccgagatccaccagatcgacttgatcgtgcagctgctgggcacgcccagtgagaacatctggccgggcttttccaagctgccactggtcggccagtacagcctccggaagcagccctacaacaacctgaagcacaagttcccatggctgtcggaggccgggctgcgcctgctgcacttcctgttcatgtacgaccctaagaaaagggcgacggccggggactgcctggagagctcctatttcaaggagaagcccctaccctgtgagccggagctcatgccgacctttccccaccaccgcaacaagcgggccgccccagccacctccgagggccagagcaagcgctgtaaaccctgacggtgggcctggcacacgcctgtattcccacaccaggtcttccgatcagtggtgtctgtgaagggtgccgcgagccaggctgaccaggcgcccgggatccagctcatccccttggctgggaacatcctccactgacttcctcccactgtctgccctgaacccactgctgcccccagaaaaaggccgggtgacaccggggggctcccagcccgtgcaccctggaagggcaggtctggcggctccatccgtggctgcaggggtctcatgtggtcctcctcgctatgttggaaatgtgcaaccactgcttcttgggaggagtggtgggtgcagtccccccgctgtctttgagttgtggtggacgctggcctgggatgagagggcccagaagaccttcgtatcccctctcagtcgcccggggctgtcccgtgcatgggttggctgtggggaccccaggtgggcctggcaggactccagatgaggacaagagggacaaggtatggggtgggagccacaattgaggataccccgagactaccaggagagccctgggctggaggctgagctgcatccctgctccccacatggaggacccaacaggaggccgtggctctgatgctgagcgaagctataggctcttgttggataaaagcttttttaacagacatggtttca

SEQ ID NO: 7194 - DNA, 1424 bp, Homo sapiens
  source 1..1424: mol_type = unassigned DNA
gtctgcgcctgcgcgcaagagaggcggggccagcgctcggcatggcggagccagatctggagtgcgagcagatccgtctgaagtgtattcctgggacgatgccggagtgtgaaggagtttgagaagctgaaccgcattggagagggtacctacggcattgtgtatcgggcccgggacacccagacagatgagattgtcgcactgaagaaggtgcggatggacaaggagaaggatggcatccccatcagcagcttgcgggagatcacgctgctgctccgcctgcgtcatccgaacatcgtggagctgaaggaggtggttgtggggaaccacctggagagcatcttcctggtgatgggttactgtgagcaggacctggccagcctcctggagaatatgccaacacccttctcggaggctcaggtcaagtgcatcgtgctgcaggtgctccggggcctccagtatctgcacaggaacttcattatccacagggacctgaaggtttccaacttgctcatgaccgacaagggttgtgtgaagacagcggatttcggcctggcccgggcctatggtgtcccagtaaagccaatgacccccaaggtggtcactctctggtaccgagcccctgaactgctgttgggaaccaccacgcagaccaccagcatcgacatgtgggctgtgggctgcatactggccgagctgctggcgcacaggcctcttctccccggcacttccgagatccaccagatcgacttgatcgtgcagctgctgggcacgcccagtgagaacatctggccgggcttttccaagctgccactggtcggccagtacagcctccggaagcagccctacaacaacctgaagcacaagttcccatggctgtcggaggccgggctgcgcctgctgcacttcctgttcatgtacgaccctaagaaaagggcgacggccggggactgcctggagagctcctatttcaaggagaagcccctacgtcttccgatcagtggtgtctgtgaagggtgccgcgagccaggctgaccaggcgcccgggatccagctcatccccttggctgggaacatcctccactgacttcctcccactgtctgccctgaacccactgctgcccccagaaaaaggccgggtgacaccggggggctcccagcccgtgcaccctggaagggcaggtctggcggctccatccgtggctgcaggggtctcatgtggtcctcctcgctatgttggaaatgtgcaaccactgcttcttgggaggagtggtgggtgcagtccccccgctgtctttgagttgtggtggacgctggcctgggatgagagggcccagaagaccttcgtatcccctctcagtcgcccggggctgtcccgtgcatgggttggctgtggggaccccaggtgggcctggcaggactcc

SEQ ID NO: 7195 - DNA, 1021 bp, Homo sapiens
  source 1..1021: mol_type = unassigned DNA
tctggcgagcgccggttgctgtttcttctcaggctcagggaccggccgcggccccgtaggggtgaggcagtgttttaactcaaatgggtgatgaaaaggactcttggaaagtgaaaactttagatgaaattcttcaggaaaagaaacgaaggaaggaacaagaggagaaagcagagataaaacgcttaaaaaattctgatgaccgggattccaagcgggattcccttgaggagggggagctgagagatcactgcatggagatcacaataaggaactccccgtatagaagagaagactcaatggaagacagaggagaagaagatgattctttggccatcaaaccaccccagcaaatgtctcggaaagaaaaagttcatcacagaaaagatgaaaagagaaaagaaaaatgtaggcatcatagccattcagcagaaggggggaagcatgctagagtgaaagaaagagagcacgaacgtcggaaacgacatcgagaagaacaggataaagctcgccgggaatgggaaagacagaagagaagggaaatggcaagggagcattccaggagagaaagggaccgcttggagcagttagaaaggaagcgggagcgggagcgcaagatgcgggagcagcagaaggagcagcggtcaaaaagatgaccttcagcgagcacccctacaacaacctccgcaagcgcttcggggctctgctctcagaccagggcttcgacctcatgaacaagttcctgacctacttccccgggaggaggatcagcgctgaggacggcctcaagcatgagtatttccgcgagacccccctccccatcgacccctccatgttccccacgtggcccgccaagagcgagcagcagcgtgtgaagcggggcaccagcccgaggccccctgagggaggcctgggctacagccagctgggtgacgacgacctgaaggagacgggcttccaccttaccaccacgaaccagggggcctctgccgcgggccccggcttcagcctcaagttctga

SEQ ID NO: 7196 - DNA, 2751 bp, Homo sapiens
  source 1..2751: mol_type = unassigned DNA
acacaggaagtgaggatacttctggcgagcgccggttgctgtttcttctcaggctcagggaccggccgcggccccgtaggggtgagttccgactgggctgttttaactcaaatgggtgatgaaaaggactcttggaaagtgaaaactttagatgaaattcttcaggaaaagaaacgaaggaaggaacaagaggagaaagcagagataaaacgcttaaaaaatgtaagccatatttttttaagtaagtggttttcttaaaggagatttaatttctttgccctcatttttccattagaacaacgcttcttcggtgaagttcttttgtacttccaaatgtcgcagtctgatgaccgggattccaagcgggattcccttgaggagggggagctgagagatcactgcatggagatcacaataaggaactccccgtatagaagagaagactcaatggaagacagaggagaagaagatgattctttggccatcaaaccaccccagcaaatgtctcggaaagaaaaagttcatcacagaaaagatgaaaagagaaaagaaaaatgtaggcatcatagccattcagcagaaggggggaagcatgctagagtgaaagaaagagagcacgaacgtcggaaacgacatcgagaagaacaggataaagctcgccgggaatgggaaagacagaagagaagggaaatggcaagggagcattccaggagagaaagggaccgcttggagcagttagaaaggaagcgggagcgggagcgcaagatgcgggagcagcagaaggagcagcgggagcagaaggagcgcgagcggcgggcggaggagcggcgcaaggagcgggaggcccgcagggaagtgtctgcacatcaccgaacgatgagagaggactacagcgacaaagtgaaagccagccactggagtcgcagcccgcctcggccgccgcgggagcggttcgagttgggagacggccggaagccagtaaaagaagagaaaatggaagaaagggacctgctgtccgacttacaggacatcagcgacagcgagaggaagaccagctcggccgagtcctcgtcagcggaatcaggctcaggttctgaggaagaagaggaggaggaggaagaggaggaggaggaagggagcaccagtgaagaatcagaggaggaggaggaggaagaggaagaggaggaggaggagaccggcagcaactctgaggaggcatcagagcagtctgccgaagaagtaagtgaggaagaaatgagtgaagatgaagaacgagaaaatgaaaaccacctcttggttgttccagagtcacggttcgaccgagattccggggagagtgaagaagcagaggaagaagtgggtgagggaacgccgcagagcagcgccctgacagagggcgactatgtgcccgactcccctgccctgttgcccatcgagctcaagcaggagctgcccaagtacctgccggccctgcagggctgccggagcgtcgaggagttccagtgcctgaacaggatcgaggagggcacctatggagtggtctacagagcaaaagacaagaaaacagatgaaattgtggctctaaagcggctgaagatggagaaggagaaggagggcttcccgatcacgtccctgagggagatcaacaccatcctcaaggcccagcatcccaacattgtcaccgttagagagattgtggtgggcagcaacatggacaagatctacatcgtgatgaactacgtggagcacgacctcaagagcctgatggagaccatgaaacagcccttcctgccaggggaggtgaagaccctgatgatccagctgctgcggggggtgaaacacctgcacgacaactggatcctgcaccgtgacctcaagacgtccaacctgctgctgagccacgccggcatcctcaaggtgggtgattttgggctggcgcgggagtacggatcccctctgaaggcctacaccccggtcgtggtgacccagtggtaccgcgccccagagctgctgcttggtgccaaggaatactccacggccgtggacatgtggtcagtgggctgcatcttcggggagctgctgactcagaagcctctgttccccgggaattcggaaatcgatcagatcaacaaagtgttcaaggagctggggacccccagtgagaaaatctggcccggctacagtgagctcccagtagtcaaaaagatgaccttcagcgagcacccctacaacaacctccgcaagcgcttcggggctctgctctcagaccagggcttcgacctcatgaacaagttcctgacctacttccccgggaggaggatcagcgctgaggacggcctcaagcatgagtatttccgcgagacccccctccccatcgacccctccatgttccccacgtggcccgccaagagcgagcagcagcgtgtgaagcggggcaccagcccgaggccccctgagggaggcctgggctacagccagctgggtgacgacgacctgaaggagacgggcttccaccttaccaccacgaaccagggggcctctgccgcgggccccggcttcagcctcaagttctgaaggtcagagtggaccccgtcatggggagaactcagccgggaccacaggcgtggctactgcggctggagctgcgatgagactcggaactcctcgtcttactttgtgctccatgttttgtttttgtattttggtttgtaaatttgtagaattaaatcattttccttgttgtggaggaaa

SEQ ID NO: 7197 - DNA, 2446 bp, Homo sapiens
  source 1..2446: mol_type = unassigned DNA
gatacttctggcgagcgccggttgctgtttcttctcaggctcagggaccggccgcggccccgtagggtgttttaactcaaatgggtgatgaaaaggactcttggaaagtgaaaactttagatgaaattcttcaggaaaagaaacgaaggaaggaacaagaggagaaagcagagataaaacgcttaaaaaattctgatgaccgggattccaagcgggattcccttgaggagggggagctgagagatcactgcatggagatcacaataaggaactccccgtatagaagagaagactcaatggaagacagaggagaagaagatgattctttggccatcaaaccaccccagcaaatgtctcggaaagaaaaagttcatcacagaaaagatgaaaagagaaaagaaaaatggaagcatgctagagtgaaagaaagagagcacgaacgtcggaaacgacatcgagaagaacaggataaagctcgccgggaatgggaaagacagaagagaagggaaatggcaagggagcattccaggagagaaagggggaatgatggcgtgtgcctcttcagggaccgcttggagcagttagaaaggaagcgggagcgggagcgcaagatgcgggagcagcagaaggagcagcgggagcagaaggagcgcgagcggcgggcggaggagcggcgcaaggagcgggaggcccgcagggaagtgtctgcacatcaccgaacgatgagagaggactacagcgacaaagtgaaagccagccactggagtcgcagcccgcctcggccgccgcgggagcggttcgagttgggagacggccggaagccagtaaaagaagagaaaatggaagaaagggacctgctgtccgacttacaggacatcagcgacagcgagaggaagaccagctcggccgagtcctcgtcagcggaatcaggctcaggttctgaggaagaagaggaggaggaggaagaggaggaggaggaagggagcaccagtgaagaatcagaggaggaggaggaggaagaggaagaggaggaggaggagaccggcagcaactctgaggaggcatcagagcagtctgccgaagaagtaagtgaggaagaaatgagtgaagatgaagaacgagaaaatgaaaaccacctcttggttgttccagagtcacggttcgaccgagattccggggagagtgaagaagcagaggaagaagtgggtgagggaacgccgcagagcagcgccctgacagagggcgactatgtgcccgactcccctgccctgttgcccatcgagctcaagcaggagctgcccaagtacctgccggccctgcagggctgccggagcgtcgaggagttccagtgcctgaacaggatcgaggagggcacctatggagtggtctacagagcaaaagacaagaaaacagatgaaattgtggctctaaagcggctgaagatggagaaggagaaggagggcttcccgatcacgtccctgagggagatcaacaccatcctcaaggcccagcatcccaacattgtcaccgttagagagattgtggtgggcagcaacatggacaagatctacatcgtgatgaactacgtggagcacgacctcaagagcctgatggagaccatgaaacagcccttcctgccaggggaggtgaagaccctgatgatccagctgctgcggggggtgaaacacctgcacgacaactggatcctgcaccgtgacctcaagacgtccaacctgctgctgagccacgccggcatcctcaaggtgggtgattttgggctggcgcgggagtacggatcccctctgaaggcctacaccccggtcgtggtgacccagtggtaccgcgccccagagctgctgcttggtgccaaggaatactccacggccgtggacatgtggtcagtgggctgcatcttcggggagctgctgactcagaagcctctgttccccgggaattcggaaatcgatcagatcaacaaagtgttcaaggagctggggacccccagtgagaaaatctggcccggctacagtgagctcccagtagtcaaaaagatgaccttcagcgagcacccctacaacaacctccgcaagcgcttcggggctctgctctcagaccagggcttcgacctcatgaacaagttcctgacctacttccccgggaggaggatcagcgctgaggacggcctcaagcatgagtatttccgcgagacccccctccccatcgacccctccatgttccccacgtggcccgccaagagcgagcagcagcgtgtgaagcggggcaccagcccgaggccccctgagggaggcctgggctacagccagctgggtgacgacgacctgaaggagacgggcttccaccttaccaccacgaaccagggggcctctgccgcgggccccggcttcagcctcaagttctgaaggtcagagtggaccccgtcatgggg

SEQ ID NO: 7198 - DNA, 2419 bp, Homo sapiens
  source 1..2419: mol_type = unassigned DNA
gatacttctggcgagcgccggttgctgtttcttctcaggctcagggaccggccgcggccccgtagggtgttttaactcaaatgggtgatgaaaaggactcttggaaagtgaaaactttagatgaaattcttcaggaaaagaaacgaaggaaggaacaagaggagaaagcagagataaaacgcttaaaaaattctgatgaccgggattccaagcgggattcccttgaggagggggagctgagagatcactgcatggagatcacaataaggaactccccgtatagaagagaagactcaatggaagacagaggagaagaagatgattctttggccatcaaaccaccccagcaaatgtctcggaaagaaaaagttcatcacagaaaagatgaaaagagaaaagaaaaatggaagcatgctagagtgaaagaaagagagcacgaacgtcggaaacgacatcgagaagaacaggataaagctcgccgggaatgggaaagacagaagagaagggaaatggcaagggagcattccaggagagaaagggaccgcttggagcagttagaaaggaagcgggagcgggagcgcaagatgcgggagcagcagaaggagcagcgggagcagaaggagcgcgagcggcgggcggaggagcggcgcaaggagcgggaggcccgcagggaagtgtctgcacatcaccgaacgatgagagaggactacagcgacaaagtgaaagccagccactggagtcgcagcccgcctcggccgccgcgggagcggttcgagttgggagacggccggaagccagtaaaagaagagaaaatggaagaaagggacctgctgtccgacttacaggacatcagcgacagcgagaggaagaccagctcggccgagtcctcgtcagcggaatcaggctcaggttctgaggaagaagaggaggaggaggaagaggaggaggaggaagggagcaccagtgaagaatcagaggaggaggaggaggaagaggaagaggaggaggaggagaccggcagcaactctgaggaggcatcagagcagtctgccgaagaagtaagtgaggaagaaatgagtgaagatgaagaacgagaaaatgaaaaccacctcttggttgttccagagtcacggttcgaccgagattccggggagagtgaagaagcagaggaagaagtgggtgagggaacgccgcagagcagcgccctgacagagggcgactatgtgcccgactcccctgccctgttgcccatcgagctcaagcaggagctgcccaagtacctgccggccctgcagggctgccggagcgtcgaggagttccagtgcctgaacaggatcgaggagggcacctatggagtggtctacagagcaaaagacaagaaaacagatgaaattgtggctctaaagcggctgaagatggagaaggagaaggagggcttcccgatcacgtccctgagggagatcaacaccatcctcaaggcccagcatcccaacattgtcaccgttagagagattgtggtgggcagcaacatggacaagatctacatcgtgatgaactacgtggagcacgacctcaagagcctgatggagaccatgaaacagcccttcctgccaggggaggtgaagaccctgatgatccagctgctgcggggggtgaaacacctgcacgacaactggatcctgcaccgtgacctcaagacgtccaacctgctgctgagccacgccggcatcctcaaggtgggtgattttgggctggcgcgggagtacggatcccctctgaaggcctacaccccggtcgtggtgacccagtggtaccgcgccccagagctgctgcttggtgccaaggaatactccacggccgtggacatgtggtcagtgggctgcatcttcggggagctgctgactcagaagcctctgttccccgggaattcggaaatcgatcagatcaacaaagtgttcaaggagctggggacccccagtgagaaaatctggcccggctacagtgagctcccagtagtcaaaaagatgaccttcagcgagcacccctacaacaacctccgcaagcgcttcggggctctgctctcagaccagggcttcgacctcatgaacaagttcctgacctacttccccgggaggaggatcagcgctgaggacggcctcaagcatgagtatttccgcgagacccccctccccatcgacccctccatgttccccacgtggcccgccaagagcgagcagcagcgtgtgaagcggggcaccagcccgaggccccctgagggaggcctgggctacagccagctgggtgacgacgacctgaaggagacgggcttccaccttaccaccacgaaccagggggcctctgccgcgggccccggcttcagcctcaagttctgaaggtcagagtggaccccgtcatgggg

SEQ ID NO: 7199 - DNA, 2473 bp, Homo sapiens
  source 1..2473: mol_type = unassigned DNA
tctggcgagcgccggttgctgtttcttctcaggctcagggaccggccgcggccccgtaggggtgaggcagtgttttaactcaaatgggtgatgaaaaggactcttggaaagtgaaaactttagatgaaattcttcaggaaaagaaacgaaggaaggaacaagaggagaaagcagagataaaacgcttaaaaaataacaacgcttcttcggtgaagttcttttgtacttccaaatgtcgcagtctgatgaccgggattccaagcgggattcccttgaggagggggagctgagagatcactgcatggagatcacaataaggaactccccgtatagaagagaagactcaatggaagacagaggagaagaagatgattctttggccatcaaaccaccccagcaaatgtctcggaaagaaaaagttcatcacagaaaagatgaaaagagaaaagaaaaatgtaggcatcatagccattcagcagaaggggggaagcatgctagagtgaaagaaagagagcacgaacgtcggaaacgacatcgagaagaacaggataaagctcgccgggaatgggaaagacagaagagaagggaaatggcaagggagcattccaggagagaaagggaccgcttggagcagttagaaaggaagcgggagcgggagcgcaagatgcgggagcagcagaaggagcagcgggagcagaaggagcgcgagcggcgggcggaggagcggcgcaaggagcgggaggcccgcagggaagtgtctgcacatcaccgaacgatgagagaggactacagcgacaaagtgaaagccagccactggagtcgcagcccgcctcggccgccgcgggagcggttcgagttgggagacggccggaagccagtaaaagaagagaaaatggaagaaagggacctgctgtccgacttacaggacatcagcgacagcgagaggaagaccagctcggccgagtcctcgtcagcggaatcaggctcaggttctgaggaagaagaggaggaggaggaagaggaggaggaggaagggagcaccagtgaagaatcagaggaggaggaggaggaagaggaagaggaggaggaggagaccggcagcaactctgaggaggcatcagagcagtctgccgaagaagtaagtgaggaagaaatgagtgaagatgaagaacgagaaaatgaaaaccacctcttggttgttccagagtcacggttcgaccgagattccggggagagtgaagaagcagaggaagaagtgggtgagggaacgccgcagagcagcgccctgacagagggcgactatgtgcccgactcccctgccctgttgcccatcgagctcaagcaggagctgcccaagtacctgccggccctgcagggctgccggagcgtcgaggagttccagtgcctgaacaggatcgaggagggcacctatggagtggtctacagagcaaaagacaagaaaacagatgaaattgtggctctaaagcggctgaagatggagaaggagaaggagggcttcccgatcacgtccctgagggagatcaacaccatcctcaaggcccagcatcccaacattgtcaccgttagagagattgtggtgggcagcaacatggacaagatctacatcgtgatgaactacgtggagcacgacctcaagagcctgatggagaccatgaaacagcccttcctgccaggggaggtgaagaccctgatgatccagctgctgcggggggtgaaacacctgcacgacaactggatcctgcaccgtgacctcaagacgtccaacctgctgctgagccacgccggcatcctcaaggtgggtgattttgggctggcgcgggagtacggatcccctctgaaggcctacaccccggtcgtggtgacccagtggtaccgcgccccagagctgctgcttggtgccaaggaatactccacggccgtggacatgtggtcagtgggctgcatcttcggggagctgctgactcagaagcctctgttccccgggaattcggaaatcgatcagatcaacaaagtgttcaaggagctggggacccccagtgagaaaatctggcccggctacagtgagctcccagtagtcaaaaagatgaccttcagcgagcacccctacaacaacctccgcaagcgcttcggggctctgctctcagaccagggcttcgacctcatgaacaagttcctgacctacttccccgggaggaggatcagcgctgaggacggcctcaagcatgagtatttccgcgagacccccctccccatcgacccctccatgttccccacgtggcccgccaagagcgagcagcagcgtgtgaagcggggcaccagcccgaggccccctgagggaggcctgggctacagccagctgggtgacgacgacctgaaggagacgggcttccaccttaccaccacgaaccagggggcctctgccgcgggccccggcttcagcctcaagttctga

SEQ ID NO: 7200 - DNA, 2458 bp, Homo sapiens
  source 1..2458: mol_type = unassigned DNA
gatacttctggcgagcgccggttgctgtttcttctcaggctcagggaccggccgcggccccgtagggtgttttaactcaaatgggtgatgaaaaggactcttggaaagtgaaaactttagatgaaattcttcaggaaaagaaacgaaggaaggaacaagaggagaaagcagagataaaacgcttaaaaaattctgatgaccgggattccaagcgggattcccttgaggagggggagctgagagatcactgcatggagatcacaataaggaactccccgtatagaagagaagactcaatggaagacagaggagaagaagatgattctttggccatcaaaccaccccagcaaatgtctcggaaagaaaaagttcatcacagaaaagatgaaaagagaaaagaaaaatggaagcatgctagagtgaaagaaagagagcacgaacgtcggaaacgacatcgagaagaacaggataaagctcgccgggaatgggaaagacagaagagaagggaaatggcaagggagcattccaggagagaaagggaccgcttggagcagttagaaaggaagcgggagcgggagcgcaagatgcgggagcagcagaaggagcagcgggagcagaaggagcgcgagcggcgggcggaggagcggcgcaaggagcgggaggcccgcagggaagtgtctgcacatcaccgaacgatgagagaggactacagcgacaaagtgaaagccagccactggagtcgcagcccgcctcggccgccgcgggagcggttcgagttgggagacggccggaagccaggtgaggccaggccggcgcctgcgcagaagccagcacagttaaaagaagagaaaatggaagaaagggacctgctgtccgacttacaggacatcagcgacagcgagaggaagaccagctcggccgagtcctcgtcagcggaatcaggctcaggttctgaggaagaagaggaggaggaggaagaggaggaggaggaagggagcaccagtgaagaatcagaggaggaggaggaggaagaggaagaggaggaggaggagaccggcagcaactctgaggaggcatcagagcagtctgccgaagaagtaagtgaggaagaaatgagtgaagatgaagaacgagaaaatgaaaaccacctcttggttgttccagagtcacggttcgaccgagattccggggagagtgaagaagcagaggaagaagtgggtgagggaacgccgcagagcagcgccctgacagagggcgactatgtgcccgactcccctgccctgttgcccatcgagctcaagcaggagctgcccaagtacctgccggccctgcagggctgccggagcgtcgaggagttccagtgcctgaacaggatcgaggagggcacctatggagtggtctacagagcaaaagacaagaaaacagatgaaattgtggctctaaagcggctgaagatggagaaggagaaggagggcttcccgatcacgtccctgagggagatcaacaccatcctcaaggcccagcatcccaacattgtcaccgttagagagattgtggtgggcagcaacatggacaagatctacatcgtgatgaactacgtggagcacgacctcaagagcctgatggagaccatgaaacagcccttcctgccaggggaggtgaagaccctgatgatccagctgctgcggggggtgaaacacctgcacgacaactggatcctgcaccgtgacctcaagacgtccaacctgctgctgagccacgccggcatcctcaaggtgggtgattttgggctggcgcgggagtacggatcccctctgaaggcctacaccccggtcgtggtgacccagtggtaccgcgccccagagctgctgcttggtgccaaggaatactccacggccgtggacatgtggtcagtgggctgcatcttcggggagctgctgactcagaagcctctgttccccgggaattcggaaatcgatcagatcaacaaagtgttcaaggagctggggacccccagtgagaaaatctggcccggctacagtgagctcccagtagtcaaaaagatgaccttcagcgagcacccctacaacaacctccgcaagcgcttcggggctctgctctcagaccagggcttcgacctcatgaacaagttcctgacctacttccccgggaggaggatcagcgctgaggacggcctcaagcatgagtatttccgcgagacccccctccccatcgacccctccatgttccccacgtggcccgccaagagcgagcagcagcgtgtgaagcggggcaccagcccgaggccccctgagggaggcctgggctacagccagctgggtgacgacgacctgaaggagacgggcttccaccttaccaccacgaaccagggggcctctgccgcgggccccggcttcagcctcaagttctgaaggtcagagtggaccccgtcatgggg

SEQ ID NO: 7201 - DNA, 1255 bp, Homo sapiens
  source 1..1255: mol_type = unassigned DNA
gaggatacttctggcgagcgccggttgctgtttcttctcaggctcagggaccggccgcggccccgtagggtgttttaactcaaatgggtgatgaaaaggactcttggaaagtgaaaactttagatgaaattcttcaggaaaagaaacgaaggaaggaacaagaggagaaagcagagataaaacgcttaaaaaattctgatgaccgggattccaagcgggattcccttgaggagggggagctgagagatcactgcatggagatcacaataaggaactccccgtatagaagagaagactcaatggaagacagaggagaagaagatgattctttggccatcaaaccaccccagcaaatgtctcggaaagaaaaagttcatcacagaaaagatgaaaagagaaaagaaaaatggaagcatgctagagtgaaagaaagagagcacgaacgtcggaaacgacatcgagaagaacaggataaagctcgccgggaatgggaaagacagaagagaagggaaatggcaagggagcattccaggagagaaagtgtctgcacatcaccgaacgatgagagaggactacagcgacaaagtgaaagccagccactggagtcgcagcccgcctcggccgccgcgggagcggttcgagttgggagacggccggaagccagtaaaagaagagaaaatggaagaaagggacctgctgtccgacttacaggacatcagcgacagcgagaggaagaccagctcggccgagtcctcgtcagcggaatcaggctcaggttctgaggaagaagaggaggaggaggaagaggaggaggaggaagggagcaccagtgaagaatcagaggaggaggaggaggaagaggaagaggaggaggaggagaccggcagcaactctgaggaggcatcagagcagtctgccgaagaagtaagtgaggaagaaatgagtgaagatgaagaacgagaaaatgaaaaccacctcttggttgttccagagtcacggttcgaccgagattccggggagagtgaagaagcagaggaagaagtgggtgagggaacgccgcagagcagcgccctgacagagggcgactatgtgcccgactcccctgccctgttgcccatcgagctcaagcaggagctgcccaagtacctgccggccctgcagggctgccggagcgtcgaggagttccagtgcctgaacaggatcgaggagggcacctatggagtggtctacagagcaaaagacaagaaaacaggtg

SEQ ID NO: 7202 - DNA, 2527 bp, Homo sapiens
  source 1..2527: mol_type = unassigned DNA
acacaggaagtgaggatacttctggcgagcgccggttgctgtttcttctcaggctcagggaccggccgcggccccgtaggggtgagttccgactgggctgttttaactcaaatgggtgatgaaaaggactcttggaaagtgaaaactttagatgaaattcttcaggaaaagaaacgaaggaaggaacaagaggagaaagcagagataaaacgcttaaaaaataacaacgcttcttcggtgaagttcttttgtacttccaaatgtcgcagtctgatgaccgggattccaagcgggattcccttgaggagggggagctgagagatcactgcatggagatcacaataaggaactccccgtatagaagagaagactcaatggaagacagaggagaagaagatgattctttggccatcaaaccaccccagcaaatgtctcggaaagaaaaagttcatcacagaaaagatgaaaagagaaaagaaaaatgtaggcatcatagccattcagcagaaggggggaagcatgctagagtgaaagaaagagagcacgaacgtcggaaacgacatcgagaagaacaggataaagctcgccgggaatgggaaagacagaagagaagggaaatggcaagggagcattccaggagagaaagggaccgcttggagcagttagaaaggaagcgggagcgggagcgcaagatgcgggagcagcagaaggagcagcgggagcagaaggagcgcgagcggcgggcggaggagcggcgcaaggagcgggaggcccgcagggaagtgtctgcacatcaccgaacgatgagagaggactacagcgacaaagtgaaagccagccactggagtcgcagcccgcctcggccgccgcgggagcggttcgagttgggagacggccggaagccagtaaaagaagagaaaatggaagaaagggacctgctgtccgacttacaggacatcagcgacagcgagaggaagaccagctcggccgagtcctcgtcagcggaatcaggctcaggttctgaggaagaagaggaggaggaggaagaggaggaggaggaagggagcaccagtgaagaatcagaggaggaggaggaggaagaggaagaggaggaggaggagaccggcagcaactctgaggaggcatcagagcagtctgccgaagaagtaagtgaggaagaaatgagtgaagatgaagaacgagaaaatgaaaaccacctcttggttgttccagagtcacggttcgaccgagattccggggagagtgaagaagcagaggaagaagtgggtgagggaacgccgcagagcagcgccctgacagagggcgactatgtgcccgactcccctgccctgttgcccatcgagctcaagcaggagctgcccaagtacctgccggccctgcagggctgccggagcgtcgaggagttccagtgcctgaacaggatcgaggagggcacctatggagtggtctacagagcaaaagacaagaaaacagatgaaattgtggctctaaagcggctgaagatggagaaggagaaggagggcttcccgatcacgtccctgagggagatcaacaccatcctcaaggcccagcatcccaacattgtcaccgttagagagattgtggtgggcagcaacatggacaagatctacatcgtgatgaactacgtggagcacgacctcaagagcctgatggagaccatgaaacagcccttcctgccaggggaggtgaagaccctgatgatccagctgctgcggggggtgaaacacctgcacgacaactggatcctgcaccgtgacctcaagacgtccaacctgctgctgagccacgccggcatcctcaaggtgggtgattttgggctggcgcgggagtacggatcccctctgaaggcctacaccccggtcgtggtgacccagtggtaccgcgccccagagctgctgcttggtgccaaggaatactccacggccgtggacatgtggtcagtgggctgcatcttcggggagctgctgactcagaagcctctgttccccgggaattcggaaatcgatcagatcaacaaagtgttcaaggagctggggacccccagtgagaaaatctggcccggctacagtgagctcccagtagtcaaaaagatgaccttcagcgagcacccctacaacaacctccgcaagcgcttcggggctctgctctcagaccagggcttcgacctcatgaacaagttcctgacctacttccccgggaggaggatcagcgctgaggacggcctcaagcatgagtatttccgcgagacccccctccccatcgacccctccatgttccccacgtggcccgccaagagcgagcagcagcgtgtgaagcggggcaccagcccgaggccccctgagggaggcctgggctacagccagctgggtgacgacgacctgaaggagacgggcttccaccttaccaccacgaaccagggggcctctgccgcgggccccggcttcagcctcaagttctgaaggtcagagtggaccccgtcatgggg

SEQ ID NO: 7203 - DNA, 450 bp, Homo sapiens
  source 1..450: mol_type = unassigned DNA
gccgcggccccgtaggggtgagttccgactgggcggaccaggtgtgggagcgcgacgagaactgcgcaccgaggtctttcttccgagcaggcctcggagcggggcggacccgggcccgggggcgagcgacaccctcgcttccgcggacagtctcatcccgcacggaactttgggtggtggaggcggcgggtccaaacgctgtctggagccaacgtctgccaggctgaacctcaagtgtgcgggactgaacccgaggaaatagcccagtgcccgggtcaggtggccttgttcgcgagcacatctcggagcatctccccggtctcaagtgttttaactcaaatgggtgatgaaaaggactcttggaaagtgaaaactttagatgaaattcttcaggaaaagaaacgaaggaaggaacaagaggagaaagcagagataaaacgcttaaaaaat

SEQ ID NO: 7204 - DNA, 2449 bp, Homo sapiens
  source 1..2449: mol_type = unassigned DNA
gatacttctggcgagcgccggttgctgtttcttctcaggctcagggaccggccgcggccccgtagggtgttttaactcaaatgggtgatgaaaaggactcttggaaagtgaaaactttagatgaaattcttcaggaaaagaaacgaaggaaggaacaagaggagaaagcagagataaaacgcttaaaaaattctgatgaccgggattccaagcgggattcccttgaggagggggagctgagagatcactgcatggagatcacaataaggaactccccgtatagaagagaagactcaatggaagacagaggagaagaagatgattctttggccatcaaaccaccccagcaaatgtctcggaaagaaaaagttcatcacagaaaagatgaaaagagaaaagaaaaatgtaggcatcatagccattcagcagaaggggggaagcatgctagagtgaaagaaagagagcacgaacgtcggaaacgacatcgagaagaacaggataaagctcgccgggaatgggaaagacagaagagaagggaaatggcaagggagcattccaggagagaaagggaccgcttggagcagttagaaaggaagcgggagcgggagcgcaagatgcgggagcagcagaaggagcagcgggagcagaaggagcgcgagcggcgggcggaggagcggcgcaaggagcgggaggcccgcagggaagtgtctgcacatcaccgaacgatgagagaggactacagcgacaaagtgaaagccagccactggagtcgcagcccgcctcggccgccgcgggagcggttcgagttgggagacggccggaagccagtaaaagaagagaaaatggaagaaagggacctgctgtccgacttacaggacatcagcgacagcgagaggaagaccagctcggccgagtcctcgtcagcggaatcaggctcaggttctgaggaagaagaggaggaggaggaagaggaggaggaggaagggagcaccagtgaagaatcagaggaggaggaggaggaagaggaagaggaggaggaggagaccggcagcaactctgaggaggcatcagagcagtctgccgaagaagtaagtgaggaagaaatgagtgaagatgaagaacgagaaaatgaaaaccacctcttggttgttccagagtcacggttcgaccgagattccggggagagtgaagaagcagaggaagaagtgggtgagggaacgccgcagagcagcgccctgacagagggcgactatgtgcccgactcccctgccctgttgcccatcgagctcaagcaggagctgcccaagtacctgccggccctgcagggctgccggagcgtcgaggagttccagtgcctgaacaggatcgaggagggcacctatggagtggtctacagagcaaaagacaagaaaacagatgaaattgtggctctaaagcggctgaagatggagaaggagaaggagggcttcccgatcacgtccctgagggagatcaacaccatcctcaaggcccagcatcccaacattgtcaccgttagagagattgtggtgggcagcaacatggacaagatctacatcgtgatgaactacgtggagcacgacctcaagagcctgatggagaccatgaaacagcccttcctgccaggggaggtgaagaccctgatgatccagctgctgcggggggtgaaacacctgcacgacaactggatcctgcaccgtgacctcaagacgtccaacctgctgctgagccacgccggcatcctcaaggtgggtgattttgggctggcgcgggagtacggatcccctctgaaggcctacaccccggtcgtggtgacccagtggtaccgcgccccagagctgctgcttggtgccaaggaatactccacggccgtggacatgtggtcagtgggctgcatcttcggggagctgctgactcagaagcctctgttccccgggaattcggaaatcgatcagatcaacaaagtgttcaaggagctggggacccccagtgagaaaatctggcccggctacagtgagctcccagtagtcaaaaagatgaccttcagcgagcacccctacaacaacctccgcaagcgcttcggggctctgctctcagaccagggcttcgacctcatgaacaagttcctgacctacttccccgggaggaggatcagcgctgaggacggcctcaagcatgagtatttccgcgagacccccctccccatcgacccctccatgttccccacgtggcccgccaagagcgagcagcagcgtgtgaagcggggcaccagcccgaggccccctgagggaggcctgggctacagccagctgggtgacgacgacctgaaggagacgggcttccaccttaccaccacgaaccagggggcctctgccgcgggccccggcttcagcctcaagttctgaaggtcagagtggaccccgtcatgggg

SEQ ID NO: 7205 - DNA, 700 bp, Homo sapiens
  source 1..700: mol_type = unassigned DNA
gactgaacccgaggaaatagcccagtgcccgggtcaggtggccttgttcgcgagcacatctcggagcatctccccggtctcaaggtgcagctgtccagtgtgctagtggcttcacgtagtccaagcggtctttctagcagattctgacagtaaaagcagtgtttgatgagtggcaggtcctgagttaagagcctttaaacggatgatctttaatccgcgatcgatactatcactgttttaactcaaatgggtgatgaaaaggactcttggaaagtgaaaactttagatgaaattcttcaggaaaagaaacgaaggaaggaacaagaggagaaagcagagataaaacgcttaaaaaattctgatgaccgggattccaagcgggattcccttgaggagggggagctgagagatcactgcatggagatcacaataaggaactccccgtatagaagagaagactcaatggaagacagaggagaagaagatgattctttggccatcaaaccaccccagcaaatgtctcggaaagaaaaagttcatcacagaaaagatgaaaagagaaaagaaaaatggaagcatgctagagtgaaagaaagagagcacgaacgtcggaaacgacatcgagaagaacaggataaagctcgccgggaatgggaaagacagaagagaagggaaatggcaagggagcattccaggagag

SEQ ID NO: 7206 - DNA, 2306 bp, Homo sapiens
  source 1..2306: mol_type = unassigned DNA
gtgttttaactcaaatgggtgatgaaaaggactcttggaaagtgaaaactttagatgaaattcttcaggaaaagaaacgaaggaaggaacaagaggagaaagcagagataaaacgcttaaaaaattctgatgaccgggattccaagcgggattcccttgaggagggggagctgagagatcactgcatggagatcacaataaggaactccccgtatagaagagaagactcaatggaagacagaggagaagaagatgattctttggccatcaaaccaccccagcaaatgtctcggaaagaaaaagttcatcacagaaaagatgaaaagagaaaagaaaaatgtaggcatcatagccattcagcagaaggggggaagcatgctagagtgaaagaaagagagcacgaacgtcggaaacgacatcgagaagaacaggataaagctcgccgggaatgggaaagacagaagagaagggaaatggcaagggagcattccaggagagaaagggaccgcttggagcagttagaaaggaagcgggagcgggagcgcaagatgcgggagcagcagaaggagcagcgggagcagaaggagcgcgagcggcgggcggaggagcggcgcaaggagcgggaggcccgcagggaagtgtctgcacatcaccgaacgatgagagaggactacagcgacaaagtgaaagccagccactggagtcgcagcccgcctcggccgccgcgggagcggttcgagttgggagacggccggaagccaggtgaggccaggccggcgcctgcgcagaagccagcacagttaaaagaagagaaaatggaagaaagggacctgctgtccgacttacaggacatcagcgacagcgagaggaagaccagctcggccgagtcctcgtcagcggaatcaggctcaggttctgaggaagaagaggaggaggaggaagaggaggaggaggaagggagcaccagtgaagaatcagaggaggaggaggaggaagaggaagaggaggaggaggagaccggcagcaactctgaggaggcatcagagcagtctgccgaagaagtaagtgaggaagaaatgagtgaagatgaagaacgagaaaatgaaaaccacctcttggttgttccagagtcacggttcgaccgagattccggggagagtgaagaagcagaggaagaagtggggctgccggagcgtcgaggagttccagtgcctgaacaggatcgaggagggcacctatggagtggtctacagagcaaaagacaagaaaacagatgaaattgtggctctaaagcggctgaagatggagaaggagaaggagggcttcccgatcacgtccctgagggagatcaacaccatcctcaaggcccagcatcccaacattgtcaccgttagagagattgtggtgggcagcaacatggacaagatctacatcgtgatgaactacgtggagcacgacctcaagagcctgatggagaccatgaaacagcccttcctgccaggggaggtgaagaccctgatgatccagctgctgcggggggtgaaacacctgcacgacaactggatcctgcaccgtgacctcaagacgtccaacctgctgctgagccacgccggcatcctcaaggtgggtgattttgggctggcgcgggagtacggatcccctctgaaggcctacaccccggtcgtggtgacccagtggtaccgcgccccagagctgctgcttggtgccaaggaatactccacggccgtggacatgtggtcagtgggctgcatcttcggggagctgctgactcagaagcctctgttccccgggaattcggaaatcgatcagatcaacaaagtgttcaaggagctggggacccccagtgagaaaatctggcccggctacagtgagctcccagtagtcaaaaagatgaccttcagcgagcacccctacaacaacctccgcaagcgcttcggggctctgctctcagaccagggcttcgacctcatgaacaagttcctgacctacttccccgggaggaggatcagcgctgaggacggcctcaagcatgagtatttccgcgagacccccctccccatcgacccctccatgttccccacgtggcccgccaagagcgagcagcagcgtgtgaagcggggcaccagcccgaggccccctgagggaggcctgggctacagccagctgggtgacgacgacctgaaggagacgggcttccaccttaccaccacgaaccagggggcctctgccgcgggccccggcttcagcctcaagttctgaaggtcagagtggaccccgtcatgggg

SEQ ID NO: 7207 - DNA, 955 bp, Homo sapiens
  source 1..955: mol_type = unassigned DNA
gcggggcttcgcgtctccttctacggatatctgtggaccttatggaagcaaagactcttggaactgtaacgcccagaaaacctgtcttatctgtcagtgcaagaaaaattaaggacaatgcggctgattggcacaatttaatcctgaagtgggaaaccctcaatgatgcaggttttaccactgcaaataatattgccaacttgaaaatcagtttattgaataaagacaagatagaactagacagcagcagcccagcctcgaaggaaaatgaagaaaaggtgtgtctggaatataacgaggaactggagaagctgtgtgaggaactgcaggccaccttggatgggttgaccaaaatacaggtgaaaatggaaaagctgtcttcaactaccaagggaatttgtgaactagaaaactaccattatggggaggagagtaaacgaccccctctgttccacacgtggcctacaacccatttctatgaggtttcgcataagctcttggagatgtacaggaaggagctgctcctgaagcgcacggtggccaaggagcttgcccacaccggggatcccgacctcaccctgagctacctgtccatgtggctgcaccagccctatgtggagagcgacagcaggctgcatctggagagcatgctgctggagacaggccaccgagctctctgacgtcctgagacggctgcggacactggctccttccacgtctcaccaggcagacagtctgcctaggacccagtgccgcaggcctggatcagaccccaggatcagaccttggggtcttctggccagagcttgtcaccagccccatggcctctccaggcgtgctcatgcccacaacccgcggccagccccacgtggtgctgctcagccttctctgcccctcctgggaatctgtcattcgtgggtgcttcagagtaaaatcaatgagtttctgagcagaa

SEQ ID NO: 7208 - DNA, 845 bp, Homo sapiens
  source 1..845: mol_type = unassigned DNA
agcctagcccgcaggcccctcgcagcctctgcgagctgctcgggagacagttttgccgagcctccgttttttcacatgtgcagtgacagatgaacgggacgatatacgcaaatgagtgtcagcagatccgacatccaaattcaaagactcttggaactgtaacgcccagaaaacctgtcttatctgtcagtgcaagaaaaattaaggacaatgcggctgattggcacaatttaatcctgaagtgggaaaccctcaatgatgcaggttttaccactgcaaataatattgccaacttgaaaatcagtttattgaataaagacaagatagaactagacagcagcagcccagcctcgaaggaaaatgaagaaaaggtgtgtctggaatataacgaggaactggagaagctgtgtgaggaactgcaggccaccttggatgggttgaccaaaatacaggtgaaaatggaaaagctgtcttcaactaccaagggaatttgtgaactagaaaactaccattatggggaggagagtaaacgaccccctctgttccacacgtggcctacaacccatttctatgaggtttcgcataagctcttggagatgtacaggaaggagctgctcctgaagcgcacggtggccaaggagcttgcccacaccggggatcccgacctcaccctgagctacctgtccatgtggctgcaccagccctatgtggagagcgacagcaggctgcatctggagagcatgctgctggagacaggccaccgagctctctgacgtcctgagacggctgcggacactggctccttccacgtctcaccaggcagacagtctgcctaggacccagtg

SEQ ID NO: 7209 - DNA, 572 bp, Homo sapiens
  source 1..572: mol_type = unassigned DNA
ggatatctgtggaccttatggaagcaaagactcttggaactgtaacgcccagaaaacctgtcttatctgtcagtgcaagaaaaattaaggacaatgcggctgattggcacaatttaatcctgaagtgggaaaccctcaatgatgcaggttttaccactgcaaataatattgccaacttgaaaatcagtttattgaataaagacaagatagaactagacagcagcagcccagcctcgaaggaaaatgaagaaaaggtgtgtctggaatataacgaggaactggagaagctgtgtgaggaactgcaggccaccttggatgggttgatgaggtttcgcataagctcttggagatgtacaggaaggagctgctcctgaagcgcacggtggccaaggagcttgcccacaccggggatcccgacctcaccctgagctacctgtccatgtggctgcaccagccctatgtggagagcgacagcaggctgcatctggagagcatgctgctggagacaggccaccgagctctctgacgtcctgagacggctgcggacactggctccttccacgtctcaccag

SEQ ID NO: 7210 - DNA, 2346 bp, Homo sapiens
  source 1..2346: mol_type = unassigned DNA
gcaaatgcgtttccggtggggtgggcggggcttcgcgtctccttctacggatatctgtggaccttatggaagcaaagactcttggaactgtaacgcccagaaaacctgtcttatctgtcagtgcaagaaaaattaaggacaatgcggctgattggcacaatttaatcctgaagtgggaaaccctcaatgatgcaggttttaccactgcaaataatattgccaacttgaaaatcagtttattgaataaagacaagatagaactagacagcagcagcccagcctcgaaggaaaatgaagaaaaggtgtgtctggaatataacgaggaactggagaagctgtgtgaggaactgcaggccaccttggatgggttgaccaaaatacaggtgaaaatggaaaagctgtcttcaactaccaagggaatttgtgaactagaaaactaccattatggggaggagagtaaacgaccccctctgttccacacgtggcctacaacccatttctatgaggtttcgcataagctcttggagatgtacaggaaggagctgctcctgaagcgcacggtggccaaggagcttgcccacaccggggatcccgacctcaccctgagctacctgtccatgtggctgcaccagccctatgtggagagcgacagcaggctgcatctggagagcatgctgctggagacaggccaccgagctctctgacgtcctgagacggctgcggacactggctccttccacgtctcaccaggcagacagtctgcctaggacccagtgccgcaggcctggatcagaccccaggatcagaccttggggtcttctggccagagcttgtcaccagccccatggcctctccaggcgtgctcatgcccacaacccgcggccagccccacgtggtgctgctcagccttctctgcccctcctgggaatctgtcattcgtgggtgcttcagagtaaaatcaatgagtttctgagcagaatgagatcccaggagggcactcatggtggtttatgggactctggactcctgagaagcggccttgagtctacaggatacatctacagcctgacctgaccacccaacactcccaggcagccgcggcttgctcccctgctggccatttccagcctgctagaaaacccacctttttgttcctaccgaccgtggctttgagatcaagtgagggtaggaaatgcccctggtcactaaaagggctgtaggaaaggctggctctctgagaatacagctgccctccagggcaggacctggaaggagcacagcgccagggcgacacatggtcacaagcccagctctgtccctgagcagcgtgctctctgcttggggtctctcctgaccgtctctgcaaggcgtggggagagacctgctgctccctttgaatgctttcttccacatgtggacaaatggcccttcccttccttccccgtaacacagcccacggaaatattgaagacatgccactaagtgactttccaagtgggacatcaaagaactgggcttctaccctgagcagcatcttgctgtggacctcaagtaagtcaccccatcatttatgcctcaccttcctcatctgtaaaatgtgaggagagccaggcaccgtggcgcacgcctgtagtcccagctactcaggaggccgaggcaggaggatcgcttaagcctgggagttaaaggctgcaatgagctatgattgcaccactgcactccagcctgggcaacagagtgaaaactcatctctaaaaaaaaaaatcaggccggggccgggcacagtggctcacgcctgtaatcccagcactttgggaggccgaggcaggcagatcacgaggtcaagagatcgagaccatcctggccaacatggtgaaacctcatctctactaaaaatacaaaaattagccgggtgtggtggcggacacctgtagtcccagctactcggcaggctgaggcaggagaatcacttgaacccaggaagcggagggtgcagtgagccgagattgcaccattgcacttcagcctggcgacagcaagactccatctcaaaaaaaaacaatcaggcccagtgcagtggctcacacctataatcccagcactttgggatgctgaggcgcgtagatcacctgaggtcaggagttcaagatcagcctgaccaccatggagataccccgtctctactaaaaatacaaaatgatccaggtgtgatggcacatgcctgtaatcccagctacttgggaggctgaggcaggagaattgcttgaaccctgtggtggaggttgcggtgagccaagatcgagccattgcactccagcttgggcaacaagaccaaaactccatctc

SEQ ID NO: 7211 - DNA, 1158 bp, Homo sapiens
  source 1..1158: mol_type = unassigned DNA
ccacatggaagctggaggagcaacgggagcgctgggcgtggggtgcaaattgcccggtgccttctgtttcccaggcagctctgtggccatggatatgttccagaaggtagagaagatcggagagggcacctatggggtggtgtacaaggccaagaacagggagacagggcagctggtggccctgaagaagatcagactggatttggagatggagggggtcccaagcactgccatcagggagatctcgctgctcaaggaactgaagcaccccaacatcgtccgactgctggacgtggtgcacaacgagaggaagctctatctggtgtttgagttcctcagccaggacctgaagaagtacatggactccaccccaggctcagagctccccctgcacctcatcaagagctacctcttccagctgctgcagggggtgagtttctgccactcacatcgggtcatccaccgagacctgaagccccagaacctgctcatcaatgagttgggtgccatcaagctggctgacttcggcctggctcgcgccttcggggtgcccctgcgcacctacacccatgaggtggtgacactgtggtatcgcgcccccgagattctcttgggcagcaagttctataccacagctgtggatatctggagcattggttgcatctttgcagagatggtgactcgaaaagccctgtttcctggtgactctgagattgaccagctctttcgtatctttcgtatgctggggacacccagcgaagacacatggcccggggtcacccagctgcctgactataagggcagcttccctaagtggaccaggaagggactggaagagattgtgcccaatctggagccagagggcagggacctgctcatgcaactcctgcagtatgaccccagccagcggatcacagccaagactgccctggcccacccgtacttctcatcccctgagccctccccagctgcccgccagtatgtgctgcagcgattccgccattgagaatgtcaaggccacactcagatcctttctcgagcagctgctgccccagctgcctcctacccattgccaagagaggatgcatctggggagagcaaagcactaaggaattcagcatcagcctgcagagggctgagtctgggttagtcctgccc

SEQ ID NO: 7212 - DNA, 1568 bp, Homo sapiens
  source 1..1568: mol_type = unassigned DNA
gcccttcctggccgccatgtgtacccagagcctgggactggctgggctgggcagtgacccaggcagctctgtggccatggatatgttccagaaggtagagaagatcggagagggcacctatggggtggtgtacaaggccaagaacagggagacagggcagctggtggccctgaagaagatcagactggatttggagatggagggggtcccaagcactgccatcagggagatctcgctgctcaaggaactgaagcaccccaacatcgtccgactgctggacgtggtgcacaacgagaggaagctctatctggtgtttgagttcctcagccaggacctgaagaagtacatggactccaccccaggctcagagctccccctgcacctcatcaagagctacctcttccagctgctgcagggggtgagtttctgccactcacatcgggtcatccaccgagacctgaagccccagaacctgctcatcaatgagttgggtgccatcaagctggctgacttcggcctggctcgcgccttcggggtgcccctgcgcacctacacccatgaggtggtgacactgtggtatcgcgcccccgagattctcttgggcagcaagttctataccacagctgtggatatctggagcattggttgcatctttgcagagatggtgactcgaaaagccctgtttcctggtgactctgagattgaccagctctttcgtatctttcgtatgctggggacacccagcgaagacacatggcccggggtcacccagctgcctgactataagggcagcttccctaagtggaccaggaagggactggaagagattgtgcccaatctggagccagagggcagggacctgctcatgcaactcctgcagtatgaccccagccagcggatcacagccaagactgccctggcccacccgtacttctcatcccctgagccctccccagctgcccgccagtatgtgctgcagcgattccgccattgagaatgtcaaggccacactcagatcctttctcgagcagctgctgccccagctgcctcctacccattgccaagagaggatgcatctggggagagcaaagcactaaggaattcagcatcagcctgcagagggctgagtctgggttagtcctgcccgcaggttagcgagatcctgtgttgttttttgggttggacggtgccgtttcaaaatagaggcacagatgctccatgcacgaggggtccccgggcactggaacaagtgccaagttgaaggcagggggcctgccagagctgggtgtgggtattcaggccctcacctgccctgcctgcagggccagaccctgaggaaagggcgccccctgctggtctttttggatttaaaatgtttgggggaagagttgagttccagttcagtcccaagttaaacaggagggagtgagggagaggagagagggcgttccccggatcccaggagagctgggctatgactgcaataaggagttgttccttcacctgagatgtgcttcttttggttcatttctggcttgacaacaataaataaacgtggtatgttcctg

SEQ ID NO: 7213 - DNA, 1758 bp, Homo sapiens
  source 1..1758: mol_type = unassigned DNA
actaaaatccagcctcgaaggggcacagctgttctcccagccctgcggtcagctgttccctgtgaggtcatcatcgctcacaggcattccccagtcaattctggggtcactaggtggcttggggagaggtggaaacccgtgctgaggtcgtcaagaggccgttgggaacacaatgccaccaaccaggtcagcgctgggccgccagtgcccgggatctaggccgccaaaccccaaacccctaaccgagagcgctccgcccccatttccgctgcattctggaacgcgtagtcccggagcggcccttttcaagagggctgggagcacataaaaggaataacaacagcggggcacactgggaaccacggcgccgcggcggggcgcccggaaaacggacacgcgttgcttcctgggacttgaagtccaaggtttgcctccgcggtagaaacggagccctggagtcgagtgctgcagagagcgtgagcgcagacggctgggggttgtagtcttcttgtcctcggtctcgggcattgcggggagacctagtcgttttaggactacaagccccagaaggccctgcgcgggcagacggggcggggctggaggctcaggtgccgcctcctctgcaacgccggggccagagtcttaaaaccgagggcccgcaggggtccccgcggccgccgcgatgcagaaatacgagaaactggaaaagattggggaaggcacctacggaactgtgttcaaggccaaaaaccgggagactcatgagatcgtggctctgaaacgggtgaggctggatgacgatgatgagggtgtgccgagttccgccctccgggagatctgcctactcaaggagctgaagcacaagaacatcgtcaggcttcatgacgtcctgcacagcgacaagaagctgactttggtttttgaattctgtgaccaggacctgaagaagtattttgacagttgcaatggtgacctcgatcctgagattgtaaagtcattcctcttccagctactaaaagggctgggattctgtcatagccgcaatgtgctacacagggacctgaagccccagaacctgctaataaacaggaatggggagctgaaattggctgattttggcctggctcgagcctttgggattcccgtccgctgttactcagctgaggtggtcacactgtggtaccgcccaccggatgtcctctttggggccaagctgtactccacgtccatcgacatgtggtcagccggctgcatctttgcagagctggccaatgctgggcggcctctttttcccggcaatgatgtcgatgaccagttgaagaggatcttccgactgctggggacgcccaccgaggagcagtggccctctatgaccaagctgccagactataagccctatccgatgtacccggccacaacatccctggtgaacgtcgtgcccaaactcaatgccacagggagggatctgctgcagaaccttctgaagtgtaaccctgtccagcgtatctcagcagaagaggccctgcagcacccctacttctccgacttctgtccgccctaggccccgggacccccggcctccaggctggggcctggcctatttaagccccctcttgagaggggtgagacagtgggggtgcctggtgcgctgtgctccagcagtgctgggcccagccggggtggggtgcctgagcccgaatttctcactccctttgtggactttatttaatttcataaattggctcctttcccacagtc

SEQ ID NO: 7214 - DNA, 783 bp, Homo sapiens
  source 1..783: mol_type = unassigned DNA
atgcagaaatacgagaaactggaaaagattggggaaggcacctacggaactgtgttcaaggccaaaaaccgggagactcatgagatcgtggctctgaaacgggtgaggctggatgacgatgatgagggtgtgccgagttccgccctccgggagatctgcctactcaaggagctgaagcacaagaacatcgtcaggcttcatgacgtcctgcacagcgacaagaagctgactttggtttttgaattctgtgaccaggacctgaagaagtattttgacagttgcaatggtgacctcgatcctgagattgtaaagaatggggagctgaaattggctgattttggcctggctcgagcctttgggattcccgtccgctgttactcagctgaggtggtcacactgtggtaccgcccaccggatgtcctctttggggccaagctgtactccacgtccatcgacatgtggtcagccggctgcatctttgcagagctggccaatgctgggcggcctctttttcccggcaatgatgtcgatgaccagttgaagaggatcttccgactgctggggacgcccaccgaggagcagtggccctctatgaccaagctgccagactataagccctatccgatgtacccggccacaacatccctggtgaacgtcgtgcccaaactcaatgccacagggagggatctgctgcagaaccttctgaagtgtaaccctgtccagcgtatctcagcagaagaggccctgcagcacccctacttctccgacttctgtccgccctag

SEQ ID NO: 7215 - DNA, 2500 bp, Homo sapiens
  source 1..2500: mol_type = unassigned DNA
agctcaggattagagcagcggagccgcctagcagccaccttcccccgccagtccgcgcgcccgggccggggctaggccccccaccgccgggtcccccggggctgcagtagcagcggcgccgcccgcggctcccgctggggcctgggcgccggccccgctctgcaggatgggcacagtgctgtctctttcgcctgcctcctcggccaagggccggaggcccggcgggctgcccgaggagaagaagaaggcgccgcccgcgggggacgaggcgctggggggctacggggcgccgccagtgggcaagggcggcaaaggcgagagccgactcaagcggccgtccgtgctcatctcggcgctcacctggaagcgcctggtggccgcgtccgccaagaagaagaaaggcagcaagaaggtgacacccaagccggcatccacgggccccgaccccctggtccagcaacgcaaccgcgagaaccttctccgcaagggccgggatccccccgacggcggcggcaccgccaagcccctggcggtgccagtgcccaccgtgcccgcggctgccgccacctgcgagccaccgtcggggggcagcgcggccgctcagccgccgggctcgggcgggggaaagcctccgccgccgcctcccccagccccgcaggtggcgccgccggtgcctggcggctcgccgcggcgggtcatcgtgcaggcgtccaccggcgagctgctgcgctgtctgggcgacttcgtgtgccgacgctgctatcgcctcaaggagctgagcccgggcgagctggtgggctggttccgcggtgtggaccgctcgctgctgctgcagggctggcaagaccaggccttcattacgcctgcaaacctggtgttcgtgtacctgctgtgccgcgagtcgctgcgtggggacgagctggcgtcggccgccgagctgcaggccgccttcctcacctgcctctacctcgcctactcctacatgggcaacgagatctcctacccactcaagcccttcctcgtggagcccgacaaggagcgcttctggcagcgctgcctgcgcctcatccagcggctcagcccgcagatgctgcggctcaacgccgacccccacttcttcacgcaggtctttcaagacctcaagaacgagggcgaggccgccgccagcggcgggggcccaccgagcgggggcgcgcccgccgcctcctcggccgccagggacagctgcgcggccggaaccaagcactggactatgaacctggaccgctagggatacccaggggccgcgcccatcccccgccccagcccctgacacacactcggaccccccgggaccacaaagccaccgccgctgttaccgccgctcagcgccccggctgggcggaggaggagacgcccatgcccctcaggggaaagtggagaccgggacaccagaggccgcggtgtttggatttgctgggcgtggagtggggacggaagatgagcgcgggaaaggcactccaacctcactcttcccgtctgtctgcgcccccatttctccatttctgccggggtctcccccttcccttcagcccattccccctcggttttatccatttccttgcctcctttttgtgtcttcatttttcctcctgtctgcattcctctctctctctctccctctctctcctgttcctctctttcttcctccctctccctgcctttccattttccgttccttgggtttgtgtgtctgcatctccatcttaccccttgcctgactgtaccccgtagacccctgtttctcctcctgcacctgtgtccccatctgcccttcttgttgctcctgtcatgtgtcaccatcttccctcctgtctgccttcttcctccacttgtgtcagcttgcatttttttattcctgactgagtcaccacacccctctcccctgatcaaagggaatattagtttttaatttggatcgactgaggtgccaggagaaactgcagtcccaggtatccagacagccaccaggatggtccctcgccccacccccaccgcctctccccaccttttccaacgtgttgcatgctgggagctggggggtgtgggggaaggggctgccggcttctttcaggaggctgaggtttggaggcaaaatcaacctgggagaccaccccggccgcggcgcctcagtggacaggtgggaggaaaagaaaacttcttaccttggaggagggacatcccgcttccttatccttagcttttttgttgctcctccccactgccccttttaatttatttggttgtttgcggagggaggggggaggggggtaggctgggccgggaactgtccgaggtgctgagctggggcgggaccggaatcctcccggtagggtaccagggactgagttgggcctggggccgtgtccaaggtgccaatgatgcgggccgacagagcgggccgcactgtctgtctgtccgtctgtcccggaaagaactataaagcgctggaagcgcctgc

SEQ ID NO: 7216 - DNA, 2127 bp, Homo sapiens
  source 1..2127: mol_type = unassigned DNA
ggaactacgcagagccagaccagcgggaccacagaatgggctgaggcggcggcggctgtttggataaagtcaacagcgggacgtggggcgtgacgccgtagtaaaagcccagcttgaaaatggagatgtatgaaacccttggaaaagtgggagagggaagttacggaacagtcatgaaatgtaaacataagaatactgggcagatagtggccattaagatattttatgagagaccagaacaatctgtcaacaaaattgcgatgagagaaataaagtttctaaagcaatttcatcacgaaaacctggtcaatctgattgaagtttttagacagaaaaagaaaattcatttggtatttgaatttattgaccacacagtattagatgagttacaacattattgtcatggactagagagtaagcgacttagaaaatacctcttccagatccttcgagcaattgactatcttcacagtaataatatcattcatcgagatataaaacctgagaatattttagtatcccagtcaggaattactaagctctgtgattttggttttgcacgaacactagcagctcctggggacatttatacggactatgtggccacacgctggtatagagctcccgaattagtattaaaagatacttcttatggaaaacctgtggatatctgggctttgggctgtatgatcattgagatggccactggaaatccctatcttcctagtagttctgatttggatttactccataaaattgttttgaaagtgggcaatttgtcacctcacttgcagaatatcttttccaagagccccatttttgctggggtagttcttcctcaagttcaacaccccaaaaatgcaagaaaaaaatatccaaagcttaatggattgttggcagatatagttcatgcttgtttacaaattgatcctgctgacaggatatcatctagtgatcttttgcatcatgagtattttactagagatggatttattgaaaaattcatgccagaactgaaagctaaattactgcaggaagcaaaagtcaattcattaataaagccaaaagagagttctaaagaaaatgaactcaggaaagatgaaagaaaaacagtttataccaatacactgctaagtagttcagttttgggaaaggaaatagaaaaagagaaaaagcccaaggagatcaaagtcagagttattaaagtcaaaggaggaagaggagatatctcagaaccaaaaaagaaagagtatgaaggtggacttggtcaacaggatgcaaatgaaaatgttcatcctatgtctccagatacaaaacttgtaaccattgaaccaccaaaccctatcaatcccagcactaactgtaatggcttgaaagaaaatccacattgcggaggttctgtgacaatgccacccatcaatctaactaacagtaatttgatggctgcaaatctcagttcaaatctctttcaccccagtgtgaggttaactgaaagagcaaaaaagagacgcacttcttcacaatctattggacaagttatgcctaatagcaggcaagaggatccaggtcctattcaaagccaaatggagaagggtatatttaatgagcgaacaggtcacagtgaccaaatggcaaatgagaacaaaaggaagctgaatttttccagatctgacaggaaagaattccattttccagaattgcctgtcacaatacagtcaaaagatacaaaaggaatggaagttaaacagataaaaatgctgaagagggagtcaaagaaaacagagtcatctaagataccaactttacttaacgtggatcaaaatcaagaaaaacaagagggtggagatggccattgcgaggggaagaatttgaagagaaacaggttttttttctggtagtgtcttttcttttacatagtccaaaaaatacaagatgacaactcttcccgttttatttatctacaatagaagtgtgatgtgagttgttgttaagacagccatccatgtgcatgagcatcatccagctttttttgttagcaaaacatttactgttttcttttcccttttaagactctgttgatgtgataatttgatttggaattataaagtcatctcttctctgcctact

SEQ ID NO: 7217 - DNA, 1619 bp, Homo sapiens
  source 1..1619: mol_type = unassigned DNA
ggaactacgcagagccagaccagcgggaccacagaatgggctgaggcggcggcggctgtttggataaagtcaacagcgggacgtggggcgtgacgccgtagtaaaagcccagcttgaaaatggagatgtatgaaacccttggaaaagtgggagagggaagttacggaacagtcatgaaatgtaaacataagaatactgggcagatagtggccattaagatattttatgagagaccagaacaatctgtcaacaaaattgcgatgagagaaataaagtttctaaagcaatttcatcacgaaaacctggtcaatctgattgaagtttttagacagaaaaagaaaattcatttggtatttgaatttattgaccacacagtattagatgagttacaacattattgtcatggactagagagtaagcgacttagaaaatacctcttccagatccttcgagcaattgactatcttcacagtaataatatcattcatcgagatataaaacctgagaatattttagtatcccagtcaggaattactaagctctgtgattttggttttgcacgaacactagcagctcctggggacatttatacggactatgtggccacacgctggtatagagctcccgaattagtattaaaagatacttcttatggaaaacctgtggatatctgggctttgggctgtatgatcattgagatggccactggaaatccctatcttcctagtagttctgatttggatttactccataaaattgttttgaaagtgggcaatttgtcacctcacttgcagaatatcttttccaagagccccatttttgctggggtagttcttcctcaagttcaacaccccaaaaatgcaagaaaaaaatatccaaagcttaatggattgttggcagatatagttcatgcttgtttacaaattgatcctgctgacaggatatcatctagtgatcttttgcatcatgagtattttactagagatggatttattgaaaaattcatgccagaactgaaagctaaattactgcaggaagcaaaagtcaattcattaataaagccaaaagagagttctaaagaaaatgaactcaggaaagatgaaagaaaaacagtttataccaatacactgctaagtagttcagttttgggaaaggaaatagaaaaagagaaaaagcccaaggagatcaaagtcagagttattaaagtcaaaggaggaagaggagatatctcagaaccaaaaaagaaagagtatgaaggtggacttggtcaacaggatgcaaatgaaaatgttcatcctatgtctccagatacaaaacttgtaaccattgaaccaccaaaccctatcaatcccagcactaactgtaatggcttgaaagaaaatccacattgcggaggttctgtgacaatgccacccatcaatctaactaacagtaatttgatggctgcaaatctcagttcaaatctctttcaccccagtgtgaggtgagctgtaacagagaagaaacctaaataatacaacattcctgtataatggtatttcaaagaatcgtgttcatagtgtctgtatgtaaactgaacttgaagaaaatatattgaaattaaagctgtataatgggcc

SEQ ID NO: 7218 - DNA, 1417 bp, Homo sapiens
  source 1..1417: mol_type = unassigned DNA
gaacgggtcacgtgagcgcctcgcctggatgtgagtttcagccagacctgtggatatctgggctttgggctgtatgatcattgagatggccactggaaatccctatcttcctagtagttctgatttggatttactccataaaattgttttgaaagtgggcaatttgtcacctcacttgcagaatatcttttccaagagccccatttttgctggggtagttcttcctcaagttcaacaccccaaaaatgcaagaaaaaaatatccaaagcttaatggattgttggcagatatagttcatattcatgccagaactgaaagctaaattactgcaggaagcaaaagtcaattcattaataaagccaaaagagagttctaaagaaaatgaactcaggaaagatgaaagaaaaacagtttataccaatacactgctaagtagttcagttttgggaaaggaaatagaaaaagagaaaaagcccaaggagatcaaagtcagagttattaaagtcaaaggaggaagaggagatatctcagaaccaaaaaagaaagagtatgaaggtggacttggtcaacaggatgcaaatgaaaatgttcatcctatgtctccagatacaaaacttgtaaccattgaaccaccaaaccctatcaatcccagcactaactgtaatggcttgaaagaaaatccacattgcggaggttctgtgacaatgccacccatcaatctaactaacagtaatttgatggctgcaaatctcagttcaaatctctttcaccccagtgtgaggttaactgaaagagcaaaaaagagacgcacttcttcacaatctattggacaagttatgcctaatagcaggcaagaggatccaggtcctattcaaagccaaatggagaagggtatatttaatgagcgaacaggtcacagtgaccaaatggcaaatgagaacaaaaggaagctgaatttttccagatctgacaggaaagaattccattttccagaattgcctgtcacaatacagtcaaaagatacaaaaggaatggaagttaaacagataaaaatgctgaagagggagtcaaagaaaacagagtcatctaagataccaactttacttaacgtggatcaaaatcaagaaaaacaagagtttattcccttatctctgctgtctgcctgctgtcctattttcacaaatatttgctctcagctaactatcaggtacgtctttatcagcggcatgaagacagaccaatacagtgaattggtaccagtagagtggggcattgctgaaaagatacccaaaaatgtggaagcaactttggaactgggtaacaggcagaggtttgaacagtttggagagctcagaagaagacaggaaaatgtgggaaagtttggaactttctagagacttgttgaatggctttgacc

SEQ ID NO: 7219 - DNA, 2160 bp, Homo sapiens
  source 1..2160: mol_type = unassigned DNA
ctacgcagagccagaccagcgggaccacagaatgggctgaggcggcggcggctgtttggataaagtcaacagcgggacgtggggcgtgacgccgtagtaaaagcccagcttgaaaatggagatgtatgaaacccttggaaaagtgggagagggaagttacggaacagtcatgaaatgtaaacataagaatactgggcagatagtggccattaagatattttatgagagaccagaacaatctgtcaacaaaattgcgatgagagaaataaagtttctaaagcaatttcatcacgaaaacctggtcaatctgattgaagtttttagacagaaaaagaaaattcatttggtatttgaatttattgaccacacagtattagatgagttacaacattattgtcatggactagagagtaagcgacttagaaaatacctcttccagatccttcgagcaattgactatcttcacagtaataatatcattcatcgagatataaaacctgagaatattttagtatcccagtcaggaattactaagctctgtgattttggttttgcacgaacactagcagctcctggggacatttatacggactatgtggccacacgctggtatagagctcccgaattagtattaaaagatacttcttatggaaaacctgtggatatctgggctttgggctgtatgatcattgagatggccactggaaatccctatcttcctagtagttctgatttggatttactccataaaattgttttgaaagtgggcaatttgtcacctcacttgcagaatatcttttccaagagccccatttttgctggggtagttcttcctcaagttcaacaccccaaaaatgcaagaaaaaaatatccaaagcttaatggattgttggcagatatagttcatgcttgtttacaaattgatcctgctgacaggatatcatctagtgatcttttgcatcatgagtattttactagagatggatttattgaaaaattcatgccagaactgaaagctaaattactgcaggaagcaaaagtcaattcattaataaagccaaaagagagttctaaagaaaatgaactcaggaaagatgaaagaaaaacagtttataccaatacactgctaagtagttcagttttgggaaaggaaatagaaaaagagaaaaagcccaaggagatcaaagtcagagttattaaagtcaaaggaggaagaggagatatctcagaaccaaaaaagaaagagtatgaaggtggacttggtcaacaggatgcaaatgaaaatgttcatcctatgtctccagatacaaaacttgtaaccattgaaccaccaaaccctatcaatcccagcactaactgtaatggcttgaaagaaaatccacattgcggaggttctgtgacaatgccacccatcaatctaactaacagtaatttgatggctgcaaatctcagttcaaatctctttcaccccagtgtgaggttaactgaaagagcaaaaaagagacgcacttcttcacaatctattggacaagttatgcctaatagcaggcaagaggatccaggtcctattcaaagccaaatggagaagggtatatttaatgagcgaacaggtcacagtgaccaaatggcaaatgagaacaaaaggaagctgaatttttccagatctgacaggaaagaattccattttccagaattgcctgtcacaatacagtcaaaagatacaaaaggaatggaagttaaacagataaaaatgctgaagagggagtcaaagaaaacagagtcatctaagataccaactttacttaacgtggatcaaaatcaagaaaaacaagagaatacaggaaatgcacaaactgaaaggaagaagaacttgccagatgtagagtagaaaatgcagcagctgaaaattcagggaatcccagaatcactgtatggttttttaaaaatcctttttattaatgttacatacacaaaaatgctaactagataattttacaggtatatcgtaaatcctgttagttatatgtacattcacctaaatttgtttttaaatttattaatctttaaattattcatgttttcttaatttgaacatgaatttataaaaactacctgactggtacatcctaataaaattgcagcttacatttagtcatataa

SEQ ID NO: 7220 - DNA, 1501 bp, Homo sapiens
  source 1..1501: mol_type = unassigned DNA
atggagatgtatgaaacccttggaaaagtgggagagggaagttacggaacagtcatgaaatgtaaacataagaatactgggcagatagtggccattaagatattttatgagagaccagaacaatctgtcaacaaaattgcgatgagagaaataaagtttctaaagcaatttcatcacgaaaacctggtcaatctgattgaagtttttagacagaaaaagaaaattcatttggtatttgaatttattgaccacacagtattagatgagttacaacattattgtcatggactagagagtaagcgacttagaaaatacctcttccagatccttcgagcaattgactatcttcacagtaataatatcattcatcgagatataaaacctgagaatattttagtatcccagtcaggaattactaagctctgtgattttggttttgcacgaacactagcagctcctggggacatttatacggactatgtggccacacgctggtatagagctcccgaattagtattaaaagatacttcttatggaaaacctgtggatatctgggctttgggctgtatgatcattgagatggccactggaaatccctatcttcctagtagttctgatttggatttactccataaaattgttttgaaagtgggcaatttgtcacctcacttgcagaatatcttttccaagagccccatttttgctggggtagttcttcctcaagttcaacaccccaaaaatgcaagaaaaaaatatccaaagcttaatggattgttggcagatatagttcatgcttgtttacaaattgatcctgctgacaggatatcatctagtgatcttttgcatcatgagtattttactagagatggatttattgaaaaattcatgccagaactgaaagctaaattactgcaggaagcaaaagtcaattcattaataaagccaaaagagagttctaaagaaaatgaactcaggaaagatgaaagaaaaacagtttataccaatacactgctaagtagttcagttttgggaaaggaaatagaaaaagagaaaaagcccaaggagatcaaagtcagagttattaaagtcaaaggaggaagaggagatatctcagaaccaaaaaagaaagagtatgaaggtggacttggtcaacaggatgcaaatgaaaatgttcatcctatgtctccagatacaaaacttgtaaccattgaaccaccaaaccctatcaatcccagcactaactgtaatggcttgaaagaaaatccacattgcggaggttctgtgacaatgccacccatcaatctaactaacagtaatttgatggctgcaaatctcagttcaaatctctttcaccccagtgtgaggtgagctgtaacagagaagaaacctaaataatacaacattcctgtataatggtatttcaaagaatcgtgttcatagtgtctgtatgtaaactgaacttgaagaaaatatattgaaattaaagctgtataatgggcca

SEQ ID NO: 7221 - DNA, 1405 bp, Homo sapiens
  source 1..1405: mol_type = unassigned DNA
agaacgggtcacgtgagcgcctcgcctggatgtgagtttcagccagacctgtggatatctgggctttgggctgtatgatcattgagatggccactggaaatccctatcttcctagtagttctgatttggatttactccataaaattgttttgaaagtgggcttgtttacaaattgatcctgctgacaggatatcatctagtgatcttttgcatcatgagtattttactagagatggatttattgaaaaattcatgccagaactgaaagctaaattactgcaggaagcaaaagtcaattcattaataaagccaaaagagagttctaaagaaaatgaactcaggaaagatgaaagaaaaacagtttataccaatacactgctaagtagttcagttttgggaaaggaaatagaaaaagagaaaaagcccaaggagatcaaagtcagagttattaaagtcaaaggaggaagaggagatatctcagaaccaaaaaagaaagagtatgaaggtggacttggtcaacaggatgcaaatgaaaatgttcatcctatgtctccagatacaaaacttgtaaccattgaaccaccaaaccctatcaatcccagcactaactgtaatggcttgaaagaaaatccacattgcggaggttctgtgacaatgccacccatcaatctaactaacagtaatttgatggctgcaaatctcagttcaaatctctttcaccccagtgtgaggttaactgaaagagcaaaaaagagacgcacttcttcacaatctattggacaagttatgcctaatagcaggcaagaggatccaggtcctattcaaagccaaatggagaagggtatatttaatgagcgaacaggtcacagtgaccaaatggcaaatgagaacaaaaggaagctgaatttttccagatctgacaggaaagaattccattttccagaattgcctgtcacaatacagtcaaaagatacaaaaggaatggaagttaaacagataaaaatgctgaagagggagtcaaagaaaacagagtcatctaagataccaactttacttaacgtggatcaaaatcaagaaaaacaagaggtacgtctttatcagcggcatgaagacagaccaatacagtgaattggtaccagtagagtggggcattgctgaaaagatacccaaaaatgtggaagcaactttggaactgggtaacaggcagaggtttgaacagtttggagagctcagaagaagacaggaaaatgtgggaaagtttggaactttctagagacttgttgaatggctttgaccagaagcttgatcatgatatggacaataaaatccaagctgaggtggtctcagatagagatgaggaacttgttgggaactggagcaaaggtgactcttgttatgttttagc

SEQ ID NO: 7222 - DNA, 3459 bp, Homo sapiens
  source 1..3459: mol_type = unassigned DNA
acctcaggactctttagagctctgagtgagtggggtgggggagttggaggaggaagaccctacaggaagttgagctgtactctccaacaggcgagcacatggtcgtctcctctctcccttcagggagtcatttaatacttcatgattagaacaaatatgtgaaagttcccaccaaccagtgagaatttcttccttcagacggttttggatcttactgcacagctttctgagaagttcttttggtgccatgttttgtggcttgcatcaaaagaggagtttgtcttcatgaagattcctaacattggtaatgtgatgaataaatttgagatccttggggttgtaggtgaaggagcctatggagttgtacttaaatgcagacacaaggaaacacatgaaattgtggcgatcaagaaattcaaggacagtgaagaaaatgaagaagtcaaagaaacgactttacgagagcttaaaatgcttcggactctcaagcaggaaaacattgtggagttgaaggaagcatttcgtcggaggggaaagttgtacttggtgtttgagtatgttgaaaaaaatatgctcgaattgctggaagaaatgccaaatggagttccacctgagaaagtaaaaagctacatctatcagctaatcaaggctattcactggtgccataagaatgatattgtccatcgagatataaaaccagaaaatctcttaatcagccacaatgatgtcctaaaactgtgtgactttggttttgctcgtaatctgtcagaaggcaataatgctaattacacagagtacgttgccaccagatggtatcggtccccagaactcttacttggcgctccctatggaaagtccgtggacatgtggtcggtgggctgtattcttggggagcttagcgatggacagcctttatttcctggagaaagtgaaattgaccaactttttactattcagaaggtgctaggaccacttccatctgagcagatgaagcttttctacagtaatcctcgcttccatgggctccggtttccagctgttaaccatcctcagtccttggaaagaagataccttggaattttgaatagtgttctacttgacctaatgaagaatttactgaagttggacccagctgacagatacttgacagaacagtgtttgaatcaccctacatttcaaacccagagacttctggatcgttctccttcaaggtcagcaaaaagaaaaccttaccatgtggaaagcagcacattgtctaatagaaaccaagccggcaaaagtactgctttgcagtctcaccacagatctaacagcaaggacatccagaacctgagtgtaggcctgccccgggctgacgaaggtctccctgccaatgaaagcttcctaaatggaaaccttgctggagctagtcttagtccactgcacaccaaaacctaccaagcaagcagccagcctgggtctaccagcaaagatctcaccaacaacaacataccacaccttcttagcccaaaagaagccaagtcaaaaacagagtttgattttaatattgacccaaagccttcagaaggcccagggacaaagtacctcaagtcaaacagcagatctcagcagaaccgccactcattcatggaaagctctcaaagcaaagctgggacactgcagcccaatgaaaagcagagtcggcatagctatattgacacaattccccagtcctctaggagtccctcctacaggaccaaggccaaaagccatggggcactgagtgactccaagtctgtgagcaacctttctgaagccagggcccaaattgcggagcccagtaccagtaggtacttcccatctagctgcttagacttgaattctcccaccagcccaacccccaccagacacagtgacacgagaactttgctcagcccttctggaagaaataaccgaaatgagggaacgctggactcacgtcgaaccacaaccagacattctaagacgatggaggaattgaagctgccggagcacatggacagtagccattcccattcactgtctgcacctcacgaatctttttcttatggactgggctacaccagccccttttcttcccagcaacgtcctcataggcattctatgtatgtgacccgtgacaaagtgagagccaagggcttggatggaagcttgagcatagggcaagggatggcagctagagccaacagcctgcaactcttgtcaccccagcctggagaacagctccctccagagatgactgtggcaagatcttcggtcaaagagacctccagagaaggcacctcttccttccatacacgccagaagtctgagggtggagtgtatcatgacccacactctgatgatggcacagcccccaaagaaaatagacacctatacaatgatcctgtgccaaggagagttggtagcttttacagagtgccatctccacgtccagacaattctttccatgaaaataatgtgtcaactagagtttcttctctaccatcagagagcagttctggaaccaaccactcaaaaagacaaccagcattcgatccatggaaaagtcctgaaaatattagtcattcagagcaactcaaggaaaaagagaagcaaggatttttcaggtcaatgaaaaagaaaaagaagaaatctcaaacagtacccaattccgacagccctgatcttctgacgttgcagaaatccattcattctgctagcactccaagcagcagaccaaaggagtggcgccccgagaagatctcagatctgcagacccaaagccagccattaaaatcactgcgcaagttgttacatctctcttcggcctcaaatcacccggcttcctcagatccccgcttccagcccttaacagctcaacaaaccaaaaattccttctcagaaattcggattcaccccctgagccaggcctctggcgggagcagcaacatccggcaggaacccgcaccgaagggcaggccagccctccagctgccagacggtggatgtgatggcagaagacagagacaccattctggaccccaagatagacgcttcatgttaaggacgacagaacaacaaggagaatacttctgctgtggtgacccaaagaagcctcacactccgtgcgtcccaaaccgagcccttcatcgtccaatctccagtcctgctccctatccagtactccaggtccgaggcacttccatgtgcccgacactccaggtccgaggcactgatgctttcagctgcccaacccagcaatccgggttctctttcttcgtgagacacgttatgagggaagccctgattcacagggcccaggtaaaccaagctgcgctcctgacataccatgagaatgcggcactgacgggcaagtgacttctgcaagcctgcggctggtcccaatgccctgaatcacctctctcatggaagaaccaattaacaccaatgaatcaacca

SEQ ID NO: 7223 - DNA, 3453 bp, Homo sapiens
  source 1..3453: mol_type = unassigned DNA
gagggcggggccggaggtttcgattagttgtctctgccgctggggaaggtaaagcggcgacggcgtcctcaggagctgtggggtcccctgctagaagtgggggactcggcgggggagtcatttaatacttcatgattagaacaaatatgtgaaagttcccaccaaccagtgagaatttcttccttcagacggttttggatcttactgcacagctttctgagaagttcttttggtgccatgttttgtggcttgcatcaaaagaggagtttgtcttcatgaagattcctaacattggtaatgtgatgaataaatttgagatccttggggttgtaggtgaaggagcctatggagttgtacttaaatgcagacacaaggaaacacatgaaattgtggcgatcaagaaattcaaggacagtgaagaaaatgaagaagtcaaagaaacgactttacgagagcttaaaatgcttcggactctcaagcaggaaaacattgtggagttgaaggaagcatttcgtcggaggggaaagttgtacttggtgtttgagtatgttgaaaaaaatatgctcgaattgctggaagaaatgccaaatggagttccacctgagaaagtaaaaagctacatctatcagctaatcaaggctattcactggtgccataagaatgatattgtccatcgagatataaaaccagaaaatctcttaatcagccacaatgatgtcctaaaactgtgtgactttggttttgctcgtaatctgtcagaaggcaataatgctaattacacagagtacgttgccaccagatggtatcggtccccagaactcttacttggcgctccctatggaaagtccgtggacatgtggtcggtgggctgtattcttggggagcttagcgatggacagcctttatttcctggagaaagtgaaattgaccaactttttactattcagaaggtgctaggaccacttccatctgagcagatgaagcttttctacagtaatcctcgcttccatgggctccggtttccagctgttaaccatcctcagtccttggaaagaagataccttggaattttgaatagtgttctacttgacctaatgaagaatttactgaagttggacccagctgacagatacttgacagaacagtgtttgaatcaccctacatttcaaacccagagacttctggatcgttctccttcaaggtcagcaaaaagaaaaccttaccatgtggaaagcagcacattgtctaatagaaaccaagccggcaaaagtactgctttgcagtctcaccacagatctaacagcaaggacatccagaacctgagtgtaggcctgccccgggctgacgaaggtctccctgccaatgaaagcttcctaaatggaaaccttgctggagctagtcttagtccactgcacaccaaaacctaccaagcaagcagccagcctgggtctaccagcaaagatctcaccaacaacaacataccacaccttcttagcccaaaagaagccaagtcaaaaacagagtttgattttaatattgacccaaagccttcagaaggcccagggacaaagtacctcaagtcaaacagcagatctcagcagaaccgccactcattcatggaaagctctcaaagcaaagctgggacactgcagcccaatgaaaagcagagtcggcatagctatattgacacaattccccagtcctctaggagtccctcctacaggaccaaggccaaaagccatggggcactgagtgactccaagtctgtgagcaacctttctgaagccagggcccaaattgcggagcccagtaccagtaggtacttcccatctagctgcttagacttgaattctcccaccagcccaacccccaccagacacagtgacacgagaactttgctcagcccttctggaagaaataaccgaaatgagggaacgctggactcacgtcgaaccacaaccagacattctaagacgatggaggaattgaagctgccggagcacatggacagtagccattcccattcactgtctgcacctcacgaatctttttcttatggactgggctacaccagccccttttcttcccagcaacgtcctcataggcattctatgtatgtgacccgtgacaaagtgagagccaagggcttggatggaagcttgagcatagggcaagggatggcagctagagccaacagcctgcaactcttgtcaccccagcctggagaacagctccctccagagatgactgtggcaagatcttcggtcaaagagacctccagagaaggcacctcttccttccatacacgccagaagtctgagggtggagtgtatcatgacccacactctgatgatggcacagcccccaaagaaaatagacacctatacaatgatcctgtgccaaggagagttggtagcttttacagagtgccatctccacgtccagacaattctttccatgaaaataatgtgtcaactagagtttcttctctaccatcagagagcagttctggaaccaaccactcaaaaagacaaccagcattcgatccatggaaaagtcctgaaaatattagtcattcagagcaactcaaggaaaaagagaagcaaggatttttcaggtcaatgaaaaagaaaaagaagaaatctcaaacagtacccaattccgacagccctgatcttctgacgttgcagaaatccattcattctgctagcactccaagcagcagaccaaaggagtggcgccccgagaagatctcagatctgcagacccaaagccagccattaaaatcactgcgcaagttgttacatctctcttcggcctcaaatcacccggcttcctcagatccccgcttccagcccttaacagctcaacaaaccaaaaattccttctcagaaattcggattcaccccctgagccaggcctctggcgggagcagcaacatccggcaggaacccgcaccgaagggcaggccagccctccagctgccagacggtggatgtgatggcagaagacagagacaccattctggaccccaagatagacgcttcatgttaaggacgacagaacaacaaggagaatacttctgctgtggtgacccaaagaagcctcacactccgtgcgtcccaaaccgagcccttcatcgtccaatctccagtcctgctccctatccagtactccaggtccgaggcacttccatgtgcccgacactccaggtccgaggcactgatgctttcagctgcccaacccagcaatccgggttctctttcttcgtgagacacgttatgagggaagccctgattcacagggcccaggtaaaccaagctgcgctcctgacataccatgagaatgcggcactgacgggcaagtgacttctgcaagcctgcggctggtcccaatgccctgaatcacctctctcatggaagaaccaattaacaccaatgaatcaaccattaa

SEQ ID NO: 7224 - DNA, 2106 bp, Homo sapiens
  source 1..2106: mol_type = unassigned DNA
actatgctcaagtccaggcaacgtacaggcaggggaaatgtctcttccaaggttgctaaaagtaaacatcagaacatatgataattccattccaatcagtgaatcaagcagaaaatcatggaatcaaaaacactttgctttgacatttcccaaaccactccagagaggtacaaatgataaatcaagacctttgaaatcacaaataacagttactagacatgacaaaagaaaactagaagaaggccagaaaccagctcataaatggataaggcattctttcagaaaaattttgcaatggccacccatttacacagctgccagggaacagactccattcagacatctttatacttccaaaacccatcttaaaaaagcagaatataaaaagtccaaagatgaaaaaggaggaacacctttgaagaaagattccaagaaaaaaggaggttcatatgcaacaaatccagaatccaagcaaatagtagaagagaaaactaaaagacaaaatgaggcagataaaactcccttaaaatcatcacatgaaaatgaacaatccaagaagtcaaaatccagttcagaaactaatccagaatcccaaaattctaagacagtctcaaaaaattgttcacaaaaagataagaaagattcaaagaattccaagaagacaaacactgaattcctacatacaaagaacaatccaaagaaagatttgaagaggtcaaagactagtaatgatcccatatcagagatttgctcagaaaatagtttaaatgttgatttcctcatgttagtgggacagtctgatgatgaatccataaattttgatgcatggttaaggaattactcacagaataattcaaagaattattctttgaagtatacaaagtatacaaagaaggacacaaaaaagaatgcaaagaaaagctctgatgctgaatctgaagactcaaaggatgctaagaaagattcaaagaaagttaagaaaaatgtcaagaaagatgacaagaaaaaggatgtaaagaaggacacagagtctactgatgctgaatctggagactcaaaggatgaaaggaaagatacaaagaaggataagaaaaaattaaagaaagatgacaagaaaaaggacacaaagaagtacccagagtctactgatactgaatcaggagatgcaaaggatgcaagaaatgattcaagaaatttgaagaaagcttcaaagaatgatgacaagaaaaaggatgcaaagaaaattacattctctactgattctgaatctgaactggagtcaaaggagagtcagaaagatgaaaaaaaggataaaaaagattcaaagacagataataaaaagtctgtcaagaatgatgaagagtctactgatgctgactctgaaccgaagggagattcaaaaaagggtaaaaaggatgaaaagaaggggaagaaagattcaaagaaagatgacaaaaagaaggatgcaaagaaaaatgcagaatctactgaaatggaatctgatttggagttaaagaaggacaagaaacactcaaaggaaaagaaaggttcaaagaaagatatcaagaaggatgcaagaaaggacacagagtctactgatgctgaatttgatgaatcttccaagacaggctttaaaacatctacaaaaatcaaaggttcagatactgaatctgaagagtcactatataaacctggggctaagaagaaaattgatgaatcagatggcacatctgcaaattcaaagatggaaggactggaatcaaagagaggattcagaatgtcatccaaaaagactacattcaatgaaaaaggggaaaaagcaagtacaggtagagttcctccatcaagagaaaaaccaccactccctgcttgtgagccttctctaccatcaccaaaggtcagacgtctttgttggtgcaagatgcctcctccacctccaaaaccaagatatgctcctttgcctgaagcaccgtggattcataagctgctttaaagaacaactgagcacttggtttcacagaatggccttaccacagtaagcaccacctactctcaaatgagcatttctacctctgtggaactgaaataaaaacaagtcttccatga

SEQ ID NO: 7225 - DNA, 1995 bp, Homo sapiens
  source 1..1995: mol_type = unassigned DNA
ggcaacgtacaggcaggggaaatgtctcttccaaggttgctaaaagtaaacatcagaacatatgataattccattccaatcagtgaatcaagcagaaaatcatggaatcaaaaacactttgctttgacatttcccaaaccactccagagaggtacaaatgataaatcaagacctttgaaatcacaaataacagttactagacatgacaaaagaaaactagaagaaggccagaaaccagctcataaatggataaggcattctttcagaaaaattttgcaatggccacccatttacacagctgccagggaacagactccattcagacatctttatacttccaaaacccatcttaaaaaagcagaatataaaaagtccaaagatgaaaaaggaggaacacctttgaagaaagattccaagaaaaaaggaggttcatatgcaacaaatccagaatccaagcaaatagtagaagagaaaactaaaagacaaaatgaggcagataaaactcccttaaaatcatcacatgaaaatgaacaatccaagaagtcaaaatccagttcagaaactaatccagaatcccaaaattctaagacagtctcaaaaaattgttcacaaaaagataagaaagattcaaagaattccaagaagacaaacactgaattcctacatacaaagaacaatccaaagaaagatttgaagaggtcaaagactagtaatgatcccatatcagagatttgctcagaaaatagtttaaatgttgatttcctcatgttagtgggacagtctgatgatgaatccataaattttgatgcatggttaaggaattactcacagaataattcaaagaattattctttgaagtatacaaagtatacaaagaaggacacaaaaaagaatgcaaagaaaagctctgatgctgaatctgaagactcaaaggatgctaagaaagattcaaagaaagttaagaaaaatgtcaagaaagatgacaagaaaaaggatgtaaagaaggacacagagtctactgatgctgaatctggagactcaaaggatgaaaggaaagatacaaagaaggataagaaaaaattaaagaaagatgacaagaaaaaggacacaaagaagtacccagagtctactgatactgaatcaggagatgcaaaggatgcaagaaatgattcaagaaatttgaagaaagcttcaaagaatgatgacaagaaaaaggatgcaaagaaaattacattctctactgattctgaatctgaactggagtcaaaggagagtcagaaagatgaaaaaaaggataaaaaagattcaaagacagataataaaaagtctgtcaagaatgatgaagagtctactgatgctgactctgaaccgaagggagattcaaaaaagggtaaaaaggatgaaaagaaggggaagaaagattcaaagaaagatgacaaaaagaaggatgcaaagaaaaatgcagaatctactgaaatggaatctgatttggagttaaagaaggacaagaaacactcaaaggaaaagaaaggttcaaagaaagatatcaagaaggatgcaagaaaggacacagagtctactgatgctgaatttgatgaatcttccaagacaggctttaaaacatctacaaaaatcaaaggttcagatactgaatctgaagagtcactatataaacctggggctaagaagaaaattgatgaatcagatggcacatctgcaaattcaaagatggaaggactggaatcaaagagaggattcagaatgtcatccaaaaagactacattcaatgaaaaaggggaaaaagcaagtacaggtagagttcctccatcaagagaaaaaccaccactccctgcttgtgagccttctctaccatcaccaaaggtcagacgtctttgttggtgcaagatgcctcctccacctccaaaaccaagatatgctcctttgattcaaagaagacagcgtttaggagtcagaagatgtcaactacttatgtga

SEQ ID NO: 7226 - DNA, 1196 bp, Homo sapiens
  source 1..1196: mol_type = unassigned DNA
ttcttttcctctcttcttctttcgcggttcagcatgcaggaaaaagacgcctcctcacaaggtttcctgccacacttccaacatttcgccacgcaggcgatccatgtgggccaggatccagagcaatggacctccagggctgtagtgccccccatctcactgtccaccacgttcaagcaaggggcgcctggccagcactcgggttttgaatatagccgttctggaaatcccactaggaattgccttgaaaaagcagtggcagcactggatggggctaagtactgtttggcctttgcttcaggtttagcagccactgtaactattacccatcttttaaaagcaggagaccaaattatttgtatggatgatgtgtatggaggtacaaacaggtacttcaggcaagtggcatctgaatttggattaaagatttcttttgttgattgttccaaaatcaaattactagaggcagcaattacaccagaaaccaagcgccctttggctctgggagctgatatttctatgtattctgcaacaaaatacatgaatggccacagtgatgttgtaatgggcctggtgtctgttaattgtgaaagccttcataatagacttcgtttcttgcaaaactctcttggagcagttccatctcctattgattgttacctctgcaatcgaggtctgaagactctacatgtccgaatggaaaagcatttcaaaaacggaatggcagttgcccagttcctggaatctaatccttgggtagaaaaggttatttatcctgggctgccctctcatccacagcatgagttggtgaagcgtcagtgtacaggttgtacagggatggtcaccttttatattaagggcactcttcagcatgctgagattttcctcaagaacctaaagctatttactctggccgagagcttgggaggattcgaaagccttgctgagcttccggcaatcatgactcatgcatcagttcttaagaatgacagagatgtccttggaattagtgacacactgattcgactttctgtgggcttagaggatgaggaagacctactggaagatctagatcaagctttgaaggcagcacaccctccaagtggaagtcacagctagtattccagagctgctattagaagctgcttcctgtgaagatcaaatcttcctgagtaattaaatggaccaacaatgag

SEQ ID NO: 7227 - DNA, 1805 bp, Homo sapiens
  source 1..1805: mol_type = unassigned DNA
ctttagtgcgctcgccgtcggctctacctgcgtgctttagctccttctcgcctgatccttctgtctctcccaaccccggacacccggcttcgactggttatatcttcggtgttcttttcctctcttcttctttcgcggttcagcatgcaggaaaaagacgcctcctcacaaggtttcctgccacacttccaacatttcgccacgcaggcgatccatgtgggccaggatccagagcaatggacctccagggctgtagtgccccccatctcactgtccaccacgttcaagcaaggggcgcctggccagcactcgggttttgaatatagccgttctggaaatcccactaggaattgccttgaaaaagcagtggcagcactggatggggctaagtactgtttggcctttgcttcaggtttagcagccactgtaactattacccatcttttaaaagcaggagaccaaattatttgtatggatgatgtgtatggaggtacaaacaggtacttcaggcaagtggcatctgaatttggattaaagatttcttttgttgattgttccaaaatcaaattactagaggcagcaattacaccagaaaccaagcttgtttggatcgaaacccccacaaaccccacccagaaggtgattgacattgaaggctgtgcacatattgtccataagcatggagacattattttggtcgtggataacacttttatgtcaccatatttccagcgccctttggctctgggagctgatatttctatgtattctgcaacaaaatacatgaatggccacagtgatgttgtaatgggcctggtgtctgttaattgtgaaagccttcataatagacttcgtttcttgcaaaactctcttggagcagttccatctcctattgattgttacctctgcaatcgaggtctgaagactctacatgtccgaatggaaaagcatttcaaaaacggaatggcagttgcccagttcctggaatctaatccttgggtagaaaaggttatttatcctgggctgccctctcatccacagcatgagttggtgaagcgtcagtgtacaggttgtacagggatggtcaccttttatattaagggcactcttcagcatgctgagattttcctcaagaacctaaagctatttactctggccgagagcttgggaggattcgaaagccttgctgagcttccggcaatcatgactcatgcatcagttcttaagaatgacagagatgtccttggaattagtgacacactgattcgactttctgtgggcttagaggatgaggaagacctactggaagatctagatcaagctttgaaggcagcacaccctccaagtggaagtcacagctagtattccagagctgctattagaagctgcttcctgtgaagatcaaatcttcctgagtaattaaatggaccaacaatgagcctttgcaaaattttcaagcggaaattttaaggcacctcattatctttcataactgtaattttcttagggatcatctctgttaaaaagttttctgtatgtcatgttataattacaggtcaattctgttaatatctttttgttaattttgctctatgtttgcctctgaaggaggtgagatttgtgctactttgggagattatgttcttttttcatgtctaagatttattttgatcatgtttataatataatggtaattcatttttgatgttttgtgaagaatttaaatttaaacgaatgttcttaaatcaagtgtgatttttttgcatatcattgaaaagaacattaaaagcaatggtttacactta

SEQ ID NO: 7228 - DNA, 2044 bp, Homo sapiens
  source 1..2044: mol_type = unassigned DNA
tcgtgagactgcagacccgctaataaaatccaccccaacaatcgctgtgtgccgctttagtgcgctcgccgtcggctctacctgcgtgctttagctccttctcgcctgatccttctgtctctcccaaccccggacacccggcttcgactggttatatcttcggtgttcttttcctctcttcttctttcgcggttcagcatgcaggaaaaagacgcctcctcacaaggtttcctgccacacttccaacatttcgccacgcaggcgatccatgtgggccaggatccagagcaatggacctccagggctgtagtgccccccatctcactgtccaccacgttcaagcaaggggcgcctggccagcactcgggttttgaatatagccgttctggaaatcccactaggaattgccttgaaaaagcagtggcagcactggatggggctaagtactgtacaaacaggtacttcaggcaagtggcatctgaatttggattaaagatttcttttgttgattgttccaaaatcaaattactagaggcagcaattacaccagaaaccaagcttgtttggatcgaaacccccacaaaccccacccagaaggtgattgacattgaaggctgtgcacatattgtccataagcatggagacattattttggtcgtggataacacttttatgtcaccatatttccagcgccctttggctctgggagctgatatttctatgtattctgcaacaaaatacatgaatggccacagtgatgttgtaatgggcctggtgtctgttaattgtgaaagccttcataatagacttcgtttcttgcaaaactctcttggagcagttccatctcctattgattgttacctctgcaatcgaggtctgaagactctacatgtccgaatggaaaagcatttcaaaaacggaatggcagttgcccagttcctggaatctaatccttgggtagaaaaggttatttatcctgggctgccctctcatccacagcatgagttggtgaagcgtcagtgtacaggttgtacagggatggtcaccttttatattaagggcactcttcagcatgctgagattttcctcaagaacctaaagctatttactctggccgagagcttgggaggattcgaaagccttgctgagcttccggcaatcatgactcatgcatcagttcttaagaatgacagagatgtccttggaattagtgacacactgattcgactttctgtgggcttagaggatgaggaagacctactggaagatctagatcaagctttgaaggcagcacaccctccaagtggaagtcacagctagtattccagagctgctattagaagctgcttcctgtgaagatcaaatcttcctgagtaattaaatggaccaacaatgagcctttgcaaaattttcaagcggaaattttaaggcacctcattatctttcataactgtaattttcttagggatcatctctgttaaaaagttttctgtatgtcatgttataattacaggtcaattctgttaatatctttttgttaattttgctctatgtttgcctctgaaggaggtgagatttgtgctactttgggagattatgttcttttttcatgtctaagatttattttgatcatgtttataatataatggtaattcatttttgatgttttgtgaagaatttaaatttaaacgaatgttcttaaatcaagtgtgatttttttgcatatcattgaaaagaacattaaaagcaatggtttacacttagttaccataagccgaaaatcaaatacttgaaaagtttactgtgaaattctactgatttaagactatacttaatatttttaaaaaaataaatcagctgggcgcggtggctcacgcatgtaatgccagcacttttggaggataaggcgggcggatcacgaggtcaggagattgagaccatcctggctagcgcagtgaaacccccatctctactaaaaatgcaaaaaaaattagacggacgtggtggcgggtgcctgtagtcccagctacttgggaggctgagg

SEQ ID NO: 7229 - DNA, 2583 bp, Homo sapiens
  source 1..2583: mol_type = unassigned DNA
tcccgggcccgcgacacacgccctcggggtcggtcctcgaggacgcgcagggccccccacccaccaggacgcacgtttcaagctcatcagtaaaggttccttaaattcccgaagggcaagaagttaaccaagtaaaacagcatcggaacaccaggatcccatgacagattctgttgtcacgtctccttacagagtttgagcggtgctgaactgtcagcaccatctgtccggtcccagcatgccttctgagaccccccaggcagaagtggggcccacaggctgcccccaccgctcagggccacactcggcgaaggggagcctggagaaggggtccccagaggataaggaagccaaggagcccctgtggatccggcccgatgctccgagcaggtgcacctggcagctgggccggcctgcctccgagtccccacatcaccacactgccccggcaaaatctccaaaaatcttgccagatattctgaagaaaatcggggacacccctatggtcagaatcaacaagattgggaagaagttcggcctgaagtgtgagctcttggccaagtgtgagttcttcaacgcgggcgggagcgtgaaggaccgcatcagcctgcggatgattgaggatgctgagcgcgacgggacgctgaagcccggggacacgattatcgagccgacatccgggaacaccgggatcgggctggccctggctgcggcagtgaggggctatcgctgcatcatcgtgatgccagagaagatgagctccgagaaggtggacgtgctgcgggcactgggggctgagattgtgaggacgcccaccaatgccaggttcgactccccggagtcacacgtgggggtggcctggcggctgaagaacgaaatccccaattctcacatcctagaccagtaccgcaacgccagcaaccccctggctcactacgacaccaccgctgatgagatcctgcagcagtgtgatgggaagctggacatgctggtggcttcagtgggcacgggcggcaccatcacgggcattgccaggaagctgaaggagaagtgtcctggatgcaggatcattggggtggatcccgaagggtccatcctcgcagagccggaggagctgaaccagacggagcagacaacctacgaggtggaagggatcggctacgacttcatccccacggtgctggacaggacggtggtggacaagtggttcaagagcaacgatgaggaggcgttcacctttgcccgcatgctgatcgcgcaagaggggctgctgtgcggtggcagtgctggcagcacggtggcggtggccgtgaaggccgcgcaggagctgcaggagggccagcgctgcgtggtcattctgcccgactcagtgcggaactacatgaccaagttcctgagcgacaggtggatgctgcagaagggctttctgaaggaggaggacctcacggagaagaagccctggtggtggcacctccgtgttcaggagctgggcctgtcagccccgctgaccgtgctcccgaccatcacctgtgggcacaccatcgagatcctccgggagaagggcttcgaccaggcgcccgtggtggatgaggcgggggtaatcctgggaatggtgacgcttgggaacatgctctcgtccctgcttgccgggaaggtgcagccgtcagaccaagttggcaaagtcatctacaagcagttcaaacagatccgcctcacggacacgctgggcaggctctcgcacatcctggagatggaccacttcgccctggtggtgcacgagcagatccagtaccacagcaccgggaagtccagtcagcggcagatggtgttcggggtggtcaccgccattgacttgctgaacttcgtggccgcccaggagcgggaccagaagtgaagtccggagcgctgggcggtgcggagcgggcccgccacccttgcccacttctccttcgctttcctgagccctaaacacacgcgtgattggtaactgcctggcctggcaccgttatccctgcacacggcacagagcatccgtctcccctcgttaacacatggcttcctaaatggccctgtttacggcctatgagatgaaatatgtgattttctctaatgtaacttcctcttaggatgtttcaccaaggaaatattgagagagaagtcggccaggtaggatgaacacaggcaatgactgcgcagagtggattaaaggcaaaagagagaagagtccaggaaggggcggggagaagcctgggtggctcagcatcctccacgggctgcgccgtctgctcggggctgagctggcgggagcagtttgcgtgtttgggttttttaattgagatgaaattcaaataacctaaaaatcaatcacttgaaagtgaacaatcagcggcatttagtacatccagaaagttgtgtaggcaccacctctgtcacgttctggaacattctgtcatcaccccgtgaagcaatcatttcccctcccgtcttcctcctcccctggcaactgctgatcgactttgtgtctctgttgtctaaaataggttttccctgttctggacatttcatataaatggaatcacacaa

SEQ ID NO: 7230 - DNA, 2353 bp, Homo sapiens
  source 1..2353: mol_type = unassigned DNA
cacgccctcggggtcggtcctcgaggacgcgcagggccccccacccaccaggacgcacgtttcaagctcatcagtaaaggttccttaaattcccgaagggcaagaagttaaccaagtaaaacagcatcggaacaccaggatcccatgacagattctgttgtcacgtctccttacagagtttgagcggtgctgaactgtcagcaccatctgtccggtcccagcatgccttctgagaccccccaggcagaagtggggcccacaggctgcccccaccgctcagggccacactcggcgaaggggagcctggagaaggggtccccagaggataaggaagccaaggagcccctgtggatccggcccgatgctccgagcaggtgcacctggcagctgggccggcctgcctccgagtccccacatcaccacactgccccggcaaaatctccaaaaatcttgccagatattctgaagaaaatcggggacacccctatggtcagaatcaacaagattgggaagaagttcggcctgaagtgtgagctcttggccaagtgtgagttcttcaacgcgggcgggagcgtgaaggaccgcatcagcctgcggatgattgaggatgctgagcgcgacgggacgctgaagcccggggacacgattatcgagccgacatccgggaacaccgggatcgggctggccctggctgcggcagtgaggggctatcgctgcatcatcgtgatgccagagaagatgagctccgagaaggtggacgtgctgcgggcactgggggctgagattgtgaggacgcccaccaatgccaggttcgactccccggagtcacacgtgggggtggcctggcggctgaagaacgaaatccccaattctcacatcctagaccagtaccgcaacgccagcaaccccctggctcactacgacaccaccgctgatgagatcctgcagcagtgtgatgggaagctggacatgctggtggcttcagtgggcacgggcggcaccatcacgggcattgccaggaagctgaaggagaagtgtcctggatgcaggatcattggggtggatcccgaagggtccatcctcgcagagccggaggagctgaaccagacggagcagacaacctacgaggtggaagggatcggctacgacttcatccccacggtgctggacaggacggtggtggacaagtggttcaagagcaacgatgaggaggcgttcacctttgcccgcatgctgatcgcgcaagaggggctgctgtgcggtggcagtgctggcagcacggtggcggtggccgtgaaggccgcgcaggagctgcaggagggccagcgctgcgtggtcattctgcccgactcagtgcggaactacatgaccaagttcctgagcgacaggtggatgctgcagaagggctttctgaaggaggaggacctcacggagaagaagccctggtggtggcacctccgtgttcaggagctgggcctgtcagccccgctgaccgtgctcccgaccatcacctgtgggcacaccatcgagatcctccgggagaagggcttcgaccaggcgcccgtggtggatgaggcgggggtaatcctgggaatggtgacgcttgggaacatgctctcgtccctgcttgccgggaaggtgcagccgtcagaccaagttggcaaagtcatctacaagcagttcaaacagatccgcctcacggacacgctgggcaggctctcgcacatcctggagatggaccacttcgccctggtggtgcacgagcagatccagtaccacagcaccgggaagtccagtcagcggcagatggtgttcggggtggtcaccgccattgacttgctgaacttcgtggccgcccaggagcgggaccagaagtgaagtccggagcgctgggcggatgtttcaccaaggaaatattgagagagaagtcggccaggtaggatgaacacaggcaatgactgcgcagagtggattaaaggcaaaagagagaagagtccaggaaggggcggggagaagcctgggtggctcagcatcctccacgggctgcgccgtctgctcggggctgagctggcgggagcagtttgcgtgtttgggttttttaattgagatgaaattcaaataacctaaaaatcaatcacttgaaagtgaacaatcagcggcatttagtacatccagaaagttgtgtaggcaccacctctgtcacgttctggaacattctgtcatcaccccgtgaagcaatcatttcccctcccgtcttcctcctcccctggcaactgctgatcgactttgtgtctctgttgtctaaaataggttttccctgttctggacatttcatataaatggaatcacacaa

SEQ ID NO: 7231 - DNA, 2453 bp, Homo sapiens
  source 1..2453: mol_type = unassigned DNA
ccgtctccgcctcgccgcagtcggggcagccgctcgcccctcttttccatgtatccgtccagagtttgagcggtgctgaactgtcagcaccatctgtccggtcccagcatgccttctgagaccccccaggcagaagtggggcccacaggctgcccccaccgctcagggccacactcggcgaaggggagcctggagaaggggtccccagaggataaggaagccaaggagcccctgtggatccggcccgatgctccgagcaggtgcacctggcagctgggccggcctgcctccgagtccccacatcaccacactgccccggcaaaatctccaaaaatcttgccagatattctgaagaaaatcggggacacccctatggtcagaatcaacaagattgggaagaagttcggcctgaagtgtgagctcttggccaagtgtgagttcttcaacgcgggcgggagcgtgaaggaccgcatcagcctgcggatgattgaggatgctgagcgcgacgggacgctgaagcccggggacacgattatcgagccgacatccgggaacaccgggatcgggctggccctggctgcggcagtgaggggctatcgctgcatcatcgtgatgccagagaagatgagctccgagaaggtggacgtgctgcgggcactgggggctgagattgtgaggacgcccaccaatgccaggttcgactccccggagtcacacgtgggggtggcctggcggctgaagaacgaaatccccaattctcacatcctagaccagtaccgcaacgccagcaaccccctggctcactacgacaccaccgctgatgagatcctgcagcagtgtgatgggaagctggacatgctggtggcttcagtgggcacgggcggcaccatcacgggcattgccaggaagctgaaggagaagtgtcctggatgcaggatcattggggtggatcccgaagggtccatcctcgcagagccggaggagctgaaccagacggagcagacaacctacgaggtggaagggatcggctacgacttcatccccacggtgctggacaggacggtggtggacaagtggttcaagagcaacgatgaggaggcgttcacctttgcccgcatgctgatcgcgcaagaggggctgctgtgcggtggcagtgctggcagcacggtggcggtggccgtgaaggccgcgcaggagctgcaggagggccagcgctgcgtggtcattctgcccgactcagtgcggaactacatgaccaagttcctgagcgacaggtggatgctgcagaagggctttctgaaggaggaggacctcacggagaagaagccctggtggtggcacctccgtgttcaggagctgggcctgtcagccccgctgaccgtgctcccgaccatcacctgtgggcacaccatcgagatcctccgggagaagggcttcgaccaggcgcccgtggtggatgaggcgggggtaatcctgggaatggtgacgcttgggaacatgctctcgtccctgcttgccgggaaggtgcagccgtcagaccaagttggcaaagtcatctacaagcagttcaaacagatccgcctcacggacacgctgggcaggctctcgcacatcctggagatggaccacttcgccctggtggtgcacgagcagatccagtaccacagcaccgggaagtccagtcagcggcagatggtgttcggggtggtcaccgccattgacttgctgaacttcgtggccgcccaggagcgggaccagaagtgaagtccggagcgctgggcggtgcggagcgggcccgccacccttgcccacttctccttcgctttcctgagccctaaacacacgcgtgattggtaactgcctggcctggcaccgttatccctgcacacggcacagagcatccgtctcccctcgttaacacatggcttcctaaatggccctgtttacggcctatgagatgaaatatgtgattttctctaatgtaacttcctcttaggatgtttcaccaaggaaatattgagagagaagtcggccaggtaggatgaacacaggcaatgactgcgcagagtggattaaaggcaaaagagagaagagtccaggaaggggcggggagaagcctgggtggctcagcatcctccacgggctgcgccgtctgctcggggctgagctggcgggagcagtttgcgtgtttgggttttttaattgagatgaaattcaaataacctaaaaatcaatcacttgaaagtgaacaatcagcggcatttagtacatccagaaagttgtgtaggcaccacctctgtcacgttctggaacattctgtcatcaccccgtgaagcaatcatttcccctcccgtcttcctcctcccctggcaactgctgatcgactttgtgtctctgttgtctaaaataggttttccctgttctggacatttcatataaatggaatcacacaa

SEQ ID NO: 7232 - DNA, 2605 bp, Homo sapiens
  source 1..2605: mol_type = unassigned DNA
gtgctctgccacgagacattggccggcgccggcctccgcccccgcctctccgccaatcaccgcccgcctgctcccctcgccgtgggtccccgcgaggccgccaccccggggtcgccgtctccgcctcgccgcagtcggggcagccgctcgcccctcttttccatgtatccgtccaggatcccatgacagattctgttgtcacgtctccttacagagtttgagcggtgctgaactgtcagcaccatctgtccggtcccagcatgccttctgagaccccccaggcagaagtggggcccacaggctgcccccaccgctcagggccacactcggcgaaggggagcctggagaaggggtccccagaggataaggaagccaaggagcccctgtggatccggcccgatgctccgagcaggtgcacctggcagctgggccggcctgcctccgagtccccacatcaccacactgccccggcaaaatctccaaaaatcttgccagatattctgaagaaaatcggggacacccctatggtcagaatcaacaagattgggaagaagttcggcctgaagtgtgagctcttggccaagtgtgagttcttcaacgcgggcgggagcgtgaaggaccgcatcagcctgcggatgattgaggatgctgagcgcgacgggacgctgaagcccggggacacgattatcgagccgacatccgggaacaccgggatcgggctggccctggctgcggcagtgaggggctatcgctgcatcatcgtgatgccagagaagatgagctccgagaaggtggacgtgctgcgggcactgggggctgagattgtgaggacgcccaccaatgccaggttcgactccccggagtcacacgtgggggtggcctggcggctgaagaacgaaatccccaattctcacatcctagaccagtaccgcaacgccagcaaccccctggctcactacgacaccaccgctgatgagatcctgcagcagtgtgatgggaagctggacatgctggtggcttcagtgggcacgggcggcaccatcacgggcattgccaggaagctgaaggagaagtgtcctggatgcaggatcattggggtggatcccgaagggtccatcctcgcagagccggaggagctgaaccagacggagcagacaacctacgaggtggaagggatcggctacgacttcatccccacggtgctggacaggacggtggtggacaagtggttcaagagcaacgatgaggaggcgttcacctttgcccgcatgctgatcgcgcaagaggggctgctgtgcggtggcagtgctggcagcacggtggcggtggccgtgaaggccgcgcaggagctgcaggagggccagcgctgcgtggtcattctgcccgactcagtgcggaactacatgaccaagttcctgagcgacaggtggatgctgcagaagggctttctgaaggaggaggacctcacggagaagaagccctggtggtggcacctccgtgttcaggagctgggcctgtcagccccgctgaccgtgctcccgaccatcacctgtgggcacaccatcgagatcctccgggagaagggcttcgaccaggcgcccgtggtggatgaggcgggggtaatcctgggaatggtgacgcttgggaacatgctctcgtccctgcttgccgggaaggtgcagccgtcagaccaagttggcaaagtcatctacaagcagttcaaacagatccgcctcacggacacgctgggcaggctctcgcacatcctggagatggaccacttcgccctggtggtgcacgagcagatccagtaccacagcaccgggaagtccagtcagcggcagatggtgttcggggtggtcaccgccattgacttgctgaacttcgtggccgcccaggagcgggaccagaagtgaagtccggagcgctgggcggtgcggagcgggcccgccacccttgcccacttctccttcgctttcctgagccctaaacacacgcgtgattggtaactgcctggcctggcaccgttatccctgcacacggcacagagcatccgtctcccctcgttaacacatggcttcctaaatggccctgtttacggcctatgagatgaaatatgtgattttctctaatgtaacttcctcttaggatgtttcaccaaggaaatattgagagagaagtcggccaggtaggatgaacacaggcaatgactgcgcagagtggattaaaggcaaaagagagaagagtccaggaaggggcggggagaagcctgggtggctcagcatcctccacgggctgcgccgtctgctcggggctgagctggcgggagcagtttgcgtgtttgggttttttaattgagatgaaattcaaataacctaaaaatcaatcacttgaaagtgaacaatcagcggcatttagtacatccagaaagttgtgtaggcaccacctctgtcacgttctggaacattctgtcatcaccccgtgaagcaatcatttcccctcccgtcttcctcctcccctggcaactgctgatcgactttgtgtctctgttgtctaaaataggttttccctgttctggacatttcatataaatggaatcacacaa

SEQ ID NO: 7233 - DNA, 2554 bp, Homo sapiens
  source 1..2554: mol_type = unassigned DNA
gcgaggccgccaccccggggtcgccgtctccgcctcgccgcagtcggggcagccgctcgcccctcttttccatgtatccgtccaggatcccatgacagattctgttgtcacgtctccttacagagtttgagcggtgctgaactgtcagcaccatctgtccggtcccagcatgccttctgagaccccccaggcagaagtggggcccacaggctgcccccaccgctcagggccacactcggcgaaggggagcctggagaaggggtccccagaggataaggaagccaaggagcccctgtggatccggcccgatgctccgagcaggtgcacctggcagctgggccggcctgcctccgagtccccacatcaccacactgccccggcaaaatctccaaaaatcttgccagatattctgaagaaaatcggggacacccctatggtcagaatcaacaagattgggaagaagttcggcctgaagtgtgagctcttggccaagtgtgagttcttcaacgcgggcgggagcgtgaaggaccgcatcagcctgcggatgattgaggatgctgagcgcgacgggacgctgaagcccggggacacgattatcgagccgacatccgggaacaccgggatcgggctggccctggctgcggcagtgaggggctatcgctgcatcatcgtgatgccagagaagatgagctccgagaaggtggacgtgctgcgggcactgggggctgagattgtgaggacgcccaccaatgccaggttcgactccccggagtcacacgtgggggtggcctggcggctgaagaacgaaatccccaattctcacatcctagaccagtaccgcaacgccagcaaccccctggctcactacgacaccaccgctgatgagatcctgcagcagtgtgatgggaagctggacatgctggtggcttcagtgggcacgggcggcaccatcacgggcattgccaggaagctgaaggagaagtgtcctggatgcaggatcattggggtggatcccgaagggtccatcctcgcagagccggaggagctgaaccagacggagcagacaacctacgaggtggaagggatcggctacgacttcatccccacggtgctggacaggacggtggtggacaagtggttcaagagcaacgatgaggaggcgttcacctttgcccgcatgctgatcgcgcaagaggggctgctgtgcggtggcagtgctggcagcacggtggcggtggccgtgaaggccgcgcaggagctgcaggagggccagcgctgcgtggtcattctgcccgactcagtgcggaactacatgaccaagttcctgagcgacaggtggatgctgcagaagggctttctgaaggaggaggacctcacggagaagaagccctggtggtggcacctccgtgttcaggagctgggcctgtcagccccgctgaccgtgctcccgaccatcacctgtgggcacaccatcgagatcctccgggagaagggcttcgaccaggcgcccgtggtggatgaggcgggggtaatcctgggaatggtgacgcttgggaacatgctctcgtccctgcttgccgggaaggtgcagccgtcagaccaagttggcaaagtcatctacaagcagttcaaacagatccgcctcacggacacgctgggcaggctctcgcacatcctggagatggaccacttcgccctggtggtgcacgagcagatccagtcgcaggaccaggcctgggcaggcgtggtgggggggcctgcagaccacagcaccgggaagtccagtcagcggcagatggtgttcggggtggtcaccgccattgacttgctgaacttcgtggccgcccaggagcgggaccagaagtgaagtccggagcgctgggcggtgcggagcgggcccgccacccttgcccacttctccttcgctttcctgagccctaaacacacgcgtgattggtaactgcctggcctggcaccgttatccctgcacacggcacagagcatccgtctcccctcgttaacacatggcttcctaaatggccctgtttacggcctatgagatgaaatatgtgattttctctaatgtaacttcctcttaggatgtttcaccaaggaaatattgagagagaagtcggccaggtaggatgaacacaggcaatgactgcgcagagtggattaaaggcaaaagagagaagagtccaggaaggggcggggagaagcctgggtggctcagcatcctccacgggctgcgccgtctgctcggggctgagctggcgggagcagtttgcgtgtttgggttttttaattgagatgaaattcaaataacctaaaaatcaatcacttgaaagtgaacaatcagcggcatttagtacatccagaaagttgtgtaggcaccacctctgtcacgttctggaacattctgtcatcaccccgtgaagcaatcatttcccctcccgtcttcctcctcccctggcaactgctgatcgactttgtgtctctgttgtctaaaataggttttccctgttctggacatttcatataaatggaatcacac

SEQ ID NO: 7234 - DNA, 819 bp, Homo sapiens
  source 1..819: mol_type = unassigned DNA
agttcctgccagtggacatttaattctaattcacgtctcactccctcccctactgtgagccccacgtggcagagaccgcggcggagctgcgcgggccggaggaggctgcggagcatcgctctgacctgagccggggacgctgcggaggcgcagcacgttcctctgcccagagctgatgggcaccgtccgtgtctttcgctgcaggatcccatgacagattctgttgtcacgtctccttacagagtttgagcggtgctgaactgtcagcaccatctgtccggtcccagcatgccttctgagaccccccaggcagaagtggggcccacaggctgcccccaccgctcagggccacactcggcgaaggggagcctggagaaggggtccccagaggataaggaagccaaggagcccctgtggatccggcccgatgctccgagcaggtgcacctggcagctgggccggcctgcctccgagtccccacatcaccacactgccccggcaaaatctccaaaaatcttgccagatattctgaagaaaatcggggacacccctatggtcagaatcaacaagattgggaagaagttcggcctgaagtgtgagctcttggccaagtgtgagttcttcaacgcgggcgggagcgtgaaggaccgcatcagcctgcggatgattgaggatgctgagcgcgacgggacgctgaagcccggggacacgattatcgagccgacatccgggaacaccgggatcgggctggccctggctgcggcagtgaggggctatcgctgcatcatcgtgatgccagagaagatgagctccgagaag

SEQ ID NO: 7235 - DNA, 2129 bp, Homo sapiens
  source 1..2129: mol_type = unassigned DNA
ggagctgcgcgggccggaggaggctgcggagcatcgctctgacctgagccggggacgctgcggaggcgcagcacgttcctctgcccagagctgatgggcaccgtccgtgtctttcgctgcagggcaagaagttaaccaagtaaaacagcatcggaacaccaggatcccatgacagattctgttgtcacgtctccttacagagtttgagcggtgctgaactgtcagcaccatctgtccggtcccagcatgccttctgagaccccccaggcagaagtggggcccacaggctgcccccaccgctcagggccacatcaccacactgccccggcaaaatctccaaaaatcttgccagatattctgaagaaaatcggggacacccctatggtcagaatcaacaagattgggaagaagttcggcctgaagtgtgagctcttggccaagtgtgagttcttcaacgcgggcgggagcgtgaaggaccgcatcagcctgcggatgattgaggatgctgagcgcgacgggacgctgaagcccggggacacgattatcgagccgacatccgggaacaccgggatcgggctggccctggctgcggcagtgaggggctatcgctgcatcatcgtgatgccagagaagatgagctccgagaaggtggacgtgctgcgggcactgggggctgagattgtgaggacgcccaccaatgccaggttcgactccccggagtcacacgtgggggtggcctggcggctgaagaacgaaatccccaattctcacatcctagaccagtaccgcaacgccagcaaccccctggctcactacgacaccaccgctgatgagatcctgcagcagtgtgatgggaagctggacatgctggtggcttcagtgggcacgggcggcaccatcacgggcattgccaggaagctgaaggagaagtgtcctggatgcaggatcattggggtggatcccgaagggtccatcctcgcagagccggaggagctgaaccagacggagcagacaacctacgaggtggaagggatcggctacgacttcatccccacggtgctggacaggacggtggtggacaagtggttcaagagcaacgatgaggaggcgttcacctttgcccgcatgctgatcgcgcaagaggggctgctgtgcggtggcagtgctggcagcacggtggcggtggccgtgaaggccgcgcaggagctgcaggagggccagcgctgcgtggtcattctgcccgactcagtgcggaactacatgaccaagttcctgagcgacaggtggatgctgcagaagggctttctgaaggaggaggacctcacggagaagaagccctggtggtggcacctccgtgttcaggagctgggcctgtcagccccgctgaccgtgctcccgaccatcacctgtgggcacaccatcgagatcctccgggagaagggcttcgaccaggcgcccgtggtggatgaggcgggggtaatcctgggaatggtgacgcttgggaacatgctctcgtccctgcttgccgggaaggtgcagccgtcagaccaagttggcaaagtcatctacaagcagttcaaacagatccgcctcacggacacgctgggcaggctctcgcacatcctggagatggaccacttcgccctggtggtgcacgagcagatccagtaccacagcaccgggaagtccagtcagcggcagatggtgttcggggtggtcaccgccattgacttgctgaacttcgtggccgcccaggagcgggaccagaagtgaagtccggagcgctgggcggtgcggagcgggcccgccacccttgcccacttctccttcgctttcctgagccctaaacacacgcgtgattggtaactgcctggcctggcaccgttatccctgcacacggcacagagcatccgtctcccctcgttaacacatggcttcctaaatggccctgtttacggcctatgagatgaaatatgtgattttctctaatgtaacttcctcttaggatgtttcaccaaggaaatattgagagagaagtcggccaggtaggatgaacacaggcaatgactgcgcagagtggattaaaggcaaaagagagaagagtccaggaaggggcggggagaagcctg

SEQ ID NO: 7236 - DNA, 1703 bp, Homo sapiens
  source 1..1703: mol_type = unassigned DNA
gctaagcgctctgggcctggccctgatcacctctgcaaacttctcagggcaaaatctccaaaaatcttgccagatattctgaagaaaatcggggacacccctatggtcagaatcaacaagattgggaagaagttcggcctgaagtgtgagctcttggccaagtgtgagttcttcaacgcgggcgggagcgtgaaggaccgcatcagcctgcggatgattgaggatgctgagcgcgacgggacgctgaagcccggggacacgattatcgagccgacatccgggaacaccgggatcgggctggccctggctgcggcagtgaggggctatcgctgcatcatcgtgatgccagagaagatgagctccgagaaggtggacgtgctgcgggcactgggggctgagattgtgaggacgcccaccaatgccaggttcgactccccggagtcacacgtgggggtggcctggcggctgaagaacgaaatccccaattctcacatcctagaccagtaccgcaacgccagcaaccccctggctcactacgacaccaccgctgatgagatcctgcagcagtgtgatgggaagctggacatgctggtggcttcagtgggcacgggcggcaccatcacgggcattgccaggaagctgaaggagaagtgtcctggatgcaggatcattggggtggatcccgaagggtccatcctcgcagagccggaggagctgaaccagacggagcagacaacctacgaggtggaagggatcggctacgacttcatccccacggtgctggacaggacggtggtggacaagtggttcaagagcaacgatgaggaggcgttcacctttgcccgcatgctgatcgcgcaagaggggctgctgtgcggtggcagtgctggcagcacggtggcggtggccgtgaaggccgcgcaggagctgcaggagggccagcgctgcgtggtcattctgcccgactcagtgcggaactacatgaccaagttcctgagcgacaggtggatgctgcagaagggctttctgaaggaggaggacctcacggagaagaagccctggtggtggcacctccgtgttcaggagctgggcctgtcagccccgctgaccgtgctcccgaccatcacctgtgggcacaccatcgagatcctccgggagaagggcttcgaccaggcgcccgtggtggatgaggcgggggtaatcctgggaatggtgacgcttgggaacatgctctcgtccctgcttgccgggaaggtgcagccgtcagaccaagttggcaaagtcatctacaagcagttcaaacagatccgcctcacggacacgctgggcaggctctcgcacatcctggagatggaccacttcgccctggtggtgcacgagcagatccagtaccacagcaccgggaagtccagtcagcggcagatggtgttcggggtggtcaccgccattgacttgctgaacttcgtggccgcccaggagcgggaccagaagtgaagtccggagcgctgggcggtgcggagcgggcccgccacccttgcccacttctccttcgctttcctgagccctaaacacacgcgtgattggtaactgcctggcctggcaccgttatccctgcacacggcacagagcatccgtctcccctcgttaacacatggcttcctaaatggccctgtttacggcctatgagatgaaatatgtgattt

SEQ ID NO: 7237 - DNA, 461 bp, Homo sapiens
  source 1..461: mol_type = unassigned DNA
ctgaggagtacagagaacactcttcctgttcctctgcagctgaaggatgatggctgagccctggcaggccctacagctcctgttggccattctattgactctgatggccctcccctaccaagcaaggaagaaaacctttctaagcgtccatgaagtgatggcagtagaaaactatgcgaaggacagcttgcagtggatcaccgaccagtataacaaggaaagtgatgacaagtaccacttcaggatcttccgagtccttaaagtccagaggcagcaagtcaactgcttcttctcagtgtttgctgtaccctggtttgaacagtacaaaattttgaacaaaagctgcagcagtgactaggtgtcctggagtgtacaactgcggccactgcatgtgagagaatcctgcaatgggcaataatccttaatataggcaataaatgtttgtcaacatattctcttaa

SEQ ID NO: 7238 - DNA, 554 bp, Homo sapiens
  source 1..554: mol_type = unassigned DNA
gagaacactcttcctgttcctctgcagctgaaggatgatggctgagccctggcaggccctacagctcctgttggccattctattgactctgatggccctcccctaccaagcaaggaagaaaacctttctaagcgtccatgaagtgatggcagtagaaaactatgcgaaggacagcttgcagtggatcaccgaccagtataacaaggaaagtgatgacaagtaccacttcaggatcttccgagtccttaaagtccagaggcaggtcactgaccacctggagtatcacctgaatgtggaaatgcagtggaccacctgccaaaagccagagaccacgaactgtgtcccccaggaaagggagcttcacaagcaagtcaactgcttcttctcagtgtttgctgtaccctggtttgaacagtacaaaattttgaacaaaagctgcagcagtgactaggtgtcctggagtgtacaactgcggccactgcatgtgagagaatcctgcaatgggcaataatccttaatataggcaataaatgtttgtcaacatattctcttaa

SEQ ID NO: 7239 - DNA, 751 bp, Homo sapiens
  source 1..751: mol_type = unassigned DNA
gttcactttggttccagcatcctgtccagcaaagaagcaatcagccaaaatgatacctggaggcttatctgaggccaaacccgccactccagaaatccaggagattgttgataaggttaaaccacagcttgaagaaaaaacaaatgagacttacggaaaattggaagctgtgcagtataaaactcaagttgttgctggaacaaattactacattaaggtacgagcaggtgataataaatatatgcacttgaaagtattcaaaagtcttcccggacaaaatgaggacttggtacttactggataccaggttgacaaaaacaaggatgacgagctgacgggcttttagcagcatgtacccaaagtgttctgattccttcaactggctactgagtcatgatccttgctgataaatataaccatcaataaagaagcattcttttccaaagaaattatttcttcaattatttctcatttattgtattaagcagaaattaccttttctttctcaaaatcagtgttattgctttagagtataaactccatataaattgatggcaattggaaatcttataaaaactagtcaagcctaatgcaactggctaaaggatagtaccaccctcacccccaccataggcaggctggatcgtggactatcaattcaccagcctccttgttccctgtggctgctgataacccaacattccatctctaccctcatacttcaaaattaaatcaagtattttacaaagtg

SEQ ID NO: 7240 - DNA, 2163 bp, Homo sapiens
  source 1..2163: mol_type = unassigned DNA
cgcgtcccttcttgcggggccaccgcgaccccgcaggggactccgaagccaaagtgcctcctccccgccccttggttccgcccgcgcgtcacgtgaccccagcgcctacttgggctgaggagccgccgcgtcccctcgccgagtcccctcgccagattccctccgtcgccgccaagatgatgtgcggggcgccctccgccacgcagccggccaccgccgagacccagcacatcgccgaccaggtgaggtcccagcttgaagagaaagaaaacaagaagttccctgtgtttaaggccgtgtcattcaagagccaggtggtcgcggggacaaactacttcatcaaggtgcacgtcggcgacgaggacttcgtacacctgcgagtgttccaatctctccctcatgaaaacaagcccttgaccttatctaactaccagaccaacaaagccaagcatgatgagctgacctatttctgatcctgactttggacaaggcccttcagccagaagactgacaaagtcatcctccgtctaccagagcgtgcacttgtgatcctaaaataagcttcatctccgggctgtgccccttggggtggaaggggcaggattctgcagctgcttttgcatttctcttcctaaatttcattgtgttgatttctttccttcccaataggtgatcttaattactttcagaatattttcaaaatagatatatttttaaaatccttacagattgcctcctttgttttagacttttttcttcgtctgaaccaccccgggcaggtccttcccctcgggggcatggagggcggagagactgcctggctcacacagcaagcaggtggtggacccaggattcacacctgcccactccggcccgcgttcctaaccaccactctttacatgttggtgctttgactcttaggtcctggccccaagcttcagtttctcccataaaataaaagagtgtgagtaaatccaattccagagcataactggctccagatctcagatacattcacgcactttatgctctggtacggagaggcagccacacagtgtcgtgcacgtgcagaatagcctgcagcctcactgagtgccctgtggtgcgggaggcttcccatggagccacgtgggcttctaaagggaggtatcttaggagagcgtggctgtttttaaaaacaccttctagttttcaacagggattacttcccattcatggaattggtccggtgccttcccaactgtgattctatgttaaataggacagaagagggagcatcatacatgataagagctaagactgggggtgaaagtctctgtgcaccggggtcatgatgtgaacgtgttcctgagggtgtcctgagctgcgctttgcctccgaggcgtccggcagcgtatgccagaactgcagctgcagggttcaggctgtccagatcgtgggggatctgtgaagactaaggagggatctaccagtgagtccacagagctttgaaagtgatgttaggaaattctgaatcaggccgggcgcggtggctcacacctagaatcccaacactttgggaggccaaggtgggtggatcactctgaggtcaggagttctaggccagcctgacccacatggtgaaaccctgtctctactaataataaaaaaattagctgggcgttgtggcaggcgcctgtaatcccagctacttgggaggctgagacgggaggatcacttggactcgggaggtggtgggtgcagtgagccgagatcgtacctctgcactccagcctgggtgggtgacagagtgagatcctatctcaaaaaaaaaccaaaaagaaaactgaatcatggactgtgtgtattctacactcttaacatgaactctgagactaagcttttataacatgcaaaacagaatcaagcagttttgcattgaaaggaaaacccgttgtatttcccacttgagaatttccagcggaaggcaggtgggggaggggctgtttaggggaccacgcagcgggagagccatccccaacaggaagggagcggttgtctgcaggagcagtgaccaggaactcctatggggcacctgggttgggggaagctggatttagggttagaagcttgtgtgtaaacaggaaatatcagtgtaaaacagaaaataaaatatgtaattaa

SEQ ID NO: 7241 - DNA, 873 bp, Homo sapiens
  source 1..873: mol_type = unassigned DNA
gcaggccgcggtggggtggggcggcgaaggccggaagggataaaaccgcagtcgccggcctcgcggggctcacggcctcgcctcggtatcgcagcgggtcctctctatctagctccagcctctcgcctgcgccccactccccgcgtcccgcgtcctagccgaccatggccgggcccctgcgcgccccgctgctcctgctggccatcctggccgtggccctggccgtgagccccgcggccggctccagtcccggcaagccgccgcgcctagtgggaggccccatggacgccagcgtggaggaggagggtgtgcggcgtgcactggactttgccgtcggcgagtacaacaaagccagcaacgacatgtaccacagccgcgcgctgcaggtggtgcgcgcccgcaagcagatcgtagctggggtgaactacttcttggacgtggagctgggccgaaccacgtgtaccaagacccagcccaacttggacaactgccccttccatgaccagccacatctgaaaaggaaagcattctgctctttccagatctacgctgtgccttggcagggcacaatgaccttgtcgaaatccacctgtcaggacgcctaggggtctgtaccgggctggcctgtgcctatcacctcttatgcacacctcccaccccctgtattcccacccctggactggtggcccctgccttggggaaggtctccccatgtgcctgcaccaggagacagacagagaaggcagcaggcggcctttgttgctcagcaaggggctctgccctccctccttccttcttgcttctcatagccccggtgtgcggtgcatacacccccacctcctgcaataaaatagtagcatcggctccctctga

SEQ ID NO: 7242 - DNA, 832 bp, Homo sapiens
  source 1..832: mol_type = unassigned DNA
ggaaagggacagaggagaaggagcctgaagagtggcggcatggaggggcccgaagtggggagcgggtcctctctatctagctccagcctctcgcctgcgccccactccccgcgtcccgcgtcctagccgaccatggccgggcccctgcgcgccccgctgctcctgctggccatcctggccgtggccctggccgtgagccccgcggccggctccagtcccggcaagccgccgcgcctagtgggaggccccatggacgccagcgtggaggaggagggtgtgcggcgtgcactggactttgccgtcggcgagtacaacaaagccagcaacgacatgtaccacagccgcgcgctgcaggtggtgcgcgcccgcaagcagatcgtagctggggtgaactacttcttggacgtggagctgggccgaaccacgtgtaccaagacccagcccaacttggacaactgccccttccatgaccagccacatctgaaaaggaaagcattctgctctttccagatctacgctgtgccttggcagggcacaatgaccttgtcgaaatccacctgtcaggacgcctaggggtctgtaccgggctggcctgtgcctatcacctcttatgcacacctcccaccccctgtattcccacccctggactggtggcccctgccttggggaaggtctccccatgtgcctgcaccaggagacagacagagaaggcagcaggcggcctttgttgctcagcaaggggctctgccctccctccttccttcttgcttctcatagccccggtgtgcggtgcatacacccccacctcctgcaataaaatagtagcatcggc

SEQ ID NO: 7243 - DNA, 2095 bp, Homo sapiens
  source 1..2095: mol_type = unassigned DNA
ctcggtatcgcagcgggtcctctctatctagctccagcctctcgcctgcgccccactccccgcgtcccgcgtcctagccgaccatggccgggcccctgcgcgccccgctgctcctgctggccatcctggccgtggccctggccgtgagccccgcggccggctccagtcccggcaagccgccgcgcctagtgggaggccccatggacgccagcgtggaggaggagggtgtgcggcgtgcactggactttgccgtcggcgagtacaacaaagccagcaacgacatgtaccacagccgcgcgctgcaggtggtgcgcgcccgcaagcagatcgtagctggggtgaactacttcttggacgtggagctgggccgaaccacgtgtaccaagacccagcccaacttggacaactgccccttccatgaccagccacatctgaaaaggaaagcattctgctctttccagatctacgctgtgccttggcagggcacaatgaccttgtcgaaatccacctgtcaggacgcctaggggaccctgatgaaaagactgaggaaaatgctgcctttcctgaatggctaccaggcagggaatgatgctgggaagtgtttaccccacaggctctgtgccttctctgactgggcagctcatgctgtatgcatggaggcatcattaccaaacacacctctgaggccagcggccagcgtctgactcacaagccatgactgccccaccttcttacaacaacaatagcagtttccccgtgaggattcacccctcctcccctctcactccgcctttttccagggaagctgactctaccctttggaccacagcttggagcacttgaccctggctaagctggtcagggcagcgggtctccctcccctgaagcctcatgattggcatgaggacaacacgtgacctatgtgtggctgcccaggacccacataggcttaacggtgggattttgtttgactgtgtgataagtgggttcttccttccctgctgagtgtgaagataaaaaagacttgaggtctggggcccacttggagcctgtttgagaatgaagccaagttatgggaagcaacaaaactgaagagacagcaaggaaaccaggcctggtggtgcactcccagctattctggaggctgacgcgggaggactgcgtgagctcagcagtttgaggctgcaatgagccatgatttcactactgaactccagcctgggcaaaagagcgagaccctgtgtctcagaaaaagagagagagaaacagagagcaaggagcaggtgggttataatggagtccctgcaccaagcagagcctgatgcccgcccttgctctgaacttcctagttatgtgaaccaaccaccaggccagttgggttgggtttccagccctgtgctcttgtctgtcctcactgacagacaaaaataactcatcagtcggttctcagacccacagtcccatgacatttcttgactgtttcagaagtaatgcctcaaggaccagcttgcagaaagtggaggacctgccccctggaccttacaagtagcaggccactcttaaaaatgcaaggaccacagatgtcaccatgactgaaaaatagaggctggccctgcctctgaagatgctgcaatggacttgtgttcaaggagaaattggctgtaacttcccttattgagatataatcgggctcatcgttaagctgtggtcagccagaagtgtagctgtgcccctgggattgaaatcagcaatcaatctggacatcctttttctatcttcatgaggcacctccccagtaccaaccaaatttcttggggatcccccgggacttctcataaatggaattgatttgaactcaggaaaccctcaaataggccagaacaactcactaattaaattcatcccctcccaaaaacaaaaacaaaaacaaaaaaaaacaacacacatgataggaaaaaaattttgcaaattatatatctgatatagaacttgtattcagaacatataatgaactcttacaactcaataagactggtaacccaattaaaaattctttttaaaaaaaccaatttaaaaataaaggcaaataacctaa

SEQ ID NO: 7244 - DNA, 756 bp, Homo sapiens
  source 1..756: mol_type = unassigned DNA
gggcttcctgcctcagccttctgctgctttgctctctgggagatccagctccttgctctgtgtcccagtagaacatgatgtggcccatgcacaccccactgctgctgctgactgccttgatggtggccgtggccgggagtgcctcggcccaatctaggaccttggcaggtggcatccatgccacagacctcaatgacaagagtgtgcagtgtgccctggactttgccatcagcgagtacaacaaggtcattaataaggatgagtactacagccgccctctgcaggtgatggctgcctaccagcagatcgtgggtggggtgaactactacttcaatgtgaagttcggtcgaaccacatgcaccaagtcccagcccaacttggacaactgtcccttcaatgaccagccaaaactgaaagaggaagagttctgctctttccagatcaatgaagttccctgggaggataaaatttccattctgaactacaagtgccggaaagtctaggggtctgtgcaaggcctgtcacactgaccacctcctactcccaccccctgtagtgctcccacccctggactggtggcccccaccctgggggaggtctcctcatgcgcctgcaccaggagacagacacagaaggtggcaggaggcctttgttgctcagcaggaggctctgcccttgctccttccttcttgcttctcatagccccagtgtgcagtgcacactctcccacctcctgcaattaaacagtagcattgc

SEQ ID NO: 7245 - DNA, 751 bp, Homo sapiens
  source 1..751: mol_type = unassigned DNA
gggctccctgcctcgggctctcaccctcctctcctgcagctccagctttgtgctctgcctctgaggagaccatggcccggcctctgtgtaccctgctactcctgatggctaccctggctggggctctggcctcgagctccaaggaggagaataggataatcccaggtggcatctatgatgcagacctcaatgatgagtgggtacagcgtgcccttcacttcgccatcagcgagtacaacaaggccaccgaagatgagtactacagacgcccgctgcaggtgctgcgagccagggagcagacctttgggggggtgaattacttcttcgacgtagaggtgggccgcaccatatgtaccaagtcccagcccaacttggacacctgtgccttccatgaacagccagaactgcagaagaaacagttgtgctctttcgagatctacgaagttccctgggaggacagaatgtccctggtgaattccaggtgtcaagaagcctaggggtctgtgccaggccagtcacaccgaccaccacccactcccacccactgtagtgctcccacccctggactggtggcccccaccctgcgggaggcctccccatgtgcctgtgccaagagacagacagagaaggctgcaggagtcctttgttgctcagcagggcgctctgccctccctccttccttcttgcttctaatagacctggtacatggtacacacacccccacctcctgcaattaaacagtagcatcgcc

SEQ ID NO: 7246 - DNA, 748 bp, Homo sapiens
  source 1..748: mol_type = unassigned DNA
gggatccccgcctcaggctctcaacctcctctcctgcagctccagctctgtgctctgcctccgaggagaccatggcctggcccctgtgcaccctgctgctcctgctggccacccaggctgtggccctggcctggagcccccaggaggaggacaggataatcgagggtggcatctatgatgcagacctcaatgatgagcgggtacagcgtgcccttcactttgtcatcagcgagtataacaaggccactgaagatgagtactacagacgcctgctgcgggtgctacgagccagggagcagatcgtgggcggggtgaattacttcttcgacatagaggtgggccgaaccatatgtaccaagtcccagcccaacttggacacctgtgccttccatgaacagccagaactgcagaagaaacagttgtgctctttccagatctacgaagttccctgggaggacagaatgtccctggtgaattccaggtgtcaagaagcctagggatctgtgccagggagtcacactgaccacctcctactcccaccccttgtagtgctcccacccctggactggtggcccccaccctgtgggaggtctccccatgcacctgcagcaggagaagacagagaaggctgcaggaggcctttgttgctcagcaggggactctgccctccctccttccttttgcttctcatagccctggtacatggtacacacacccccacctcctgcaattaaacagtagcatcacc

SEQ ID NO: 7247 - DNA, 760 bp, Homo sapiens
  source 1..760: mol_type = unassigned DNA
gggctccctgcctcgggctctcaccctcctctcctgcagctccagctttgtgctctgcctctgaggagaccatggcccagtatctgagtaccctgctgctcctgctggccaccctagctgtggccctggcctggagccccaaggaggaggataggataatcccgggtggcatctataacgcagacctcaatgatgagtgggtacagcgtgcccttcacttcgccatcagcgagtataacaaggccaccaaagatgactactacagacgtccgctgcgggtactaagagccaggcaacagaccgttgggggggtgaattacttcttcgacgtagaggtgggccgcaccatatgtaccaagtcccagcccaacttggacacctgtgccttccatgaacagccagaactgcagaagaaacagttgtgctctttcgagatctacgaagttccctgggagaacagaaggtccctggtgaaatccaggtgtcaagaatcctagggatctgtgccaggccattcgcaccagccaccacccactcccaccccctgtagtgctcccacccctggactggtggcccccaccctgcgggaggcctccccatgtgcctgcgccaagagacagacagagaaggctgcaggagtcctttgttgctcagcagggcgctctgccctccctccttccttcttgcttctaatagccctggtacatggtacacacccccccacctcctgcaattaaacagtagcatcgcctccctctga

SEQ ID NO: 7248 - DNA, 655 bp, Homo sapiens
  source 1..655: mol_type = unassigned DNA
caggaagtcacatagctttcacagtcaaaggaccagtgtcacctctgtggagacctgggtgactcaagcttgggagcactggggaagagaggcatggctcggggaggctgcactccagctttgtgctctgcctctgaggagaccatggcccagtatctgagtaccctgctgctcctgctggccaccctagctgtggccctggcctggagccccaaggaggaggataggataatcccgggtggcatctataacgcagacctcaatgatgagtgggtacagcgtgcccttcacttcgccatcagcgagtataacaaggccaccaaagatgactactacagacgtccgctgcgggtactaagagccaggcaacagaccgttgggggggtgaattacttcttcgacgtagaggtgggccgcaccatatgtaccaagtcccagcccaacttggacacctgtgccttccatgaacagccagaactgcagaagaaacagttgtgctctttcgagatctacgaagttccctgggagaacagaaggtccctggtgaaatccaggtgtcaagaatcctagggatctgtgccaggccattcgcaccagccaccacccactcccaccccctgtagtgctcccacccctggactggtggcccccaccc

SEQ ID NO: 7249 - DNA, 1952 bp, Homo sapiens
  source 1..1952: mol_type = unassigned DNA
ggagggcagcaccgccgggcttcgcgccatgacatcagccctggagtggtgcagtgtgcaaagcccactggttggcgtggcccgggacacgccttccgcggagcggaacaaaacggcgcgcaggccgggcgcacccagccgccacttccgagagcgcctgccgcccctgcgccgccgagccagctgccagaatgccgaactggggaggaggcaagaaatgtggggtgtgtcagaagacggtttactttgccgaagaggttcagtgcgaaggcaacagcttccataaatcctgcttcctgtgcatggtctgcaagaagaatctggacagtaccactgtggccgtgcatggtgaggagatttactgcaagtcctgctacggcaagaagtatgggcccaaaggctatggctacgggcagggcgcaggcaccctcagcactgacaagggggagtcgctgggtatcaagcacgaggaagcccctggccacaggcccaccaccaaccccaatgcatccaaatttgcccagaagattggtggctccgagcgctgcccccgatgcagccaggcagtctatgctgcggagaaggtgattggtgctgggaagtcctggcataaggcctgctttcgatgtgccaagtgtggcaaaggccttgagtcaaccaccctggcagacaaggatggcgagatttactgcaaaggatgttatgctaaaaacttcgggcccaagggctttggttttgggcaaggagctggggccttggtccactctgagtgaggccaccatcacccaccacaccctgcccactcctgcgcttttcatcgccattccattcccagcagctttggagacctccaggattatttctctgtcagccctgccacatatcactaatgacttgaacttgggcatctggctccctttggtttgggggtctgcctgaggtcccaccccactaaagggctccccaggcctgggatctgacaccatcaccagtaggagacctcagtgttttgggtctaggtgagagcaggcccctctccccacacctcgccccacagagctctgttcttagcctcctgtgctgcgtgtccatcatcagctgaccaagacacctgaggacacatcttggcacccagaggagcagcagcaacaggctggagggagagggaagcaagaccaagatgaggaggggggaaggctgggttttttggatctcagagattctcctctgtgggaaagaggttgagcttcctggtgtccctcagagtaagcctgaggagtcccagcttagggagtcactattggaggcagagaggcatgcaggcagggtcctaggagcccctgcttctccaggcctcttgcctttgagtctttgtggaatggatagcctcccactaggactgggaggagaataacccaggtcttaaggaccccaaagtcaggatgttgtttgatcttctcaaacatctagttccctgcttgatgggaggatcctaatgaaatacctgaaacatatattggcatttatcaatggctcaaatcttcatttatctctggccttaaccctggctcctgaggctgcggccagcagagcccaggccagggctctgttcttgccacacctgcttgatcctcagatgtggagggaggtaggcactgcctcagtcttcatccaaacacctttccctttgccctgagacctcagaatcttccctttaacccaagaccctgcctcttccactccacccttctccagggacccttagatcacatcactccacccctgccaggccccaggttaggaatagtggtgggaggaaggggaaagggctgggcctcaccgctcccagcaactgaaaggacaacactatctggagccacccactgaaagggctgcaggcatgggctgtacccaagctgatttctcatctggtcaataaagctgtttagacc

SEQ ID NO: 7250 - DNA, 2129 bp, Homo sapiens
  source 1..2129: mol_type = unassigned DNA
ggcttgttcctgtttgcatgacaggaaactcctgaaatgcccctcgcacgtgcaagacgttttccgcggtggcggcgacagggcgcacagtgggaccgcagcacgagctcggagcacccccagagtcggcgactcctgcccccgcccctgccggccggccttcccggggcctaggagggcagcaccgccgggcttcgcgccatgacatcagccctggagtggtgcagtgtgcaaagcccactggttggcgtggcccgggacacgccttccgcggagcggaacaaaacggcgcgcaggccgggcgcacccagccgccacttccgagagcgcctgccgcccctgcgccgccgagccagctgccagaatgccgaactggggaggaggcaagaaatgtggggtgtgtcagaagacggtttactttgccgaagaggttcagtgcgaaggcaacagcttccataaatcctgcttcctgtgcatggtctgcaagaagaatctggacagtaccactgtggccgtgcatggtgaggagatttactgcaagtcctgctacggcaagaagtatgggcccaaaggctatggctacgggcagggcgcaggcaccctcagcactgacaagggggagtcgctgggtatcaagcacgaggaagcccctggccacaggcccaccaccaaccccaatgcatccaaatttgcccagaagattggtggctccgagcgctgcccccgatgcagccaggcagtctatgctgcggagaaggtgattggtgctgggaagtcctggcataaggcctgctttcgatgtgccaagtgtggcaaaggccttgagtcaaccaccctggcagacaaggatggcgagatttactgcaaaggatgttatgctaaaaacttcgggcccaagggctttggttttgggcaaggagctggggccttggtccactctgagtgaggccaccatcacccaccacaccctgcccactcctgcgcttttcatcgccattccattcccagcagctttggagacctccaggattatttctctgtcagccctgccacatatcactaatgacttgaacttgggcatctggctccctttggtttgggggtctgcctgaggtcccaccccactaaagggctccccaggcctgggatctgacaccatcaccagtaggagacctcagtgttttgggtctaggtgagagcaggcccctctccccacacctcgccccacagagctctgttcttagcctcctgtgctgcgtgtccatcatcagctgaccaagacacctgaggacacatcttggcacccagaggagcagcagcaacaggctggagggagagggaagcaagaccaagatgaggaggggggaaggctgggttttttggatctcagagattctcctctgtgggaaagaggttgagcttcctggtgtccctcagagtaagcctgaggagtcccagcttagggagtcactattggaggcagagaggcatgcaggcagggtcctaggagcccctgcttctccaggcctcttgcctttgagtctttgtggaatggatagcctcccactaggactgggaggagaataacccaggtcttaaggaccccaaagtcaggatgttgtttgatcttctcaaacatctagttccctgcttgatgggaggatcctaatgaaatacctgaaacatatattggcatttatcaatggctcaaatcttcatttatctctggccttaaccctggctcctgaggctgcggccagcagagcccaggccagggctctgttcttgccacacctgcttgatcctcagatgtggagggaggtaggcactgcctcagtcttcatccaaacacctttccctttgccctgagacctcagaatcttccctttaacccaagaccctgcctcttccactccacccttctccagggacccttagatcacatcactccacccctgccaggccccaggttaggaatagtggtgggaggaaggggaaagggctgggcctcaccgctcccagcaactgaaaggacaacactatctggagccacccactgaaagggctgcaggcatgggctgtacccaagctgatttctcatctggtcaataaagctgtttagaccagaa

SEQ ID NO: 7251 - DNA, 1469 bp, Homo sapiens
  source 1..1469: mol_type = unassigned DNA
atcctttagagtgcctagcacagggctgaaaatgcagcagctgctctgtaaagacctgttgattagattggggggaggaaatccccgagaacgtgcgaggctgctgtcgagagctagcagaaagtgctctgccaggcctggtggccccccagaatgccgaactggggaggaggcaagaaatgtggggtgtgtcagaagacggtttactttgccgaagaggttcagtgcgaaggcaacagcttccataaatcctgcttcctgtgcatggtctgcaagaagaatctggacagtaccactgtggccgtgcatggtgaggagatttactgcaagtcctgctacggcaagaagtatgggcccaaaggctatggctacgggcagggcgcaggcaccctcagcactgacaagggggagtcgctgggtatcaagcacgaggaagcccctggccacaggcccaccaccaaccccaatgcatccaaatttgcccagaagattggtggctccgagcgctgcccccgatgcagccaggcagtctatgctgcggagaaggtgattggtgctgggaagtcctggcataaggcctgctttcgatgtgccaagtgtggcaaaggccttgagtcaaccaccctggcagacaaggatggcgagatttactgcaaaggatgttatgctaaaaacttcgggcccaagggctttggttttgggcaaggagctggggccttggtccactctgagtgaggccaccatcacccaccacaccctgcccactcctgcgcttttcatcgccattccattcccagcagctttggagacctccaggattatttctctgtcagccctgccacatatcactaatgacttgaacttgggcatctggctccctttggtttgggggtctgcctgaggtcccaccccactaaagggctccccaggcctgggatctgacaccatcaccagtaggagacctcagtgttttgggtctaggtgagagcaggcccctctccccacacctcgccccacagagctctgttcttagcctcctgtgctgcgtgtccatcatcagctgaccaagacacctgaggacacatcttggcacccagaggagcagcagcaacaggctggagggagagggaagcaagaccaagatgaggaggggggaaggctgggttttttggatctcagagattctcctctgtgggaaagaggttgagcttcctggtgtccctcagagtaagcctgaggagtcccagcttagggagtcactattggaggcagagaggcatgcaggcagggtcctaggagcccctgcttctccaggcctcttgcctttgagtctttgtggaatggatagcctcccactaggactgggaggagaataacccaggtcttaaggaccccaaagtcaggatgttgtttgatcttctcaaacatctagttccctgcttgatgggaggatcctaatgaaatacctg

SEQ ID NO: 7252 - DNA, 1149 bp, Homo sapiens
  source 1..1149: mol_type = unassigned DNA
gtgcgtgacccagggcgacccggctccccgcaaccgcctgcaagtcgggcagaacaatcggcgattctgcgcgccactgacgctcattgtatggcagagagatgagggcatccgtgccaccccctccctcaccctcctgctggggagaaaatgcccgcgggcggggtggggcaaacatctgggcctgaccttggacatctgtgtccctgagcgcagaatgccgaactggggaggaggcaagaaatgtggggtgtgtcagaagacggtttactttgccgaagaggttcagtgcgaaggcaacagcttccataaatcctgcttcctgtgcatggtctgcaagaagaatctggacagtaccactgtggccgtgcatggtgaggagatttactgcaagtcctgctacggcaagaagtatgggcccaaaggctatggctacgggcagggcgcaggcaccctcagcactgacaagggggagtcgctgggtatcaagcacgaggaagcccctggccacaggcccaccaccaaccccaatgcatccaaatttgcccagaagattggtggctccgagcgctgcccccgatgcagccaggcagtctatgctgcggagaaggtgattggtgctgggaagtcctggcataaggcctgctttcgatgtgccaagtgtggcaaaggccttgagtcaaccaccctggcagacaaggatggcgagatttactgcaaaggatgttatgctaaaaacttcgggcccaagggctttggttttgggcaaggagctggggccttggtccactctgagtgaggccaccatcacccaccacaccctgcccactcctgcgcttttcatcgccattccattcccagcagctttggagacctccaggattatttctctgtcagccctgccacatatcactaatgacttgaacttgggcatctggctccctttggtttgggggtctgcctgaggtcccaccccactaaagggctccccaggcctgggatctgacaccatcaccagtaggagacctcagtgttttgggtctaggtgagagcaggcccctctccccacacctcgccccacagagctctgttcttagcctcctgtgctgcgtgtccatcatcagctgaccaagacacctgaggacacat

SEQ ID NO: 7253 - DNA, 1749 bp, Homo sapiens
  source 1..1749: mol_type = unassigned DNA
agccgccacttccgagagcgcctgccgcccctgcgccgccgagccagctgccagaatgccgaactggggaggaggcaagaaatgtggggtgtgtcagaagacggtttactttgccgaagaggttcagtgcgaaggcaacagcttccataaatcctgcttcctgtgcatggtctgcaagaagaatctggacagtaccactgtggccgtgcatggtgaggagatttactgcaagtcctgctacggcaagaagtatgggcccaaaggctatggctacgggcagggcgcaggcaccaaccccaatgcatccaaatttgcccagaagattggtggctccgagcgctgcccccgatgcagccaggcagtctatgctgcggagaaggtgattggtgctgggaagtcctggcataaggcctgctttcgatgtgccaagtgtggcaaaggccttgagtcaaccaccctggcagacaaggatggcgagatttactgcaaaggatgttatgctaaaaacttcgggcccaagggctttggttttgggcaaggagctggggccttggtccactctgagtgaggccaccatcacccaccacaccctgcccactcctgcgcttttcatcgccattccattcccagcagctttggagacctccaggattatttctctgtcagccctgccacatatcactaatgacttgaacttgggcatctggctccctttggtttgggggtctgcctgaggtcccaccccactaaagggctccccaggcctgggatctgacaccatcaccagtaggagacctcagtgttttgggtctaggtgagagcaggcccctctccccacacctcgccccacagagctctgttcttagcctcctgtgctgcgtgtccatcatcagctgaccaagacacctgaggacacatcttggcacccagaggagcagcagcaacaggctggagggagagggaagcaagaccaagatgaggaggggggaaggctgggttttttggatctcagagattctcctctgtgggaaagaggttgagcttcctggtgtccctcagagtaagcctgaggagtcccagcttagggagtcactattggaggcagagaggcatgcaggcagggtcctaggagcccctgcttctccaggcctcttgcctttgagtctttgtggaatggatagcctcccactaggactgggaggagaataacccaggtcttaaggaccccaaagtcaggatgttgtttgatcttctcaaacatctagttccctgcttgatgggaggatcctaatgaaatacctgaaacatatattggcatttatcaatggctcaaatcttcatttatctctggccttaaccctggctcctgaggctgcggccagcagagcccaggccagggctctgttcttgccacacctgcttgatcctcagatgtggagggaggtaggcactgcctcagtcttcatccaaacacctttccctttgccctgagacctcagaatcttccctttaacccaagaccctgcctcttccactccacccttctccagggacccttagatcacatcactccacccctgccaggccccaggttaggaatagtggtgggaggaaggggaaagggctgggcctcaccgctcccagcaactgaaaggacaacactatctggagccacccactgaaagggctgcaggcatgggctgtacccaagctgatttctcatctggtcaataaagctgtttagaccag

SEQ ID NO: 7254 - DNA, 943 bp, Homo sapiens
  source 1..943: mol_type = unassigned DNA
caccgagcgctctttaaaaggcaccggcgcgcgcttcgcctgggatctcggactccctggaccctccctccagcccagcctcgctagctccgcctgcggtacgtgctcccgcctccgactcaaaatgcctgtctggggaggtggaaacaagtgtggggcctgtgggaggaccgtgtaccacgcagaagaggtgcagtgtgatggcaggagcttccaccgctgctgctttctctgcatggtttgcaggaaaaatttagatagcacaacagtggcaattcacgatgaagagatctactgcaaatcctgctacggaaagaagtatgggccaaaaggctacggttatggccagggcgctggcacgcttaacatggaccgtggcgagaggctgggcatcaaaccagagagtgttcagcctcacaggcctacaacaaatccaaacacttctaaatttgctcagaaatatggaggtgctgagaagtgttccagatgtggggattctgtatatgctgccgagaagataattggagctggaaagccctggcacaaaaactgtttccgatgtgcaaagtgtgggaagagtcttgaatcaacaactctgactgaaaaagaaggtgaaatctattgtaaaggatgctatgcaaagaactttgggcccaagggatttggctatggccaaggagcaggggctcttgttcatgcccagtaagatgtaaaccctgaactaaacatcacacactgagaatctcttcataatctaggcacagataatctttaacactaaactactgtgaaattctaccagcattaagtactgtatatcgccctgtacttggataggctggctaactcgtaggaagagagcactgtatggtatccttttgctttattcaccagcattttgggggaacatttcttttacattttaaataaaacttcagcttga

SEQ ID NO: 7255 - DNA, 754 bp, Homo sapiens
  source 1..754: mol_type = unassigned DNA
gcctgggatctcggactccctggaccctccctccagcccagcctcgctagctccgcctgcgaatgcctgtctggggaggtggaaacaagtgtggggcctgtgggaggaccgtgtaccacgcagaagaggtgcagtgtgatggcaggagcttccaccgctgctgctttctctgcatggtttgcaggaaaaatttagatagcacaacagtggcaattcacgatgaagagatctactgcaaatcctgctacggaaagaagtatgggccaaaaggctacggttatggccagggcgctggcacgcttaacatggaccgtggcgagaggctgggcatcaaaccagagagtgttcagcctcacaggcctacaacaaatccaaacacttctaaatttgctcagaaatatggaggtgctgagaagtgttccagatgtggggattctgtatatgctgccgagaagataattggagctggaaagccctggcacaaaaactgtttccgatgtgcaaagtgtgggaagagtcttgaatcaacaactctgactgaaaaagaaggtgaaatctattgtaaaggatgctatgcaaagaactttgggcccaagggatttggctatggccaaggagcaggggctcttgttcatgcccagtaagatgtaaaccctgaactaaacatcacacactgagaatctcttcataatctaggcacagataatctttaacactaaactactgtgaaattctaccagcattaagtactgta

SEQ ID NO: 7256 - DNA, 1341 bp, Homo sapiens
  source 1..1341: mol_type = unassigned DNA
caggccaaggctggtgacagccttcatatatttaaagaggacaagagcccctcagactcagttgagctgaacggagtccacacaggcagacttgaccttgaccagatagtcttcaagatgccaaactggggcggaggcgcaaaatgtggagcctgtgaaaagaccgtctaccatgcagaagaaatccagtgcaatggaaggagtttccacaagacgtgtttccactgcatggcctgcaggaaggctcttgacagcacgacagtcgcggctcatgagtcggagatctactgcaaggtgtgctatgggcgcagatatggccccaaagggatcgggtatggacaaggcgctggctgtctcagcacagacacgggcgagcatctcggcctgcagttccaacagtccccaaagccggcacgctcagttaccaccagcaacccttccaaattcactgcgaagtttggagagtccgagaagtgccctcgatgtggcaagtcagtctatgctgctgagaaggttatgggaggtggcaagccttggcacaagacctgtttccgctgtgccatctgtgggaagagtctggagtccacaaatgtcactgacaaagatggggaactttattgcaaagtttgctatgccaaaaattttggccccacgggtattgggtttggaggccttacacaacaagtggaaaagaaagaatgaagaggtgcgccgtttctcagattttttgcgagcctaaaacacttgccaagtaatcctgcacagatcgatacctttccccaaatagcctctcctttgtagtcgtacattatgtgtttctcctcagaagtgatcaggtctttactgaatgttagaagaggcctttggaagaaaattatgtaaagtttaatctataacaaatgctttattatttataatgcttggaatgggagaggcaataaataaatgttttagtgctatcttgtatggctctagatcttttctttgagatagaaattttcaaaaacataaagctagttcaaaaaacgagttgcagagcatataataaatttggatgtcaactgagaaaggagtgagaaggaagaaacaatgcgcaaaggaaagcagtctttcagaatctgtcagccaagtgtctttctagttactgctaatggagaagaaaacagggggtctgggagaaaatagagaacatgatagcaaaatctaaaaggaaaatcaaaactaataaaattgctgaagagttgatccctttgtcctatcgtggggctttgtaatgttacacatctcgtgaaaactcagaaatgacaataaagcgtggcatttgcctctgtattataaatg

SEQ ID NO: 7257 - DNA, 1456 bp, Homo sapiens
  source 1..1456: mol_type = unassigned DNA
gcagtgagccgagatcgcgccactacactccagactgggcgacagagccagactccgtctcaaaaaaaaaaaaaaaaaaagagagagagcaccttaggaatcatctgcctcacacgaatattctcaggccaaggctggtgacagccttcatatatttaaagaggacaagagcccctcagactcagttgagctgaacggagtccacacaggcagacttgaccttgaccagatagtcttcaagatgccaaactggggcggaggcgcaaaatgtggagcctgtgaaaagaccgtctaccatgcagaagaaatccagtgcaatggaaggagtttccacaagacgtgtttccactgcatggcctgcaggaaggctcttgacagcacgacagtcgcggctcatgagtcggagatctactgcaaggtgtgctatgggcgcagatatggccccaaagggatcgggtatggacaaggcgctggctgtctcagcacagacacgggcgagcatctcggcctgcagttccaacagtccccaaagccggcacgctcagttaccaccagcaacccttccaaattcactgcgaagtttggagagtccgagaagtgccctcgatgtggcaagtcagtctatgctgctgagaaggttatgggaggtggcaagccttggcacaagacctgtttccgctgtgccatctgtgggaagagtctggagtccacaaatgtcactgacaaagatggggaactttattgcaaagtttgctatgccaaaaattttggccccacgggtattgggtttggaggccttacacaacaagtggaaaagaaagaatgaagaggtgcgccgtttctcagattttttgcgagcctaaaacacttgccaagtaatcctgcacagatcgatacctttccccaaatagcctctcctttgtagtcgtacattatgtgtttctcctcagaagtgatcaggtctttactgaatgttagaagaggcctttggaagaaaattatgtaaagtttaatctataacaaatgctttattatttataatgcttggaatgggagaggcaataaataaatgttttagtgctatcttgtatggctctagatcttttctttgagatagaaattttcaaaaacataaagctagttcaaaaaacgagttgcagagcatataataaatttggatgtcaactgagaaaggagtgagaaggaagaaacaatgcgcaaaggaaagcagtctttcagaatctgtcagccaagtgtctttctagttactgctaatggagaagaaaacagggggtctgggagaaaatagagaacatgatagcaaaatctaaaaggaaaatcaaaactaataaaattgctgaagagttgatccctttgtcctatcgtggggctttgtaatgttacacatctcgtgaaaactcagaaatgacaataaagcgtggcatttgcctctgta

SEQ ID NO: 7258 - DNA, 2070 bp, Homo sapiens
  source 1..2070: mol_type = unassigned DNA
cgcgatcgcggcggaccccaccgtcatcgcgcgccgtgagtcacactccacagccaatccctggccacatccgggctcgcccccgccccgcccccttgttcccgcaagcccggaactgcccaaatcccgcccctcccctcccaaaaaaacacccctcatccagtctcttccagcctagagatcctggcctacccctccgccaaagcgcgcactgagtgcaaaccccagagtcaatccctgtcccggctccgccccccgcgtccgaatcccgcccagccgggccctcaagcccagtcgggactcgagcctagggaggcgaggttcccgcaccggatagcatgtttttggcccagaggagcctctgctctcttagcggtagagcaaaattcctgaagacaatttcttcttccaaaatcctcggattctctacttctgctaaaatgtcactgaaattcacaaatgcaaaacggattgaaggacttgatagtaatgtgtggattgaatttaccaaattggctgcagacccttctgttgtgaatcttggccaaggctttccagatatatcccctcctacatatgtaaaagaagaattatcaaagattgcagcaatcgatagcctgaatcagtatacacgaggctttggccatccatcacttgtgaaagctctgtcctatctgtatgaaaagctttatcaaaagcaaattgattcaaataaagaaatccttgtgacagtaggagcatatggatctctttttaacaccattcaagcattaattgatgagggagatgaagtcatactaatagtgcctttctatgactgctatgagcccatggtgagaatggctggagcaacacctgtttttattcccctgagatctaaacctgtttatggaaaaagatggtctagttctgactggacattagatcctcaagaactggaaagtaaatttaattccaaaaccaaagctattatactaaatactccacataacccacttggcaaggtgtataacagagaggaactgcaagtaattgctgacctttgcatcaaatatgacacactctgcatcagcgatgaggtttatgaatggcttgtatattctggaaataagcacttaaaaatagctacttttccaggtatgtgggagagaacaataacaataggaagtgctggaaagactttcagtgtaactggctggaagcttggctggtccattggtccaaatcatttgataaaacatttacagacagttcaacaaaacacgatttatacttgtgcaactcctttacaggaagccttggctcaagctttctggattgacatcaagcgcatggatgacccagaatgttactttaattctttgccaaaagagttagaagtaaaaagagatcggatggtacgtttacttgaaagtgttggcctaaaacccatagttcctgatggaggatacttcatcatcgctgatgtgtctttgctagatccagacctctctgatatgaagaataatgagccttatgactataagtttgtgaaatggatgactaaacataagaaactatcagccatccccgtttcagcattctgtaactcagagactaaatcacagtttgagaagtttgtgcgtttttgcttcattaaaaaagacagcacactggatgctgctgaagaaatcatcaaggcatggagtgtacagaagtcttgatttgtgcagaatggattaatgtttctgttagatgacctagtatggaattgttacttagtgctgccacctgctggatgttaaaaggtatttcagtacaactggaatttaaatatttccattgtttttccaaagcagttaacccaactcctaacaacattttcgggggatctgaccttttttttccagttgaaatgtattaacacaccttccacaatcattttataagagtcagcataacatagtggataagaaatgtgagatgtttaacctctcagtaactcggttctctcattataaaataggaataaaatcagtacctgtttcatatgaaggtcgtttctgagaattaaatggactaatgtatgca

SEQ ID NO: 7259 - DNA, 1867 bp, Homo sapiens
  source 1..1867: mol_type = unassigned DNA
gaggttcccgcaccggatagcatgtttttggcccagaggagcctctgctctcttagcggtagagcaaaattcctgaagacaatttcttcttccaaaatcctcggattctctacttctgctaaaatgtcactgaaattcacaaatgcaaaacggattgaaggacttgatagtaatgtgtggattgaatttaccaaattggctgcagacccttctgttgtgaatcttggccaaggctttccagatatatcccctcctacatatgtaaaagaagaattatcaaagattgcagcaatcgatagcctgaatcagtatacacgaggctttggccatccatcacttgtgaaagctctgtcctatctgtatgaaaagctttatcaaaagcaaattgattcaaataaagaaatccttgtgacagtaggagcatatggatctctttttaacaccattcaagcattaattgatgagggagatgaatataatgcatgtacagtaaagttcacaaatcttaaatgtacagctggataaattactgtgtaaatttctgtgcaactacaaccagacaaagatatgatacatttccagtacccagaaaacttctttgttcctcttcagagtctatattctcccagaggtcatactaatagtgcctttctatgactgctatgagcccatggtgagaatggctggagcaacacctgtttttattcccctgagatctaaacctgtttatggaaaaagatggtctagttctgactggacattagatcctcaagaactggaaagtaaatttaattccaaaaccaaagctattatactaaatactccacataacccacttggcaaggtgtataacagagaggaactgcaagtaattgctgacctttgcatcaaatatgacacactctgcatcagcgatgaggtttatgaatggcttgtatattctggaaataagcacttaaaaatagctacttttccaggtatgtgggagagaacaataacaataggaagtgctggaaagactttcagtgtaactggctggaagcttggctggtccattggtccaaatcatttgataaaacatttacagacagttcaacaaaacacgatttatacttgtgcaactcctttacaggaagccttggctcaagctttctggattgacatcaagcgcatggatgacccagaatgttactttaattctttgccaaaagagttagaagtaaaaagagatcggatggtacgtttacttgaaagtgttggcctaaaacccatagttcctgatggaggatacttcatcatcgctgatgtgtctttgctagatccagacctctctgatatgaagaataatgagccttatgactataagtttgtgaaatggatgactaaacataagaaactatcagccatccccgtttcagcattctgtaactcagagactaaatcacagtttgagaagtttgtgcgtttttgcttcattaaaaaagacagcacactggatgctgctgaagaaatcatcaaggcatggagtgtacagaagtcttgatttgtgcagaatggattaatgtttctgttagatgacctagtatggaattgttacttagtgctgccacctgctggatgttaaaaggtatttcagtacaactggaatttaaatatttccattgtttttccaaagcagttaacccaactcctaacaacattttcgggggatctgaccttttttttccagttgaaatgtattaacacaccttccacaatcattttataagagtcagcataacatagtggataagaaatgtgagatgtttaacctctcagtaactcggttctctcattataaaataggaataaaatcagtacctgtttc

SEQ ID NO: 7260 - DNA, 1019 bp, Homo sapiens
  source 1..1019: mol_type = unassigned DNA
ccaccccttccctcctccatttccatccattccgcgatcgcggcggaccccaccgtcatcgcgcgcccctagagatcctggcctacccctccgccaaagcgcgcactgagtgcaaaccccagagtcaatccctgtcccggctccgccccccgcgtccgaatcccgcccagccgggccctcaagcccagtcgggactcgagcctagggaggcgaggttcccgcaccggatagcatgtttttggcccagaggagcctctgctctcttagcggtagagcaaaattcctgaagacaatttcttcttccaaaatcctcggattctctacttctgctaaaatgtcactgaaattcacaaatgcaaaacggattgaaggacttgatagtaatgtgtggattgaatttaccaaattggctgcagacccttctgttgtgaatcttggccaaggctttccagatatatcccctcctacatatgtaaaagaagaattatcaaagattgcagcaatcgatagcctgaatcagtatacacgaggctttggccatccatcacttgtgaaagctctgtcctatctgtatgaaaagctttatcaaaagcaaattgattcaaataaagaaatccttgtgacagtaggagcatatggatctctttttaacaccattcaagcattaattgatgagggagatgaagtcatactaatagtgcctttctatgactgctatgagcccatggtgagaatggctggagcaacacctgtttttattcccctgagatctaaacctgtttatggaaaaagatggtctagttctgactggacattagatcctcaagaactggaaagtaaatttaattccaaaaccaaagctattatactaaatactccacataacccacttggcaaggtgtataacagagaggaactgcaagtaattgctgacctttgcatcaaatatgacacactctgcatcagcgatgaggtttatgaatggcttgtatattctggaaataagcacttaaaaatag

SEQ ID NO: 7261 - DNA, 1868 bp, Homo sapiens
  source 1..1868: mol_type = unassigned DNA
aaaacacccctcatccagtctcttccagcctagagatcctggcctacccctccgccaaagcgcgcactgagtgcaaaccccagagtcaatccctgtcccggctccgccccccgcgtccgaatcccgcccagccgggccctcaagcccagtcgggactcgagcctagggaggcgaggttcccgcaccggatagaaaatgtcactgaaattcacaaatgcaaaacggattgaaggacttgatagtaatgtgtggattgaatttaccaaattggctgcagacccttctgttgtgaatcttggccaaggctttccagatatatcccctcctacatatgtaaaagaagaattatcaaagattgcagcaatcgatagcctgaatcagtatacacgaggctttggccatccatcacttgtgaaagctctgtcctatctgtatgaaaagctttatcaaaagcaaattgattcaaataaagaaatccttgtgacagtaggagcatatggatctctttttaacaccattcaagcattaattgatgagggagatgaagtcatactaatagtgcctttctatgactgctatgagcccatggtgagaatggctggagcaacacctgtttttattcccctgagatctaaacctgtttatggaaaaagatggtctagttctgactggacattagatcctcaagaactggaaagtaaatttaattccaaaaccaaagctattatactaaatactccacataacccacttggcaaggtgtataacagagaggaactgcaagtaattgctgacctttgcatcaaatatgacacactctgcatcagcgatgaggtttatgaatggcttgtatattctggaaataagcacttaaaaatagctacttttccaggtatgtgggagagaacaataacaataggaagtgctggaaagactttcagtgtaactggctggaagcttggctggtccattggtccaaatcatttgataaaacatttacagacagttcaacaaaacacgatttatacttgtgcaactcctttacaggaagccttggctcaagctttctggattgacatcaagcgcatggatgacccagaatgttactttaattctttgccaaaagagttagaagtaaaaagagatcggatggtacgtttacttgaaagtgttggcctaaaacccatagttcctgatggaggatacttcatcatcgctgatgtgtctttgctagatccagacctctctgatatgaagaataatgagccttatgactataagtttgtgaaatggatgactaaacataagaaactatcagccatccccgtttcagcattctgtaactcagagactaaatcacagtttgagaagtttgtgcgtttttgcttcattaaaaaagacagcacactggatgctgctgaagaaatcatcaaggcatggagtgtacagaagtcttgatttgtgcagaatggattaatgtttctgttagatgacctagtatggaattgttacttagtgctgccacctgctggatgttaaaaggtatttcagtacaactggaatttaaatatttccattgtttttccaaagcagttaacccaactcctaacaacattttcgggggatctgaccttttttttccagttgaaatgtattaacacaccttccacaatcattttataagagtcagcataacatagtggataagaaatgtgagatgtttaacctctcagtaactcggttctctcattataaaataggaataaaatcagtacctgtttcatatgaaggtcgtttctgagaattaaatggactaatgtatgcaaaaagcctggcaaacaataaacactcatctgactttagccggt

SEQ ID NO: 7262 - DNA, 1903 bp, Homo sapiens
  source 1..1903: mol_type = unassigned DNA
ttctagcggcgctttctcccgctctcgcctccgcgctagcgccctgctgcttcggggcggaagtagcggagccgggctcggcccccttaaagggacagggactgctgcaacctacggggtgtacttgggaacgaggggtgaagcggcccaggtgaggctcgccatggccaaacagctgcaggcccgaaggctagacgggatcgactacaacccctgggtggagtttgtgaaactggccagtgagcatgacgtcgtgaacttgggccagggcttcccggatttcccaccaccagactttgccgtggaagcctttcagcacgctgtcagtggagacttcatgcttaaccagtacaccaagacatttggttacccaccactgacgaagatcctggcaagtttctttggggagctgctgggtcaggagatagacccgctcaggaatgtgctggtgactgttggtggctatggggccctgttcacagccttccaggccctggtggacgaaggagacgaggtcatcatcatcgaacccttttttgactgctacgagcccatgacaatgatggcagggggtcgtcctgtgtttgtgtccctgaagccgggtcccatccagaatggagaactgggttccagcagcaactggcagctggaccccatggagctggccggcaaattcacatcacgcaccaaagccctggtcctcaacacccccaacaaccccctgggcaaggtgttctccagggaagagctggagctggtggccagcctttgccagcagcatgacgtggtgtgtatcactgatgaagtctaccagtggatggtctacgacgggcaccagcacatcagcattgccagcctccctggcatgtgggaacggaccctgaccatcggcagcgccggcaagaccttcagcgccactggctggaaggtgggctgggtcctgggtccagatcacatcatgaagcacctgcggaccgtgcaccagaactccgtcttccactgccccacgcagagccaggctgcagtagccgagagctttgaacgggagcagctgctcttccgccaacccagcagctactttgtgcagttcccgcaggccatgcagcgctgccgtgaccacatgatacgtagcctacagtcagtgggcctgaagcccatcatccctcagggcagctacttcctcatcacagacatctcagacttcaagaggaagatgcctgacttgcctggagctgtggatgagccctatgacagacgcttcgtcaagtggatgatcaagaacaagggcttggtggccatccctgtctccatcttctatagtgtgccacatcagaagcactttgaccactatatccgcttctgttttgtgaaggatgaagccacgctccaggccatggacgagaagctgcggaagtggaaggtggaactctagccctgaagtcacgccttggccctgacatccccacatgcccgcagagatcctctttgagtgtctgtctttgtccaggtttcagacatttctaggttggggaagatgctattgggaaacctcttctccgtgacacagaatgttctgggtgggagccgcccttcttcatcttagagaaccaagtgcctcctgtctgaaaggtgagggtggcctgacctgggcctctccctgcccctccataggtgggtttgtagggtcttgtgttgcttctggtctctccaggcttggctgagacggacggtagacttccaccatgtaccgatcacatcccagctctgcatggcccctgctaaggctcaggtataacctcaccttccctggctcatcttggccttggggagttgcctttaggcttgagtcctcaagcctctccttttcgtccataataaaatgtttaagttattaagatcctta

SEQ ID NO: 7263 - DNA, 1623 bp, Homo sapiens
  source 1..1623: mol_type = unassigned DNA
ttgggaacgaggggtgaagcggcccaggtgaggctcgccatggccaaacagctgcaggcccgaaggctagacgggatcgactacaacccctgggtggagtttgtgaaactggccagtgagcatgacgtcgtgaacttgggccagggcttcccggatttcccaccaccagactttgccgtggaagcctttcagcacgctgtcagtggagacttcatgcttaaccagtacaccaagacatttgtcatcatcatcgaacccttttttgactgctacgagcccatgacaatgatggcagggggtcgtcctgtgtttgtgtccctgaagccgggtcccatccagaatggagaactgggttccagcagcaactggcagctggaccccatggagctggccggcaaattcacatcacgcaccaaagccctggtcctcaacacccccaacaaccccctgggcaaggtgttctccagggaagagctggagctggtggccagcctttgccagcagcatgacgtggtgtgtatcactgatgaagtctaccagtggatggtctacgacgggcaccagcacatcagcattgccagcctccctggcatgtgggaacggaccctgaccatcggcagcgccggcaagaccttcagcgccactggctggaaggtgggctgggtcctgggtccagatcacatcatgaagcacctgcggaccgtgcaccagaactccgtcttccactgccccacgcagagccaggctgcagtagccgagagctttgaacgggagcagctgctcttccgccaacccagcagctactttgtgcagttcccgcaggccatgcagcgctgccgtgaccacatgatacgtagcctacagtcagtgggcctgaagcccatcatccctcagggcagctacttcctcatcacagacatctcagacttcaagaggaagatgcctgacttgcctggagctgtggatgagccctatgacagacgcttcgtcaagtggatgatcaagaacaagggcttggtggccatccctgtctccatcttctatagtgtgccacatcagaagcactttgaccactatatccgcttctgttttgtgaaggatgaagccacgctccaggccatggacgagaagctgcggaagtggaaggtggaactctagccctgaagtcacgccttggccctgacatccccacatgcccgcagagatcctctttgagtgtctgtctttgtccaggtttcagacatttctaggttggggaagatgctattgggaaacctcttctccgtgacacagaatgttctgggtgggagccgcccttcttcatcttagagaaccaagtgcctcctgtctgaaaggtgagggtggcctgacctgggcctctccctgcccctccataggtgggtttgtagggtcttgtgttgcttctggtctctccaggcttggctgagacggacggtagacttccaccatgtaccgatcacatcccagctctgcatggcccctgctaaggctcaggtataacctcaccttccctggctcatcttggccttggggagttgcctttaggcttgagtcctcaagcctctccttttcgtccataataaaatgtttaagttattaaga

SEQ ID NO: 7264 - DNA, 2105 bp, Homo sapiens
  source 1..2105: mol_type = unassigned DNA
gtcgccatctttatgaggagaattctagcggcgctttctcccgctctcgcctccgcgctagcgccctgctgcttcggggcggaagtagcggagccgggctcggcccccttaaagggacagggactgctgcaacctacggggtgtacttgggaacgaggggtgaagcggcccaggtgaggctcgccatggccaaacagctgcaggcccgaaggctagacgggatcgactacaacccctgggtggagtttgtgaaactggccagtgagcatgacgtcgtgaacttgggccagggcttcccggatttcccaccaccagactttgccgtggaagcctttcagcacgctgtcagtggagacttcatgcttaaccagtacaccaagacatttgtctcactctgttatccaggctggagtgcaatggtgcgatcatggtccactgcagccttgaccctgccagtctcaagtggtcctcccacctcagcctctggagtaactgggactacaggctggtctcagagctggttggaaagttccttctttgatccaaaaaaaaaaaaaatcatttggggttacccaccactgacgaagatcctggcaagtttctttggggagctgctgggtcaggagatagacccgctcaggaatgtgctggtgactgttggtggctatggggccctgttcacagccttccaggccctggtggacgaaggagacgaggtcatcatcatcgaacccttttttgactgctacgagcccatgacaatgatggcagggggtcgtcctgtgtttgtgtccctgaagccgggtcccatccagaatggagaactgggttccagcagcaactggcagctggaccccatggagctggccggcaaattcacatcacgcaccaaagccctggtcctcaacacccccaacaaccccctgggcaaggtgttctccagggaagagctggagctggtggccagcctttgccagcagcatgacgtggtgtgtatcactgatgaagtctaccagtggatggtctacgacgggcaccagcacatcagcattgccagcctccctggcatgtgggaacggaccctgaccatcggcagcgccggcaagaccttcagcgccactggctggaaggtgggctgggtcctgggtccagatcacatcatgaagcacctgcggaccgtgcaccagaactccgtcttccactgccccacgcagagccaggctgcagtagccgagagctttgaacgggagcagctgctcttccgccaacccagcagctactttgtgcagttcccgcaggccatgcagcgctgccgtgaccacatgatacgtagcctacagtcagtgggcctgaagcccatcatccctcagggcagctacttcctcatcacagacatctcagacttcaagaggaagatgcctgacttgcctggagctgtggatgagccctatgacagacgcttcgtcaagtggatgatcaagaacaagggcttggtggccatccctgtctccatcttctatagtgtgccacatcagaagcactttgaccactatatccgcttctgttttgtgaaggatgaagccacgctccaggccatggacgagaagctgcggaagtggaaggtggaactctagccctgaagtcacgccttggccctgacatccccacatgcccgcagagatcctctttgagtgtctgtctttgtccaggtttcagacatttctaggttggggaagatgctattgggaaacctcttctccgtgacacagaatgttctgggtgggagccgcccttcttcatcttagagaaccaagtgcctcctgtctgaaaggtgagggtggcctgacctgggcctctccctgcccctccataggtgggtttgtagggtcttgtgttgcttctggtctctccaggcttggctgagacggacggtagacttccaccatgtaccgatcacatcccagctctgcatggcccctgctaaggctcaggtataacctcaccttccctggctcatcttggccttggggagttgcctttaggcttgagtcctcaagcctctccttttcgtccataataaaatgtttaagttattaagatcctta

SEQ ID NO: 7265 - DNA, 736 bp, Homo sapiens
  source 1..736: mol_type = unassigned DNA
ggtggctgagaagaatgttggatccccagctccacggcccaccagccatctgggactggcaaacccacaggaacggaaggttcctcagggaccacaaagcccatgtgaggtccctgctgctgaagggattctgaggacaggaggagccaaattacctatccagggtcacccagccaagctcgccatggccaaacagctgcaggcccgaaggctagacgggatcgactacaacccctgggtggagtttgtgaaactggccagtgagcatgacgtcgtgaacttgggccagggcttcccggatttcccaccaccagactttgccgtggaagcctttcagcacgctgtcagtggagacttcatgcttaaccagtacaccaagacatttggttacccaccactgacgaagatcctggcaagtttctttggggagctgctgggtcaggagatagacccgctcaggaatgtgctggtgactgttggtggctatggggccctgttcacagccttccaggccctggtggacgaaggagacgaggtcatcatcatcgaacccttttttgactgctacgagcccatgacaatgatggcagggggtcgtcctgtgtttgtgtccctgaagccgggtcccatccagaatggagaactgggttccagcagcaactggcagctggaccccatggagctggccggcaaattcacatcacgcaccaaagccctggtcctcaacacccccaac

SEQ ID NO: 7266 - DNA, 477 bp, Homo sapiens
  source 1..477: mol_type = unassigned DNA
gccatggccaaacagctgcaggcccgaaggctagacgggatcgactacaacccctgggtggagtttgtgaaactggccagtgagcatgacgtcgtgaacttgggccagggcttcccggatttcccaccaccagactttgccgtggaagcctttcagcacgctgtcagtggagacttcatgcttaaccagtacaccaagacatttgtctcactctgttatccaggctggagtgcaatggtgcgatcatggtccactgcagccttgaccctgccagtctcaagtggtcctcccacctcagcctctggagtaactgggactacaggctggtctcagagctggttggaaagttccttctttgatccaaaaaaaaaaaaaatcatttggggttacccaccactgacgaagatcctggcaagtttctttggggagctgctgggtcaggagatagacccgctcaggaatgtgctggtgactgtt

SEQ ID NO: 7267 - DNA, 1989 bp, Homo sapiens
  source 1..1989: mol_type = unassigned DNA
acttgggaacgaggggtgaagcggcccaggtgaggagctgtgtgtgggggacccaagtcctgagctcggaggcattttctggccagggctgtttcctcccttctcccctgcctctggaaaagtctgcagtgccccaaggctctgggaggcatgttcaggactgcagcagccatctctgtgcacctggtggggccccttcagggaaggaaggctggagccccactcacttggttcttgcaccagactcaggtggctgagaagaatgttggatccccagctccacggcccaccagccatctgggactggcaaacccacaggaacggaaggttcctcagggaccacaaagcccatgtgaggtccctgctgctgaagggattctgaggacaggaggagccaaattacctatccagggtcacccagccaagctcgccatggccaaacagctgcaggcccgaaggctagacgggatcgactacaacccctgggtggagtttgtgaaactggccagtgagcatgacgtcgtgaacttgggccagggcttcccggatttcccaccaccagactttgccgtggaagcctttcagcacgctgtcagtggagacttcatgcttaaccagtacaccaagacatttggttacccaccactgacgaagatcctggcaagtttctttggggagctgctgggtcaggagatagacccgctcaggaatgtgctggtgactgttggtggctatggggccctgttcacagccttccaggccctggtggacgaaggagacgaggtcatcatcatcgaacccttttttgactgctacgagcccatgacaatgatggcagggggtcgtcctgtgtttgtgtccctgaagccgggtcccatccagaatggagaactgggttccagcagcaactggcagctggaccccatggagctggccggcaaattcacatcacgcaccaaagccctggtcctcaacacccccaacaaccccctgggcaaggtgttctccagggaagagctggagctggtggccagcctttgccagcagcatgacgtggtgtgtatcactgatgaagtctaccagtggatggtctacgacgggcaccagcacatcagcattgccagcctccctggcatgtgggaacggaccctgaccatcggcagcgccggcaagaccttcagcgccactggctggaaggtgggctgggtcctgggtccagatcacatcatgaagcacctgcggaccgtgcaccagaactccgtcttccactgccccacgcagagccaggctgcagtagccgagagctttgaacgggagcagctgctcttccgccaacccagcagctactttgtgcagttcccgcaggccatgcagcgctgccgtgaccacatgatacgtagcctacagtcagtgggcctgaagcccatcatccctcagggcagctacttcctcatcacagacatctcagacttcaagaggaagatgcctgacttgcctggagctgtggatgagccctatgacagacgcttcgtcaagtggatgatcaagaacaagggcttggtggccatccctgtctccatcttctatagtgtgccacatcagaagcactttgaccactatatccgcttctgttttgtgaaggatgaagccacgctccaggccatggacgagaagctgcggaagtggaaggtggaactctagccctgaagtcacgccttggccctgacatccccacatgcccgcagagatcctctttgagtgtctgtctttgtccaggtttcagacatttctaggttggggaagatgctattgggaaacctcttctccgtgacacagaatgttctgggtgggagccgcccttcttcatcttagagaaccaagtgcctcctgtctgaaaggtgagggtggcctgacctgggcctctccctgcccctccataggtgggtttgtagggtcttgtgttgcttctggtctctccaggcttggctg

SEQ ID NO: 7268 - DNA, 847 bp, Homo sapiens
  source 1..847: mol_type = unassigned DNA
cacaggggtgcctgggagggggctcgcgcgccgcggagccggcgagaaggtggtgccccggagactccgggcactggggagcccagagctcgccatggccaaacagctgcaggcccgaaggctagacgggatcgactacaacccctgggtggagtttgtgaaactggccagtgagcatgacgtcgtgaacttgggccagggcttcccggatttcccaccaccagactttgccgtggaagcctttcagcacgctgtcagtggagacttcatgcttaaccagtacaccaagacatttggttacccaccactgacgaagatcctggcaagtttctttggggagctgctgggtcaggagatagacccgctcaggaatgtgctggtgactgttggtggctatggggccctgttcacagccttccaggccctggtggacgaaggagacgaggtcatcatcatcgaacccttttttgactgctacgagcccatgacaatgatggcagggggtcgtcctgtgtttgtgtccctgaagccgggtcccatccagaatggagaactgggttccagcagcaactggcagctggaccccatggagctggccggcaaattcacatcacgcaccaaagccctggtcctcaacacccccaacaaccccctgggcaaggtgttctccagggaagagctggagctggtggccagcctttgccagcagcatgacgtggtgtgtatcactgatgaagtctaccagtggatggtctacgacgggcaccagcacatcagcattgccagcctccctggcatgtgggaacggaccctgaccatcggcagcgccggcaagaccttcagcgcc

SEQ ID NO: 7269 - DNA, 1860 bp, Homo sapiens
  source 1..1860: mol_type = unassigned DNA
agcggcggaggtggagcggggagaggcgttaggccgggcggctaaaacgcgccgttaaagtgggggagagattgcgcggagcccacgcgatccctgggacgccggagacaacggggctcttgggaaggcgcggagcccggggaagccggggatgtgcgcgtgagccgtgcccgcagggtctccccgcctccgccacctttcttgggtggctctccgcctcgtcctccctccgagggccgttggtacattcctagtgactccaagcgcttaaaaggggcccgggaggatgaaccccacagatctgaacctgatttgtgtgtgcaccgcgtctccagcgatcccggatccactgcgctgccaggggcctgggggtgggtctcttgctgtctctgcgacgacatccttacgtttcggcactctaatgctgggtttgtgcgtgtgtgtctgcttagcggtctagcgggctgttaggctccctcgcccccagctccttggctcgctcagctcctccaccgcagcccagcagtgagacgcgcgcgcagccagctccccacgagatggaacagaccgaagtgctgaagccacggaccctggctgatctgatccgcatcctgcaccagctctttgccggcgatgaggtcaatgtagaggaggtgcaggccatcatggaagcctacgagagcgaccccaccgagtgggcaatgtacgccaagttcgaccagtacaggtatacccgaaatcttgtggatcaaggaaatggaaaatttaatctgatgattctctgttggggtgaaggacatggcagcagtattcatgatcataccaactcccactgctttctgaagatgctacagggaaatctaaaggagacattatttgcctggcctgacaaaaaatccaatgagatggtcaagaagtctgaaagagtcttgagggaaaaccagtgtgcctacatcaatgattccattggcttacatcgagtagagaacatcagccatacggaacctgctgtgagccttcacttgtacagtccaccttttgatacatgccatgcctttgatcaaagaacaggacataaaaacaaagtcacaatgacattccatagtaaatttggaatcagaactccaaatgcaacttcgggctcgctggagaacaactaaggggcaccaaaccctctgaggttttactttaaggttcgctgtatgtttgccttggacaaaaaggctacctaccacgtgctatccagtaatatacttaaataagccaatacttagatctactgtaaggcagatgctaattataaggcattaagtaagcaaatagtgccctcagctactgcagaagaaaagtcccactgaggaaaagaaagtcttgtgatttttaaaggcaagttttcaagtgctctcatagttctatcctctaattccattaaatccatactaggagcgtcagtgagggttttcatagcttttggaaatactttggtctctgaactgtaattagcaagaagtaaaaacagaaacgtcaaacgtcaaatgtttgctttgttacctggaggactaaatgtagatgtctttagtatactttgtatgttcttaatattggaagataattttgtgaatctgtagattttattttttcagtcttaccttacaaatttcttttctatgaataatagaggaacttacggcactctgccatttgttaatgaaaggaagtgcagaggatttagaaaagtacatgatccccagaccacaacaaaccaaaacataaactcatgtctgtgtcccatggtcatagtcaaagattttgtactgctaaaattaccaaataatttaaataaagtggatttgaacacaa

SEQ ID NO: 7270 - DNA, 5912 bp, Homo sapiens
  source 1..5912: mol_type = unassigned DNA
gccgccggcccgggctggagccgagcgcagcagccaccgccgccgccgcgccagaagtttgggttgaaccggagctgccgggaggaaacttttttcttttttccccctccctcccgggaggaggaggaggaggaggaggggaagctgccgccggcgccaaggctcgtgggctcggggtcggcgcggcccgcagaaggggcgggggcctcgccccgcgaggggaggcgcgccccgggggccccgagaggggcggtgaggaccgcgggctgctggtgcggcggcggcggcgcgtgtgccccgcgcaggggagggcgcccgccccgctcccggcccggctgcgaggaggaggcggcggcggcgcaggaggatgtacttggtggcgggggacagggggttggccggctgcgggcacctcctggtctcgctgctggggctgctgctgctgctggcgcgctccggcacccgggcgctggtctgcctgccctgtgacgagtccaagtgcgaggagcccaggaactgcccggggagcatcgtgcagggcgtctgcggctgctgctacacgtgcgccagccagaggaacgagagctgcggcggcaccttcgggatttacggaacctgcgaccgggggctgcgttgtgtcatccgccccccgctcaatggcgactccctcaccgagtacgaagcgggcgtttgcgaagatgagaactggactgatgaccaactgcttggttttaaaccatgcaatgaaaaccttattgctggctgcaatataatcaatgggaaatgtgaatgtaacaccattcgaacctgcagcaatccctttgagtttccaagtcaggatatgtgcctttcagctttaaagagaattgaagaagagaagccagattgctccaaggcccgctgtgaagtccagttctctccacgttgtcctgaagattctgttctgatcgagggttatgctcctcctggggagtgctgtcccttacccagccgctgcgtgtgcaaccccgcaggctgtctgcgcaaagtctgccagccgggaaacctgaacatactagtgtcaaaagcctcagggaagccgggagagtgctgtgacctctatgagtgcaaaccagttttcggcgtggactgcaggactgtggaatgccctcctgttcagcagaccgcgtgtcccccggacagctatgaaactcaagtcagactaactgcagatggttgctgtactttgccaacaagatgcgagtgtctctctggcttatgtggtttccccgtgtgtgaggtgggatccactccccgcatagtctctcgtggcgatgggacacctggaaagtgctgtgatgtctttgaatgtgttaatgatacaaagccagcctgcgtatttaacaatgtggaatattatgatggagacatgtttcgaatggacaactgtcggttctgtcgatgccaagggggcgttgccatctgcttcaccgcccagtgtggtgagataaactgcgagaggtactacgtgcccgaaggagagtgctgcccagtgtgtgaagatccagtgtatccttttaataatcccgctggctgctatgccaatggcctgatccttgcccacggagaccggtggcgggaagacgactgcacattctgccagtgcgtcaacggtgaacgccactgcgttgcgaccgtctgcggacagacctgcacaaaccctgtgaaagtgcctggggagtgttgccctgtgtgcgaagaaccaaccatcatcacagttgatccacctgcatgtggggagttatcaaactgcactctgacagggaaggactgcattaatggtttcaaacgcgatcacaatggttgtcggacctgtcagtgcataaacaccgaggaactatgttcagaacgtaaacaaggctgcaccttgaactgtcccttcggtttccttactgatgcccaaaactgtgagatctgtgagtgccgcccaaggcccaagaagtgcagacccataatctgtgacaagtattgtccacttggattgctgaagaataagcacggctgtgacatctgtcgctgtaagaaatgtccagagctctcatgcagtaagatctgccccttgggtttccagcaggacagtcacggctgtcttatctgcaagtgcagagaggcctctgcttcagctgggccacccatcctgtcgggcacttgtctcaccgtggatggtcatcatcataaaaatgaggagagctggcacgatgggtgccgggaatgctactgtctcaatggacgggaaatgtgtgccctgatcacctgcccggtgcctgcctgtggcaaccccaccattcaccctggacagtgctgcccatcatgtgcagatgactttgtggtgcagaagccagagctcagtactccctccatttgccacgcccctggaggagaatactttgtggaaggagaaacgtggaacattgactcctgtactcagtgcacctgccacagcggacgggtgctgtgtgagacagaggtgtgcccaccgctgctctgccagaacccctcacgcacccaggattcctgctgcccacagtgtacagatcaaccttttcggccttccttgtcccgcaataacagcgtacctaattactgcaaaaatgatgaaggggatatattcctggcagctgagtcctggaagcctgacgtttgtaccagctgcatctgcattgatagcgtaattagctgtttctctgagtcctgcccttctgtatcctgtgaaagacctgtcttgagaaaaggccagtgttgtccctactgcatagaagacacaattccaaagaaggtggtgtgccacttcagtgggaaggcctatgccgacgaggagcggtgggaccttgacagctgcacccactgctactgcctgcagggccagaccctctgctcgaccgtcagctgcccccctctgccctgtgttgagcccatcaacgtggaaggaagttgctgcccaatgtgtccagaaatgtatgtcccagaaccaaccaatatacccattgagaagacaaaccatcgaggagaggttgacctggaggttcccctgtggcccacgcctagtgaaaatgatatcgtccatctccctagagatatgggtcacctccaggtagattacagagataacaggctgcacccaagtgaagattcttcactggactccattgcctcagttgtggttcccataattatatgcctctctattataatagcattcctattcatcaatcagaagaaacagtggataccactgctttgctggtatcgaacaccaactaagccttcttccttaaataatcagctagtatctgtggactgcaagaaaggaaccagagtccaggtggacagttcccagagaatgctaagaattgcagaaccagatgcaagattcagtggcttctacagcatgcaaaaacagaaccatctacaggcagacaatttctaccaaacagtgtgaagaaaggcaactaggatgaggtttcaaaagacggaagacgactaaatctgctctaaaaagtaaactagaatttgtgcacttgcttagtggattgtattggattgtgacttgatgtacagcgctaagaccttactgggatgggctctgtctacagcaatgtgcagaacaagcattcccacttttcctcaagataactgaccaagtgttttcttagaaccaaagtttttaaagttgctaagatatatttgcctgtaagatagctgtagagatatttggggtggggacagtgagtttggatggggaaatgggtgggagggtggtgttgggaagaaaaattggtcagcttggctcggggagaaacctggtaacataaaagcagttcagtggcccagaggttatttttttcctattgctctgaagactgcactggttgctgcaaagctcaggcctgaatgagcaggaaacaaaaaaggccttgcgacccagctgccataaccaccttagaactaccagacgagcacatcagaaccctttgacagccatcccaggtctaaagccacaagtttcttttctatacagtcacaactgcagtaggcagtgaggaagccagagaaatgcgatagcggcatttctctaaagcgggttattaaggatatatacagttacactttttgctgcttttattttcttccaagccaatcaatcagccagttcctagcagagtcagcacatgaacaagatctaagtcatttcttgatgtgagcactggagcttttttttttttacaacgtgacaggaagaggagggagagggtgacgaacaccaggcatttccaggggctatatttcactgtttgttgttgctttgttctgttatattgttggttgttcatagtttttgttgaagctctagcttaagaagaaactttttttaaaaagactgtttggggattctttttccttattatatactgattctacaaaatagaaactacttcattttaattgtatattattcaagcacctttgttgaagctcaaaaaaaatgatgcctctttaaactttagcaattataggagtatttatgtaactatcttatgcttcaaaaaacaaaagtatttgtgtgcatgtgtatataatatatatatatacatatatatttatacacatacaatttatgttttcctgttgaatgtatttttatgagattttaaccagaacaaaggcagataaacaggcattccatagcagtgcttttgatcacttacaaattttttgaataacacaaaatctcattctacctgcagtttaattggaaagatgtgtgtgtgagagtatgtatgtgtgtgtgtgtgtgtgtgtgtgtgcgcgcgcacgcacgccttgagcagtcagcattgcacctgctatggagaagggtattcctttattaaaatcttcctcatttggatttgctttcagttggttttcaatttgctcactggccagagacattgatggcagttcttatctgcatcactaatcagctcctggattttttttttttttttttcaaacaatggtttgaaacaactactggaatattgtccacaataagctggaagtttgttgtagtatgcctcaaatataactgactgtatactatagtggtaacttttcaaacagcccttagcacttttatactaattaacccatttgtgcattgagttttcttttaaaaatgcttgttgtgaaagacacagatacccagtatgcttaacgtgaaaagaaaatgtgttctgttttgtaaaggaactttcaagtattgttgtaaatacttggacagaggttgctgaactttaaaaaaaattaatttattattataatgacctaatttattaatctgaagattaaccatttttttgtcttagaatatcaaaaagaaaaagaaaaaggtgttctagctgtttgcatcaaaggaaaaaaagatttattatcaaggggcaatatttttatcttttccaaaataaatttgttaatgatacattacaaaaatagattgacatcagcctgattagtataaattttgttggtaattaatccattcctggcataaaaagtctttatcaaaaaaaattgtagatgcttgctttttgttttttcaatcatggccatattatgaaaatactaacaggatataggacaaggtgtaaatttttttattattattttaaagatatgatttatcctgagtgctgtatctattactcttttactttggttcctgttgtgctcttgtaaaagaaaaatataatttcctgaagaataaaatagatatatggcacttggagtgcatcatagttctacagtttgtttttgttttcttcaaaaaagctgtaagagaattatctgcaacttgattcttggcaggaaataaacattttgagttgaaatca

SEQ ID NO: 7271 - DNA, 1194 bp, Homo sapiens
  source 1..1194: mol_type = unassigned DNA
acgcgcccgcccgcccgttggcccgggaagtctcgcgatgccgtagccggctgctcccgctgcgggtggctcgggctgttgctgtggtttcctgagttgctgctgctgcggcggcggcagcggcgtctgtgcttgtggaggtgtcggcctctgggcggatgttgacattgtgttgttgttattgctgatggtaatggcggcggcggtggcggcgacggtccagaccccatcccctctgtagccggagccgagacagccgacagcgaactccgcggcctcggagccggcggcagcggcgactcccctcagcctccgccgcctcgcccgccggtaccccggcgccaaccccgggagtcaggccctttgggcaggggagctcggaggctcaggatggcggatttcgacgaaatctatgaggaagaggaggacgaggagcgggccctggaggagcagctgctcaagtactcgccggacccggtggtcgtccgcggctccggtcacgtcaccgtatttggactgagcaacaaatttgaatctgaattcccttcttcattaactggaaaagtagctcctgaagaatttaaagccagcatcaacagagttaacagttgtcttaagaagaaccttcctgttaatgtacgttggctactttgtggctgcctttgttgctgctgcacattaggttgcagtatgtggccagttatttgcctcagtaaaagaacacgaagatcgattgagaagttattagaatgggaaaacaataggttataccacaagctgtgcttgcattggagactgagcaaaaggaaatgtgaaacgaataacatgatggaatatgtcatcctcatagaatttttaccaaagacaccgatttttcgaccagattagcatttactttatttatagagactttccaagtatgttgtctttccaatggtgccttgcttggtgctctcctggtggtgacataacattggttctacagaatcgtgtggtgttttttttgtttttgtttttgttttttttttaaataaccgcatgttctaagtgtgcatttttgtcaatctttgcaacagttatttcatacagatgtttaatacttaagttattgtgctcttttctgttatgtattctgattttcaaggattacttttttgtattatcaaaaaaatacatttgaacttagcataaaaa

SEQ ID NO: 7272 - DNA, 1311 bp, Homo sapiens
  source 1..1311: mol_type = unassigned DNA
aactttgcagcgtacttggaccgctctggccgccctgggcgctacccgcagagataagggcccctccctgcgcccggtccgggcatctccgagccggcctgggggtggctgaactctcttttgccggccgaaaccccagcccccgcagcccccgcagccgatcggtcctcaagctacagctcccctctctgggagtccccgcttttgaattccccggggatgttcccgctgcggtccgatggacctcccagagcagcggaggtcaggggagctagcagaggcggggacgtcccttgggagtgaggggactgacaggggcggcctcgtaaccctgcgtgggatggaaggtcagagtgggttcctcggtggggggcaacagcgggggctctccggcaattgtccccgaccctccgtcctggggagggcaggatcagcgcgcgggctgctttgcatctctttgcattttagtgatgtttggtccagtcctggcccgggcagatctggggttcgggcgggtgccggtggggtagggctgggggtgggagcggcgtttcctgctgcgggtgagccttttgcctcggaactggacccgggagacatcacagcgctgggctaggggcgcggcttgaactcgcctaaagagctgcgccctctcagtaagtccccatggccccctgcccccccgcgctccgtcctcagtcaggcccgggtcctgcctgaaggcgggggtggaccagatgatctttcttgggccctgggcctagattcgaggtccccagggtccaagtcctgggttcagagggcggggcgcgaggggcggggtctccaaggggcggggtcccggggtccctgaaaggcgcggaccaggccggatccacccagtctcgcgcctgcagcccgtgccgccccagccgctgccgcctgcaccggacccggagccgtcatgcccaagtgtcccaagtgcaacaaggaggtgtacttcgccgagagggtgacctctctgggcaaggactggcatcggccctgcctgaagtgcgagaaatgtgggaagacgctgacctctgggggccacgctgagcacgaaggcaaaccctactgcaaccacccctgctacgcagccatgtttgggcctaaaggctttgggcggggcggagccgagagccacactttcaagtaaaccaggtggtggagaccccatccttggctgcttgcagggccactgtccaggcaaatgccaggccttgtccccagatgcccagggctcccttgttgcccctaatgctctcagtaaacctgaacacttggaaaacc

SEQ ID NO: 7273 - DNA, 485 bp, Homo sapiens
  source 1..485: mol_type = unassigned DNA
cacagcgctgggctaggggcgcggcttgaactcgcctaaagagctgcgccctctcatctcgcgcctgcagcccgtgccgccccagccgctgccgcctgcaccggacccggagccgtcatgcccaagtgtcccaagtgcaacaaggaggtgtacttcgccgagagggtgacctctctgggcaaggactggcatcggccctgcctgaagtgcgagaaatgtgggaagacgctgacctctgggggccacgctgagcacgaaggcaaaccctactgcaaccacccctgctacgcagccatgtttgggcctaaaggctttgggcggggcggagccgagagccacactttcaagtaaaccaggtggtggagaccccatccttggctgcttgcagggccactgtccaggcaaatgccaggccttgtccccagatgcccagggctcccttgttgcccctaatgctctcagtaaacctgaacacttggaaaacc

SEQ ID NO: 7274 - DNA, 677 bp, Homo sapiens
  source 1..677: mol_type = unassigned DNA
tttcctgctgcgggtgagccttttgcctcggaactggacccgggagacatcacagcgctgggctaggggcgcggcttgaactcgcctaaagagctgcgccctctcacccgtgccgccccagccgctgccgcctgcaccggacccggagccgtcatgcccaagtgtcccaagtgcaacaaggaggtgtacttcgccgagagggtgacctctctgggcaaggactggcatcggccctgcctgaagtgcgagaaatgtgggaagacgctgacctctgggggccacgctgagcacgaaggcaaaccctactgcaaccacccctgctacgcagccatgtttgggcctaaaggctttgggcggggcggagccgagagccacactttcaagtaaaccaggtggtggagaccccatccttggctgcttgcagggccactgtccaggcaaatgccaggccttgtccccagatgcccagggctcccttgttgcccctaatgctctcagtaaacctgaacacttggaaaacctgtgtgtgtacatgcgcgtgtgtgctggggagtgccaagggagctgcagtggggtcctggcagcaggctctgccaccggcgcctgctcttctgctgcccattgccctccccagggggccgttccagggtctcataggcgagggctccctgtgcagg

SEQ ID NO: 7275 - DNA, 1849 bp, Homo sapiens
  source 1..1849: mol_type = unassigned DNA
gcgccttccttcctgagccctgccctccacccaaggagccttcagcaccacagacagtgttggggcggggcgcgggcgggggcggagcgggacatggagacccggacagggctgggggccgtgcccgccgggaatctgactccgctcccgcggcgcggctgttgctatggaaaccgagcaacaaagggaagcgggacaggcgccgcgcgcggcggggtgggggtggggttctcccggagcctgcgaccccttcccgcggcggagcgcagcctgggcgcccagggccgggagtgttggacccctaggcccaagtcactagggctccccgagagccgagggccaggctccccgcaccctgcccgccgccccggggacggcccggccaggcggccccgacgtcgccatggaaacagccggggcgcgggcggcgccgcggtcgcccgggcgggcccctgtagacgccacctccggcgcgaggggcccgggggcgccaggcctggcccggctgccccgcacccgccacccccggcaggtgcgccccgcccccgcggcgcccccaggcggcccccagcccgggggacgggttatcgaggccccgccccggccgcggagccaatgggcgcgcggacagccgggcaggcggggctgggcgcgggcggcggcggcccggaggagaacgggcggagggcgcgggccgaccgggcgcaccgaccatggcctccaaatgccccaagtgcgacaagaccgtgtacttcgccgagaaggtgagctccctggggaaggactggcacaagttctgcctcaagtgcgagcgctgcagcaagacgctgacgcccgggggccacgccgagcatgacgggaagccgttctgccacaagccgtgctacgccaccctgttcggacccaaaggcgtgaacatcgggggcgcgggctcctacatctacgagaagcccctggcggaggggccgcaggtcaccggccccatcgaggtccccgcggcccgagcagaggagcggaaggcgagcggccccccgaaggggcccagcagagcctccagtgtcaccactttcaccggggagcccaacacgtgcccgcgctgcagcaagaaggtgtacttcgctgagaaggtgacgtctctgggcaaggattggcaccggccctgcctgcgctgcgagcgctgcgggaagacactgacccccggcgggcacgcggagcacgacggccagccctactgccacaagccctgctatggaatcctcttcggacccaagggagtgaacaccggtgcggtgggcagctacatctatgaccgggaccccgaaggcaaggtccagccctaggctacagcggctctcatgatgtgggctcacctgcgccccagaccctgcaggggcccccctgcttggctctgctgggagagtgctcagccgcccagtcctgcctgcaagcccagggcgagtattggaggaggggcagccacgggcagagcaccatgcccatccccgagtctctggtgtgtctgccccctctggcatcctctgggcgtcccatgatcccttctgtgtctgcgtgtccgaatccccgtgtgaccctgtcccagcattttcccgccgaccctgcgtgtccccgtggcgctgtccgctctccctctcctgctgcccacccacctgccagtgttatttatgctcccttcgtgggtgatggccacgccctcaccatgtccctggcagagggcttccctccgggatcccctgcctggtgcccacactgcctcgcaagcgctcgccaccctcacgtggctcacctgctgttgagccttgtgctgtcaataaacggtttgaggattgca

SEQ ID NO: 7276 - DNA, 1176 bp, Homo sapiens
  source 1..1176: mol_type = unassigned DNA
ggctggggaccttggggcaggtggtctccctccagaagagccctgtgttcagccagccctgtcctccagagcaagccccacaggtagcaagccccacaggtagcaaagtcagggagggtaatggcttagccccaggctcccaagctgggcagaacagggcagggagctggagagggtttggcagtgggcccatgaatccagcctgggcaaggccctgctgtgagggacccctagggacccctgggcctgccagggaggaagggctgcccagaaaaggtactgactgatgcctcctcaccatcttctgccttggctggcacaggtcccaagtgcagagggggagctggtcaggctggtcagtcgggcgggggggcggggggcatgtttctggcctgctgtcaccatggaaatggcagtggctgcagggtgtgtgtgcaagggaggagggtgctgccacagagagcccagccaggaccaccatgaaagccaggagcaccgagggcctctggttggctcacaaacatgcctggtgcaccaggcagagggaacagccgagaaggtgagctccctggggaaggactggcacaagttctgcctcaagtgcgagcgctgcagcaagacgctgacgcccgggggccacgccgagcatgacgggaagccgttctgccacaagccgtgctacgccaccctgttcggacccaaaggcgtgaacatcgggggcgcgggctcctacatctacgagaagcccctggcggaggggccgcaggtcaccggccccatcgaggtccccgcggcccgagcagaggagcggaaggcgagcggccccccgaaggggcccagcagagcctccagtgtcaccactttcaccggggagcccaacacgtgcccgcgctgcagcaagaaggtgtacttcgctgagaaggtgacgtctctgggcaaggattggcaccggccctgcctgcgctgcgagcgctgcgggaagacactgacccccggcgggcacgcggagcacgacggccagccctactgccacaagccctgctatggaatcctcttcggacccaagggagtgaacaccggtgcggtgggcagctacatctatgaccgggaccccgaaggcaaggtccagccctaggctacagcggctctcatgatgtgggctcacctgcgccccag

SEQ ID NO: 7277 - DNA, 817 bp, Homo sapiens
  source 1..817: mol_type = unassigned DNA
gcccggaggagaacgggcggagggcgcgggccgaccgggcgcaccgaccatggcctccaaatgccccaagtgcgacaagaccgtgtacttcgctgagaaggtgacgtctctgggcaaggattggcaccggccctgcctgcgctgcgagcgctgcgggaagacactgacccccggcgggcacgcggagcacgacggccagccctactgccacaagccctgctatggaatcctcttcggacccaagggagtgaacaccggtgcggtgggcagctacatctatgaccgggaccccgaaggcaaggtccagccctaggctacagcggctctcatgatgtgggctcacctgcgccccagaccctgcaggggcccccctgcttggctctgctgggagagtgctcagccgcccagtcctgcctgcaagcccagggcgagtattggaggaggggcagccacgggcagagcaccatgcccatccccgagtctctggtgtgtctgccccctctggcatcctctgggcgtcccatgatcccttctgtgtctgcgtgtccgaatccccgtgtgaccctgtcccagcattttcccgccgaccctgcgtgtccccgtggcgctgtccgctctccctctcctgctgcccacccacctgccagtgttatttatgctcccttcgtgggtgatggccacgccctcaccatgtccctggcagagggcttccctccgggatcccctgcctggtgcccacactgcctcgcaagcgctcgccaccctcacgtggctcacctgctgttgagccttgtgctgtcaataaacggtttgagga

SEQ ID NO: 7278 - DNA, 1709 bp, Homo sapiens
  source 1..1709: mol_type = unassigned DNA
gggatggaaattaaacacctcttgtttttggttgctgctgcttgcttactgcctatgttgtccatgaaaaagaaatcagctagagaccaatttaataagctcgtcaccgacttgccaaatgtacaagaagagatcgttaatatacacaacgccctcaggagaagagtagttccaccagccagcaacatgctgaagatgagttggagtgaagaggctgcacaaaatgccagaattttttcaaagtattgtgatatgacagagagcaacccccttgagaggagacttccaaataccttttgtggagaaaatatgcatatgacatcttatcctgtatcatggtcaagtgtaattggagtctggtacagtgagtctacaagtttcaaacatggagaatggacaacaacggatgatgacataactactgaccactacactcagattgtttgggccacatcttacctgattggctgtgccattgcatcttgccgccaacaaggatcacctcgatatctctacgtttgtcactattgtcatgactaacccctgcatctactatgatgaatacttcgactgtgacatacaagtccattatctgggatgcaaccactcaacaactatcctattctgtaaagccacttgtctgtgtgacactgagataaaataggtctttgttattttcaactgttctatgctgtgacgatgaggaggagatgtctgttggattcatgtcttttgctatagttcagtagcttctgctaaatttcactgattttaatcatgctggagaccttaactcccatcctgatacatcctgaagtaacactgttttaaactttcttagtgctggagtaaaaggtcaagtccaacacctgccttaaatttaaatcatgtgatttatagtttttaagttggcataattcaacttatggtataactgggtccctcaacagtaacctgggctaaaataggtcttatgtggttcaactcccacccccgccttccccatattttcaaccactctgattatcttccctgcacaactaacatccagtaataattcttcacttttaaaattttacttctactttaaatcaatcattaaaggaatccacaaagcaaacagagttcagtctcatcttgcaaggtaaatatcatttaattggaagtagtttaaatgtctcattgttttattgacacatctatatatacatttgtgaagcaagaaacaataaaaaagcttcgtatgccattaatttaacaaaatatgtattcagtactgattgcatacaagatgcatgtttatatatatggaaggaatatagtttcatttcattgcaaaggcagtataaaagatatataaaatagcataatatgagaaattaagtccctaaagacatataggtcacatattattattgccagatgagcataaatagcttctgtttggagattcaggaaagccttagggtggaatgaggaacatcttctgagtaaacagggttgcaaaggttatgattatttcaacacaatggaagagcacagttaaggccaactaacgtaaaatgcactgaagccttagggaatattgaagggcctgacatggggaaagggaaggctaaaaatacttggtcaaattttaacattataccaaagttatacccagttctacctacttgtatatttctttactcatttcaataaagtgtttg

SEQ ID NO: 7279 - DNA, 1911 bp, Homo sapiens
  source 1..1911: mol_type = unassigned DNA
aaatctcccctgtggactgtcatttaaaagcacaaatacactacatagagaaaggcttggttcttatcaggacacaaatttaaaggctgtgtggacttggggatggaaattaaacacctcttgtttttggttgctgctgcttgcttactgcctatgttgtccatgaaaaagaaatcagctagagaccaatttaataagctcgtcaccgacttgccaaatgtacaagaagagatcgttaatatacacaacgccctcaggagaagagtagttccaccagccagcaacatgctgaagatgagttggagtgaagaggctgcacaaaatgccagaattttttcaaagtattgtgatatgacagagagcaacccccttgagaggagacttccaaataccttttgtggagaaaatatgcatatgacatcttatcctgtatcatggtcaagtgtaattggagtctggtacagtgagtctacaagtttcaaacatggagaatggacaacaacggatgatgacataactactgaccactacactcagattgtttgggccacatcttacctgattggctgtgccattgcatcttgccgccaacaaggatcacctcgatatctctacgtttgtcactattgtcatgagggaaatgatcctgaaacaaagaatgaaccttataagacaggcgtcccatgtgaagcctgcccaagtaactgtgaagacaaactttgcactaacccctgcatctactatgatgaatacttcgactgtgacatacaagtccattatctgggatgcaaccactcaacaactatcctattctgtaaagccacttgtctgtgtgacactgagataaaataggtctttgttattttcaactgttctatgctgtgacgatgaggaggagatgtctgttggattcatgtcttttgctatagttcagtagcttctgctaaatttcactgattttaatcatgctggagaccttaactcccatcctgatacatcctgaagtaacactgttttaaactttcttagtgctggagtaaaaggtcaagtccaacacctgccttaaatttaaatcatgtgatttatagtttttaagttggcataattcaacttatggtataactgggtccctcaacagtaacctgggctaaaataggtcttatgtggttcaactcccacccccgccttccccatattttcaaccactctgattatcttccctgcacaactaacatccagtaataattcttcacttttaaaattttacttctactttaaatcaatcattaaaggaatccacaaagcaaacagagttcagtctcatcttgcaaggtaaatatcatttaattggaagtagtttaaatgtctcattgttttattgacacatctatatatacatttgtgaagcaagaaacaataaaaaagcttcgtatgccattaatttaacaaaatatgtattcagtactgattgcatacaagatgcatgtttatatatatggaaggaatatagtttcatttcattgcaaaggcagtataaaagatatataaaatagcataatatgagaaattaagtccctaaagacatataggtcacatattattattgccagatgagcataaatagcttctgtttggagattcaggaaagccttagggtggaatgaggaacatcttctgagtaaacagggttgcaaaggttatgattatttcaacacaatggaagagcacagttaaggccaactaacgtaaaatgcactgaagccttagggaatattgaagggcctgacatggggaaagggaaggctaaaaatacttggtcaaattttaacattataccaaagttatacccagttctacctacttgtatatttctttactcatttcaataaagtgtttgaaaaaaaaaaaaaa

SEQ ID NO: 7280 - DNA, 1798 bp, Homo sapiens
  source 1..1798: mol_type = unassigned DNA
gggatggaaattaaacacctcttgtttttggttgctgctgcttgcttactgcctatgttgtccatgaaaaagaaatcagctagagaccaatttaataagctcgtcaccgacttgccaaatgtacaagaagagatcgttaatatacacaacgccctcaggagaagagtagttccaccagccagcaacatgctgaagatgagttggagtgaagaggctgcacaaaatgccagaattttttcaaagtattgtgatatgacagagagcaacccccttgagaggagacttccaaataccttttgtggagaaaatatgcatatgacatcttatcctgtatcatggtcaagtgtaattggagtctggtacagtgagtctacaagtttcaaacatggagaatggacaacaacggatgatgacataactactgaccactacactcagattgtttgggccacatcttacctgattggctgtgccattgcatcttgccgccaacaaggatcacctcgatatctctacgtttgtcactattgtcatgagggaaatgatcctgaaacaaagaatgaaccttataagacaggcgtcccatgtgaagcctgcccaagtaactgtgaagacaaactttgcactaacccctgcatctactatgatgaatacttcgactgtgacatacaagtccattatctgggatgcaaccactcaacaactatcctattctgtaaagccacttgtctgtgtgacactgagataaaataggtctttgttattttcaactgttctatgctgtgacgatgaggaggagatgtctgttggattcatgtcttttgctatagttcagtagcttctgctaaatttcactgattttaatcatgctggagaccttaactcccatcctgatacatcctgaagtaacactgttttaaactttcttagtgctggagtaaaaggtcaagtccaacacctgccttaaatttaaatcatgtgatttatagtttttaagttggcataattcaacttatggtataactgggtccctcaacagtaacctgggctaaaataggtcttatgtggttcaactcccacccccgccttccccatattttcaaccactctgattatcttccctgcacaactaacatccagtaataattcttcacttttaaaattttacttctactttaaatcaatcattaaaggaatccacaaagcaaacagagttcagtctcatcttgcaaggtaaatatcatttaattggaagtagtttaaatgtctcattgttttattgacacatctatatatacatttgtgaagcaagaaacaataaaaaagcttcgtatgccattaatttaacaaaatatgtattcagtactgattgcatacaagatgcatgtttatatatatggaaggaatatagtttcatttcattgcaaaggcagtataaaagatatataaaatagcataatatgagaaattaagtccctaaagacatataggtcacatattattattgccagatgagcataaatagcttctgtttggagattcaggaaagccttagggtggaatgaggaacatcttctgagtaaacagggttgcaaaggttatgattatttcaacacaatggaagagcacagttaaggccaactaacgtaaaatgcactgaagccttagggaatattgaagggcctgacatggggaaagggaaggctaaaaatacttggtcaaattttaacattataccaaagttatacccagttctacctacttgtatatttctttactcatttcaataaagtgtttg

SEQ ID NO: 7281 - DNA, 1296 bp, Homo sapiens
  source 1..1296: mol_type = unassigned DNA
agtttctttgcagctaccaggacagagcttggtgagataattcttttattcttcaacttttattttaacttcaatggtacatgtgcagggatggaaattaaacacctcttgtttttggttgctgctgcttgcttactgcctatgttgtccatgaaaaagaaatcagctagagaccaatttaataagctcgtcaccgacttgccaaatgtacaagaagagatcgttaatatacacaacgccctcaggagaagagtagttccaccagccagcaacatgctgaagatgagttggagtgaagaggctgcacaaaatgccagaattttttcaaagtattgtgatatgacagagagcaacccccttgagaggagacttccaaataccttttgtggagaaaatatgcatatgacatcttatcctgtatcatggtcaagtgtaattggagtctggtacagtgagtctacaagtttcaaacatggagaatggacaacaacggatgatgacataactactgaccactacactcagattgtttgggccacatcttacctgattggctgtgccattgcatcttgccgccaacaaggatcacctcgatatctctacgtttgtcactattgtcatgagggaaatgatcctgaaacaaagaatgaaccttataagacaggcgtcccatgtgaagcctgcccaagtaactgtgaagacaaactttgcactaacccctgcatctactatgatgaatacttcgactgtgacatacaagtccattatctgggatgcaaccactcaacaactatcctattctgtaaagccacttgtctgtgtgacactgagataaaataggtctttgttattttcaactgttctatgctgtgacgatgaggaggagatgtctgttggattcatgtcttttgctatagttcagtagcttctgctaaatttcactgattttaatcatgctggagaccttaactcccatcctgatacatcctgaagtaacactgttttaaactttcttagtgctggagtaaaaggtcaagtccaacacctgccttaaatttaaatcatgtgatttatagtttttaagttggcataattcaacttatggtataactgggtccctcaacagtaacctgggctaaaataggtcttatgtggttcaactcccacccccgccttccccatattttcaaccactctgattatcttccctgcacaactaacatccagtaataattcttcacttttaaaattttacttctactttaaatcaatcattaaaggaatccacaaagcaaa

SEQ ID NO: 7282 - DNA, 1793 bp, Homo sapiens
  source 1..1793: mol_type = unassigned DNA
gcacaaatacactacatagagaaaggcttggttcttatcaggacacaaatttaaaggctgtgtggacttggggatggaaattaaacacctcttgtttttggttgctgctgcttgcttactgcctatgttgtccatgaaaaagaaatcagctagagaccaatttaataagctcgtcaccgacttgccaaatgtacaagaagagatcgttaatatacacaacgccctcaggagaagagtagttccaccagccagcaacatgctgaagatgagttggagtgaagaggctgcacaaaatgccagaattttttcaaagtattgtgatatgacagagagcaacccccttgagaggagacttccaaataccttttgtggagaaaatatgcatatgacatcttatcctgtatcatggtcaagtgtaattggagtctggtacagtgagtctacaagtttcaaacatggagaatggacaacaacggatgatgacataactactgaccactacactcagattgtttgggccacatcttacctgattggctgtgccattgcatcttgccgccaacaaggatcacctcgatatctctacgtttgtcactattgtcatgactaacccctgcatctactatgatgaatacttcgactgtgacatacaagtccattatctgggatgcaaccactcaacaactatcctattctgtaaagccacttgtctgtgtgacactgagataaaataggtctttgttattttcaactgttctatgctgtgacgatgaggaggagatgtctgttggattcatgtcttttgctatagttcagtagcttctgctaaatttcactgattttaatcatgctggagaccttaactcccatcctgatacatcctgaagtaacactgttttaaactttcttagtgctggagtaaaaggtcaagtccaacacctgccttaaatttaaatcatgtgatttatagtttttaagttggcataattcaacttatggtataactgggtccctcaacagtaacctgggctaaaataggtcttatgtggttcaactcccacccccgccttccccatattttcaaccactctgattatcttccctgcacaactaacatccagtaataattcttcacttttaaaattttacttctactttaaatcaatcattaaaggaatccacaaagcaaacagagttcagtctcatcttgcaaggtaaatatcatttaattggaagtagtttaaatgtctcattgttttattgacacatctatatatacatttgtgaagcaagaaacaataaaaaagcttcgtatgccattaatttaacaaaatatgtattcagtactgattgcatacaagatgcatgtttatatatatggaaggaatatagtttcatttcattgcaaaggcagtataaaagatatataaaatagcataatatgagaaattaagtccctaaagacatataggtcacatattattattgccagatgagcataaatagcttctgtttggagattcaggaaagccttagggtggaatgaggaacatcttctgagtaaacagggttgcaaaggttatgattatttcaacacaatggaagagcacagttaaggccaactaacgtaaaatgcactgaagccttagggaatattgaagggcctgacatggggaaagggaaggctaaaaatacttggtcaaattttaacattataccaaagttatacccagttctacctacttgtatatttctttactcatttcaataaagtgtttgaaaaaaaaaaaaaa

SEQ ID NO: 7283 - DNA, 1204 bp, Homo sapiens
  source 1..1204: mol_type = unassigned DNA
agtttctttgcagctaccaggacagagcttggtgagataattcttttattcttcaacttttattttaacttcaatggtacatgtgcagggatggaaattaaacacctcttgtttttggttgctgctgcttgcttactgcctatgttgtccatgaaaaagaaatcagctagagaccaatttaataagctcgtcaccgacttgccaaatgtacaagaagagatcgttaatatacacaacgccctcaggagaagagtagttccaccagccagcaacatgctgaagatgagttggagtgaagaggctgcacaaaatgccagaattttttcaaagtattgtgatatgacagagagcaacccccttgagaggagacttccaaataccttttgtggagaaaatatgcatatgacatcttatcctgtatcatggtcaagtgtaattggagtctggtacagtgagtctacaagtttcaaacatggagaatggacaacaacggatgatgacataactactgaccactacactcagattgtttgggccacatcttacctgattggctgtgccattgcatcttgccgccaacaaggatcacctcgatatctctacgtttgtcactattgtcatgactaacccctgcatctactatgatgaatacttcgactgtgacatacaagtccattatctgggatgcaaccactcaacaactatcctattctgtaaagccacttgtctgtgtgacactgagataaaataggtctttgttattttcaactgttctatgctgtgacgatgaggaggagatgtctgttggattcatgtcttttgctatagttcagtagcttctgctaaatttcactgattttaatcatgctggagaccttaactcccatcctgatacatcctgaagtaacactgttttaaactttcttagtgctggagtaaaaggtcaagtccaacacctgccttaaatttaaatcatgtgatttatagtttttaagttggcataattcaacttatggtataactgggtccctcaacagtaacctgggctaaaataggtcttatgtggttcaactcccacccccgccttccccatattttcaaccactctgattatcttccctgcacaactaacatccagtaataattcttcacttttaaaattttacttctactttaaatcaatcattaaaggaatccacaaagc

SEQ ID NO: 7284 - DNA, 1439 bp, Homo sapiens
  source 1..1439: mol_type = unassigned DNA
gtggcgcctggcaagtgaacaatcgcggtgagaggggcgcgccgcagctcctcaacgccgcaacgcgccggcccaactgcaggaagggttataaaattatacaccatggccctcctaaagacactctaggaaaaccatgtcatcctgatcttaaaacacctgcaagaaagagcacagtacttcaccattagtttccagcaatggctttactaccggtgttgtttctggttactgtgctgcttccatctttacctgcagaaggaaaggatcccgcttttactgctttgttaaccacccagttgcaagtgcaaagggagattgtaaataaacacaatgaactaaggaaagcagtctctccacctgccagtaacatgctaaagatggaatggagcagagaggtaacaacgaatgcccaaaggtgggcaaacaagtgcactttacaacatagtgatccagaggaccgcaaaaccagtacaagatgtggtgagaatctctatatgtcaagtgaccctacttcctggtcttctgcaatccaaagctggtatgacgagatcctagattttgtctatggtgtaggaccaaagagtcccaatgcagttgttggacattatactcagcttgtttggtactcgacttaccaggtaggctgtggaattgcctactgtcccaatcaagatagtctaaaatactactatgtttgccaatattgtcctgcaatgaaaacatatctcaataaaagggaggggataaacgtttggaaatgttttttaaggttgagacactttcaacttctcagaggagaacaacttctcactttcagtggtaataatatgaatagaaagaataccccgtaccaacaaggaacaccttgtgccggttgccctgatgactgtgacaaaggactatgcaccaatagttgccagtatcaagatctcctaagtaactgtgattccttgaagaatacagctggctgtgaacatgagttactcaaggaaaagtgcaaggctacttgcctatgtgagaacaaaatttactgatttacctagtgagcattgtgcaagactgcatggataagggctgcatcatttaattgcgacataccagtggaaattgtatgtatgttagtgacaaatttgatttcaaagagcaatgcatcttctcccccagatcatcacagaaatcactttcaggcaatgatttacaaaagtagcatagtagatgatgacaactgtgaactctgacataaatttagtgctttataacgaactgaatcaggttgaggattttgaaaactgtataaccataggatttaggtcactaggactttggatcaaaatggtgcattacgtatttcctgaaacatgctaaagaagaagactgtaacatcattgccattcctactacctgagtttttacttgcataaacaataaattcaaag

SEQ ID NO: 7285 - DNA, 1382 bp, Homo sapiens
  source 1..1382: mol_type = unassigned DNA
cggtgagaggggcgcgccgcagctcctcaacgccgcaacgcgccggcccaactgcaggaaggtctgtgctctggagccagggtaaatggttataaaattatacaccatggccctcctaaagacactctaggaaaaccatgtcatcctgatcttaaaacacctgcaagaaagagcacagtacttcaccattaataaagtagatatttcatcctgctcagaaaaccaacatttccagcaatggctttactaccggtgttgtttctggttactgtgctgcttccatctttacctgcagaaggaaaggatcccgcttttactgctttgttaaccacccagttgcaagtgcaaagggagattgtaaataaacacaatgaactaaggaaagcagtctctccacctgccagtaacatgctaaagatggaatggagcagagaggtaacaacgaatgcccaaaggtgggcaaacaagtgcactttacaacatagtgatccagaggaccgcaaaaccagtacaagatgtggtgagaatctctatatgtcaagtgaccctacttcctggtcttctgcaatccaaagctggtatgacgagatcctagattttgtctatggtgtaggaccaaagagtcccaatgcagttgttggacattatactcagcttgtttggtactcgacttaccaggtaggctgtggaattgcctactgtcccaatcaagatagtctaaaatactactatgtttgccaatattgtcctgctggtaataatatgaatagaaagaataccccgtaccaacaaggaacaccttgtgccggttgccctgatgactgtgacaaaggactatgcaccaatagttgccagtatcaagatctcctaagtaactgtgattccttgaagaatacagctggctgtgaacatgagttactcaaggaaaagtgcaaggctacttgcctatgtgagaacaaaatttactgatttacctagtgagcattgtgcaagactgcatggataagggctgcatcatttaattgcgacataccagtggaaattgtatgtatgttagtgacaaatttgatttcaaagagcaatgcatcttctcccccagatcatcacagaaatcactttcaggcaatgatttacaaaagtagcatagtagatgatgacaactgtgaactctgacataaatttagtgctttataacgaactgaatcaggttgaggattttgaaaactgtataaccataggatttaggtcactaggactttggatcaaaatggtgcattacgtatttcctgaaacatgctaaagaagaagactgtaacatcattgccattcctactacctgagtttttacttgcataaacaataaattcaaagctttacatctg

SEQ ID NO: 7286 - DNA, 4637 bp, Homo sapiens
  source 1..4637: mol_type = unassigned DNA
ggcctccgggctccggggagcctacaagaggcggtacgctgagccccggcacccactcgcatcccagggcgtctccggctgctcctattgagctgtctgctcgctgtgcccgctgtgcctgctgtgcccgcgctgtcgccgctgctaccgcgtctgctggacgcgggagacgccagcgagctggtgattggagccctgcggagagctcaagcgcccagctctgcccgaggagcccaggctgccccgtgagtcccatagttgctgcaggagtggagccatgagctgcgtcctgggtggtgtcatccccttggggctgctgttcctggtctgcggatcccaaggctacctcctgcccaacgtcactctcttagaggagctgctcagcaaataccagcacaacgagtctcactcccgggtccgcagagccatccccagggaggacaaggaggagatcctcatgctgcacaacaagcttcggggccaggtgcagcctcaggcctccaacatggagtacatgacctgggatgacgaactggagaagtctgctgcagcgtgggccagtcagtgcatctgggagcacgggcccaccagtctgctggtgtccatcgggcagaacctgggcgctcactggggcaggtatcgctctccggggttccatgtgcagtcctggtatgacgaggtgaaggactacacctacccctacccgagcgagtgcaacccctggtgtccagagaggtgctcggggcccatgtgcacgcactacacacagatagtttgggccaccaccaacaagatcggttgtgctgtgaacacctgccggaagatgactgtctggggagaagtttgggagaacgcggtctactttgtctgcaattattctccaaaggggaactggattggagaagccccctacaagaatggccggccctgctctgagtgcccacccagctatggaggcagctgcaggaacaacttgtgttaccgagaagaaacctacactccaaaacctgaaacggacgagatgaatgaggtggaaacggctcccattcctgaagaaaaccatgtttggctccaaccgagggtgatgagacccaccaagcccaagaaaacctctgcggtcaactacatgacccaagtcgtcagatgtgacaccaagatgaaggacaggtgcaaagggtccacgtgtaacaggtaccagtgcccagcaggctgcctgaaccacaaggcgaagatctttggaactctgttctatgaaagctcgtctagcatatgccgcgccgccatccactacgggatcctggatgacaagggaggcctggtggatatcaccaggaacgggaaggtccccttcttcgtgaagtctgagagacacggcgtgcagtccctcagcaaatacaaaccttccagctcattcatggtgtcaaaagtgaaagtgcaggatttggactgctacacgaccgttgctcagctgtgcccgtttgaaaagccagcaactcactgcccaagaatccattgtccggcacactgcaaagacgaaccttcctactgggctccggtgtttggaaccaacatctatgcagatacctcaagcatctgcaagacagccgtgcacgcgggagtcatcagcaacgagagtgggggtgacgtggacgtgatgcccgtggataaaaagaagacctacgtgggctcgctcaggaatggagttcagtctgaaagcctggggactcctcgggatggaaaggccttccggatctttgctgtcaggcagtgaatttccagcaccaggggagaaggggcgtcttcaggagggcttcggggttttgcttttatttttattttgtcattgcggggtatatggagagtcaggaaacttcctttgactgatgttcagtgtccatcactttgtggcctgtgggtgaggtgacatctcatcccctcactgaagcaacagcatcccaaggtgctcagccggactccctggtgcctgatcctgctggggcctgggggtctccatctggacgtcctctctcctttagagatctgagctgtctcttaaaggggacagttgcccaaaatgttccttgctatgtgttcttctgttggtggaggaagttgatttcaacctccctgccaaaagaacaaaccatttgaagctcacaattgtgaagcattcacggcgtcggaagaggccttttgagcaagcgccaatgagtttcaggaatgaagtagaaggtagttatttaaaaataaaaaacacagtccgtccctaccaatagaggaaaatggttttaatgtttgctggtcagacagacaaatgggctagagtaagagggctgcgggtatgagagaccccggctccgccctggcacgtgtccttgctggcggcccgccacaggcccccttcaatggccgcattcaggatggctctatacacagcagtgctggtttatgtagagttcagcagtcacttcagagatgtatcttgtctttgtcaggcccttcgtcttcatggcccacctgttttctgccgtgacctttggtcccattgaggactaaggatcgggaccctttctttaccccctacccgttgtggctcccaccctgcctcggactggtttacgtgtcctggttcacacccaggacttttctttgcaagcgaacctgtttgaagcccaagtcttaactcctggtctcgtaaggttccactgagacgagatgtctgagaacaaccaaagaaggcctgctctttgctgcttttaaaaaatgacaattaaatgtgcagattccccacgcacccgatgacctattttttcagccgtgggaggaatggagtctttggtacattcctcaccgaggttagcagctcagtttgtggttatgaaaccgtctgtggcctcatgacagcgagagatgggaatacactagaaggatctcttttcctgttttcgtgaaacgactcttgccaaacgttcccgaggcgccaaggagtgtagtacaccctggctgccatcactctataaaagtgcttcatgagcccagaccaaaagcccacagtgaaatgaagtacccttttgtaaatagcatttttttgcagaaggtgaaaattccactctctaccaccgggccagccaatagatcactttggtgaatgctagtttcaaatttgattcaaaatatttcttaggtgaaagaactagcagaaagtcaaaaactaagatactgtagactggacaagaaattctacctgggcacctaggtgatgccttctttctttgattgcctttctaataaatgcagaatctgaaggtaaataggtttaaaacaaaacaaaaacccacccctttaaggagttggtaaaaagcagttcaactcttagcttgactgagctaaaattcacaggactacgtgctttgtgcattgtagtctagtcgtaattcataggtactgactcctcagccccaaatgtcggagaggaagaattcggtcagcctgtcaggtcgtgagtccagttaccaccaaacatctgggaaacttctgggtgctgggtgctctgctgctggacttttgtggctgtgtctgtgtctgcaagataaattagatcgccctgtggggtttgcagaattagtgaagggtccaggacgatcccagtgggctcgcttccaaagcatcccactcaagggagacttgaaacttccagtgtgagttgaccccatcatttaaaaataaagtccccgggttccttaatgcctccttcactgggccttcctagcaggatagaaagtccttgcccagagcaggacctggctgtctttttttttttttttttttttttcccgagaccaagtttcactctgttgcccaaggtagagtgcagtggcgtgatctctgctcattgcaactgccgcctcccgggttcaagcaattctcatgcatcagcctcccaagtacctgggactacaggcgtgagctaccatgcccggctaatttttgtatttttagtagagatggggtttcattatgttggccaggctggtctcgaactccttacctcaggtgatccacccaccttggcctcccgaagtgctgggattacaggcatgagccactgcgcccggccatggacctggctgtctttatcatccccacaaacattttgaaactggaatatttgtcttcagaaaatggaaacaagactataaatgataagccctgtccctagcaccacctctcctgtgtgtggaatagaggcccctcgtgctaccaacacttaccctgtgtttaaaaagatcttgtaccaagccaacggcgttcctggctctcctgcccacaggatgaacattttcggcttccttaggagttttgccctaccgtattccaaagcgtgtgctggtttctcatattgtctgtaggctcactcagcccgcagtttatgtgtgtgcttttttctatgaaaaatgatgtattttgctacttcctgtgtacaaagttttattgtaaatgttttttgtgctttgcatgaacaggggccacgttgttgcaattgtttcagtagaactggtttgatttctaaaatgttcctgtaacatatcttttatgaacaaatctgaacaatttgtgaaataaaacattgaaaacca

SEQ ID NO: 7287 - DNA, 1994 bp, Homo sapiens
  source 1..1994: mol_type = unassigned DNA
aggagacggcccacggcgcccgcgggctggggcggtcgcttcttccttctccgtggcctacgagggtccccagcctgggtaaagatggccccatggcccccgaagggcctagtcccagctatgctctggggcctcagcctcttcctcaacctcccaggacctatctggctccagccctctccacctccccagtcttctcccccgcctcagccccatccgtgtcatacctgccggggactggttgacagctttaacaagggcctggagagaaccatccgggacaactttggaggtggaaacactgcctgggaggaagagaatttgtccaaatacaaagacagtgagacccgcctggtagaggtgctggagggtgtgtgcagcaagtcagacttcgagtgccaccgcctgctggagctgagtgaggagctggtggagagctggtggtttcacaagcagcaggaggccccggacctcttccagtggctgtgctcagattccctgaagctctgctgccccgcaggcaccttcgggccctcctgccttccctgtcctgggggaacagagaggccctgcggtggctacgggcagtgtgaaggagaagggacacgagggggcagcgggcactgtgactgccaagccggctacgggggtgaggcctgtggccagtgtggccttggctactttgaggcagaacgcaacgccagccatctggtatgttcggcttgttttggcccctgtgcccgatgctcaggacctgaggaatcaaactgtttgcaatgcaagaagggctgggccctgcatcacctcaagtgtgtagacattgatgagtgtggcacagagggagccaactgtggagctgaccaattctgcgtgaacactgagggctcctatgagtgccgagactgtgccaaggcctgcctaggctgcatgggggcagggccaggtcgctgtaagaagtgtagccctggctatcagcaggtgggctccaagtgtctcgatgtggatgagtgtgagacagaggtgtgtccgggagagaacaagcagtgtgaaaacaccgagggcggttatcgctgcatctgtgccgagggctacaagcagatggaaggcatctgtgtgaaggagcagatcccaggtgcattccccatcttaactgatttaacccctgaaacaacccgacgctggaagttgggttctcatccccactctacatatgtaaaaatgaagatgcagagagatgaagctactttcccagggctatatggcaagcaagtcgcaaagctgggatcccaatccagacagtctgaccgtggaacgagactcatacacagtcagcaggcttcttctcagagatgacagaagacgagttggtggtgctgcagcagatgttctttggcatcatcatctgtgcactggccacgctggctgctaagggcgacttggtgttcaccgccatcttcattggggctgtggcggccatgactggctactggttgtcagagcgcagtgaccgtgtgctggagggcttcatcaagggcagataatcgcggccaccacctgtaggacctcctcccacccacgctgcccccagagcttgggctgccctcctgctggacactcaggacagcttggtttatttttgagagtggggtaagcacccctacctgccttacagagcagcccaggtacccaggcccgggcagacaaggcccctggggtaaaaagtagccctgaaggtggataccatgagctcttcacctggcggggactggcaggcttcacaatgtgtgaatttcaaaagtttttccttaatggtggctgctagagctttggcccctgcttaggattaggtggtcctcacaggggtggggccatcacagctccctcctgccagctgcatgctgccagttcctgttctgtgttcaccacatccccacaccccattgccacttatttattcatctcaggaaataaagaaaggtcttggaaagttaaaa

SEQ ID NO: 7288 - DNA, 2696 bp, Homo sapiens
  source 1..2696: mol_type = unassigned DNA
tggcagcgacgcggtgaggagacggcccacggcgcccgcgggctggggcggtcgcttcttccttctccgtggcctacgagggtctggatccttctctgccggctcgtgggccgtgcctttgcccttctgcgaggccctgaatctgatcccttcccttcatatccggatccgggctcctccctccaagcccggggttccggacacctcccccaagacaacccctctggcctcctctccttcagtacttggaatctgatctcttctccctaattctgcggatccggcccctaatattctttatcagaccctcagacaagaggctgacttctgcccccttgtcaaggagcgaggccactttcctctccaccccatgctagcgaggataacttatttctcttctggaattgcatcttatgcgcctttccccacccatccccacagcccctgcaatacccagtttggcctcttttgcttgtaataacgcagatcccagcgccacggcaccttagaacagacctttttctttctcgcgtggggcctgactccttcagtgaagcctctccacgccctctatctgcaggtccccagcctgggtaaagatggccccatggcccccgaagggcctagtcccagctatgctctggggcctcagcctcttcctcaacctcccaggacctatctggctccagccctctccacctccccagtcttctcccccgcctcagccccatccgtgtcatacctgccggggactggttgacagctttaacaagggcctggagagaaccatccgggacaactttggaggtggaaacactgcctgggaggaagagaatttgtccaaatacaaagacagtgagacccgcctggtagaggtgctggagggtgtgtgcagcaagtcagacttcgagtgccaccgcctgctggagctgagtgaggagctggtggagagctggtggtttcacaagcagcaggaggccccggacctcttccagtggctgtgctcagattccctgaagctctgctgccccgcaggcaccttcgggccctcctgccttccctgtcctgggggaacagagaggccctgcggtggctacgggcagtgtgaaggagaagggacacgagggggcagcgggcactgtgactgccaagccggctacgggggtgaggcctgtggccagtgtggccttggctactttgaggcagaacgcaacgccagccatctggtatgttcggcttgttttggcccctgtgcccgatgctcaggacctgaggaatcaaactgtttgcaatgcaagaagggctgggccctgcatcacctcaagtgtgtagacattgatgagtgtggcacagagggagccaactgtggagctgaccaattctgcgtgaacactgagggctcctatgagtgccgagactgtgccaaggcctgcctaggctgcatgggggcagggccaggtcgctgtaagaagtgtagccctggctatcagcaggtgggctccaagtgtctcgatgtggatgagtgtgagacagaggtgtgtccgggagagaacaagcagtgtgaaaacaccgagggcggttatcgctgcatctgtgccgagggctacaagcagatggaaggcatctgtgtgaaggagcagatcccagagtcagcaggcttcttctcagagatgacagaagacgagttggtggtgctgcagcagatgttctttggcatcatcatctgtgcactggccacgctggctgctaagggcgacttggtgttcaccgccatcttcattggggctgtggcggccatgactggctactggttgtcagagcgcagtgaccgtgtgctggagggcttcatcaagggcagataatcgcggccaccacctgtaggacctcctcccacccacgctgcccccagagcttgggctgccctcctgctggacactcaggacagcttggtttatttttgagagtggggtaagcacccctacctgccttacagagcagcccaggtacccaggcccgggcagacaaggcccctggggtaaaaagtagccctgaaggtggataccatgagctcttcacctggcggggactggcaggcttcacaatgtgtgaatttcaaaagtttttccttaatggtggctgctagagctttggcccctgcttaggattaggtggtcctcacaggggtggggccatcacagctccctcctgccagctgcatgctgccagttcctgttctgtgttcaccacatccccacaccccattgccacttatttattcatctcaggaaataaagaaaggtcttggaaagttaaaaggcatcagtcttactacctgtcccaccacccccaccttagggaaatgtcctagaatcctgggaaattgagggcttctttgatggtgagtggagaaaagatagaggagaaggttgcccctgaagtgctgttaggagaaggaggatagaggaatcagccttaggagggttccatgccagctgtcatttggcaaaggaccctggacagatgacttttgcctctgaacttcactcttctctttcctcaaatgggcttcataatgctttccactcaggcttaacatgagaattaaatgaggtgacaaatgtgaagacctggacagtacacaacagatattcaataaaagtgtggtcgccattatgaccagagcctccaagcctcaa

SEQ ID NO: 7289 - DNA, 1728 bp, Homo sapiens
  source 1..1728: mol_type = unassigned DNA
tgcgttttacgcaggctgtggcagcgacgcggtccccagcctgggtaaagatggccccatggcccccgaagggcctagtcccagctatgctctggggcctcagcctcttcctcaacctcccaggacctatctggctccagccctctccacctccccagtcttctcccccgcctcagccccatccgtgtcatacctgccggggactggttgacagctttaacaagggcctggagagaaccatccgggacaactttggaggtggaaacactgcctgggaggaagagaatttgtccaaatacaaagacagtgagacccgcctggtagaggtgctggagggtgtgtgcagcaagtcagacttcgagtgccaccgcctgctggagctgagtgaggagctggtggagagctggtggtttcacaagcagcaggaggccccggacctcttccagtggctgtgctcagattccctgaagctctgctgccccgcaggcaccttcgggccctcctgccttccctgtcctgggggaacagagaggccctgcggtggctacgggcagtgtgaaggagaagggacacgagggggcagcgggcactgtgactgccaagccggctacgggggtgaggcctgtggccagtgtggccttggctactttgaggcagaacgcaacgccagccatctggtatgttcggcttgttttggcccctgtgcccgatgctcaggacctgaggaatcaaactgtttgcaatgcaagaagggctgggccctgcatcacctcaagtgtgtagacattgatgagtgtggcacagagggagccaactgtggagctgaccaattctgcgtgaacactgagggctcctatgagtgccgagactgtgccaaggcctgcctaggctgcatgggggcagggccaggtcgctgtaagaagtgtagccctggctatcagcaggtgggctccaagtgtctcgatgtggatgagtgtgagacagaggtgtgtccgggagagaacaagcagtgtgaaaacaccgagggcggttatcgctgcatctgtgccgagggctacaagcagatggaaggcatctgtgtgaaggagcagatcccagagtcagcaggcttcttctcagagatgacagaagacgagttggtggtgctgcagcagatgttctttggcatcatcatctgtgcactggccacgctggctgctaagggcgacttggtgttcaccgccatcttcattggggctgtggcggccatgactggctactggttgtcagagcgcagtgaccgtgtgctggagggcttcatcaagggcagataatcgcggccaccacctgtaggacctcctcccacccacgctgcccccagagcttgggctgccctcctgctggacactcaggacagcttggtttatttttgagagtggggtaagcacccctacctgccttacagagcagcccaggtacccaggcccgggcagacaaggcccctggggtaaaaagtagccctgaaggtggataccatgagctcttcacctggcggggactggcaggcttcacaatgtgtgaatttcaaaagtttttccttaatggtggctgctagagctttggcccctgcttaggattaggtggtcctcacaggggtggggccatcacagctccctcctgccagctgcatgctgccagttcctgttctgtgttcaccacatccccacaccccattgccacttatttatt

SEQ ID NO: 7290 - DNA, 1778 bp, Homo sapiens
  source 1..1778: mol_type = unassigned DNA
gcgacgcggtgaggagacggcccacggcgcccgcgggctggggcggtcgcttcttccttctccgtggcctacgagggtccccagcctgggtaaagatggccccatggcccccgaagggcctagtcccagctatgctctggggcctcagcctcttcctcaacctcccaggacctatctggctccagccctctccacctccccagtcttctcccccgcctcagccccatccgtgtcatacctgccggggactggttgacagctttaacaagggcctggagagaaccatccgggacaactttggaggtggaaacactgcctgggaggaagagaatttgtccaaatacaaagacagtgagacccgcctggtagaggtgctggagggtgtgtgcagcaagtcagacttcgagtgccaccgcctgctggagctgagtgaggagctggtggagagctggtggtttcacaagcagcaggaggccccggacctcttccagtggctgtgctcagattccctgaagctctgctgccccgcaggcaccttcgggccctcctgccttccctgtcctgggggaacagagaggccctgcggtggctacgggcagtgtgaaggagaagggacacgagggggcagcgggcactgtgactgccaagccggctacgggggtgaggcctgtggccagtgtggccttggctactttgaggcagaacgcaacgccagccatctggtatgttcggcttgttttggcccctgtgcccgatgctcaggacctgaggaatcaaactgtttgcaatgcaagaagggctgggccctgcatcacctcaagtgtgtagacattgatgagtgtggcacagagggagccaactgtggagctgaccaattctgcgtgaacactgagggctcctatgagtgccgagactgtgccaaggcctgcctaggctgcatgggggcagggccaggtcgctgtaagaagtgtagccctggctatcagcaggtgggctccaagtgtctcgatgtggatgagtgtgagacagaggtgtgtccgggagagaacaagcagtgtgaaaacaccgagggcggttatcgctgcatctgtgccgagggctacaagcagatggaaggcatctgtgtgaaggagcagatcccagagtcagcaggcttcttctcagagatgacagaagacgagttggtggtgctgcagcagatgttctttggcatcatcatctgtgcactggccacgctggctgctaagggcgacttggtgttcaccgccatcttcattggggctgtggcggccatgactggctactggttgtcagagcgcagtgaccgtgtgctggagggcttcatcaagggcagataatcgcggccaccacctgtaggacctcctcccacccacgctgcccccagagcttgggctgccctcctgctggacactcaggacagcttggtttatttttgagagtggggtaagcacccctacctgccttacagagcagcccaggtacccaggcccgggcagacaaggcccctggggtaaaaagtagccctgaaggtggataccatgagctcttcacctggcggggactggcaggcttcacaatgtgtgaatttcaaaagtttttccttaatggtggctgctagagctttggcccctgcttaggattaggtggtcctcacaggggtggggccatcacagctccctcctgccagctgcatgctgccagttcctgttctgtgttcaccacatccccacaccccattgccacttatttattcatct

SEQ ID NO: 7291 - DNA, 2016 bp, Homo sapiens
  source 1..2016: mol_type = unassigned DNA
gcgagagcgcccccgagcagcgcccgcgccctccgcgccttctccgccgggacctcgagcgaaagacgcccgcccgccgcccagccctcgcctccctgcccaccgggcccaccgcgccgccaccccgaccccgctgcgcacggcctgtccgctgcacaccagcttgttggcgtcttcgtcgccgcgctcgccccgggctactcctgcgcgccacaatgagctcccgcatcgccagggcgctcgccttagtcgtcacccttctccacttgaccaggctggcgctctccacctgccccgctgcctgccactgccccctggaggcgcccaagtgcgcgccgggagtcgggctggtccgggacggctgcggctgctgtaaggtctgcgccaagcagctcaacgaggactgcagcaaaacgcagccctgcgaccacaccaaggggctggaatgcaacttcggcgccagctccaccgctctgaaggggatctgcagagctcagtcagagggcagaccctgtgaatataactccagaatctaccaaaacggggaaagtttccagcccaactgtaaacatcagtgcacatgtattgatggcgccgtgggctgcattcctctgtgtccccaagaactatctctccccaacttgggctgtcccaaccctcggctggtcaaagttaccgggcagtgctgcgaggagtgggtctgtgacgaggatagtatcaaggaccccatggaggaccaggacggcctccttggcaaggagctgggattcgatgcctccgaggtggagttgacgagaaacaatgaattgattgcagttggaaaaggcagctcactgaagcggctccctgtttttggaatggagcctcgcatcctatacaaccctttacaaggccagaaatgtattgttcaaacaacttcatggtcccagtgctcaaagacctgtggaactggtatctccacacgagttaccaatgacaaccctgagtgccgccttgtgaaagaaacccggatttgtgaggtgcggccttgtggacagccagtgtacagcagcctgaaaaagggcaagaaatgcagcaagaccaagaaatcccccgaaccagtcaggtttacttacgctggatgtttgagtgtgaagaaataccggcccaagtactgcggttcctgcgtggacggccgatgctgcacgccccagctgaccaggtgtgaagatgcggttccgctgcgaagatggggagacattttccaagaacgtcatgatgatccagtcaaatgcaactacaactgcccgcatgccaatgaagcagcgtttcccttctacaggctgttcaatgacattcacaaatttagggactaaatgctacctgggtttccagggcacacctagacaaacaagggagaagagtgtcagaatcagaatcatggagaaaatgggcgggggtggtgtgggtgatgggactcattgtagaaaggaagccttgctcattcttgaggagcattaaggtatttcgaaactgccaagggtgctggtgcggatggacactaatgcagccacgattggagaatactttgcttcatagtattggagcacatgttactgcttcattttggagcttgtggagttgatgactttctgttttctgtttgtaaattatttgctaagcatattttctctaggcttttttccttttggggttctacagtcgtaaaagagataataagattagttggacagtttaaagcttttattcgtcctttgacaaaagtaaatgggagggcattccatcccttcctgaagggggacactccatgagtgtctgtgagaggcagctatctgcactctaaactgcaaacagaaatcaggtgttttaagactgaatgttttatttatcaaaatgtagcttttggggagggaggggaaatgtaatactggaataatttgtaaatgattttaattttatattcagtgaaaagattttatttatggaattaaccatttaataaagaaatatttacct

SEQ ID NO: 7292 - DNA, 2290 bp, Homo sapiens
  source 1..2290: mol_type = unassigned DNA
agaccgcgagcgagagcgcccccgagcagcgcccgcgccctccgcgccttctccgccgggacctcgagcgaaagacgcccgcccgccgcccagccctcgcctccctgcccaccgggcccaccgcgccgccaccccgaccccgctgcgcacggcctgtccgctgcacaccagcttgttggcgtcttcgtcgccgcgctcgccccgggctactcctgcgcgccacaatgagctcccgcatcgccagggcgctcgccttagtcgtcacccttctccacttgaccaggctggcgctctccacctgccccgctgcctgccactgccccctggaggcgcccaagtgcgcgccgggagtcgggctggtccgggacggctgcggctgctgtaaggtctgcgccaagcagctcaacgaggactgcagcaaaacgcagccctgcgaccacaccaaggggctggaatgcaacttcggcgccagctccaccgctctgaaggggatctgcagagctcagtcagagggcagaccctgtgaatataactccagaatctaccaaaacggggaaagtttccagcccaactgtaaacatcagtgcacatgtattgatggcgccgtgggctgcattcctctgtgtccccaagaactatctctccccaacttgggctgtcccaaccctcggctggtcaaagttaccgggcagtgctgcgaggagtgggtctgtgacgaggatagtatcaaggaccccatggaggaccaggacggcctccttggcaaggagctgggattcgatgcctccgaggtggagttgacgagaaacaatgaattgattgcagttggaaaaggcagctcactgaagcggctccctgtttttggaatggagcctcgcatcctatacaaccctttacaaggccagaaatgtattgttcaaacaacttcatggtcccagtgctcaaagacctgtggaactggtatctccacacgagttaccaatgacaaccctgagtgccgccttgtgaaagaaacccggatttgtgaggtgcggccttgtggacagccagtgtacagcagcctgaaaaagggcaagaaatgcagcaagaccaagaaatcccccgaaccagtcaggtttacttacgctggatgtttgagtgtgaagaaataccggcccaagtactgcggttcctgcgtggacggccgatgctgcacgccccagctgaccaggactgtgaagatgcggttccgctgcgaagatggggagacattttccaagaacgtcatgatgatccagtcctgcaaatgcaactacaactgcccgcatgccaatgaagcagcgtttcccttctacaggctgttcaatgacattcacaaatttagggactaaatgctacctgggtttccagggcacacctagacaaacaagggagaagagtgtcagaatcagaatcatggagaaaatgggcgggggtggtgtgggtgatgggactcattgtagaaaggaagccttgctcattcttgaggagcattaaggtatttcgaaactgccaagggtgctggtgcggatggacactaatgcagccacgattggagaatactttgcttcatagtattggagcacatgttactgcttcattttggagcttgtggagttgatgactttctgttttctgtttgtaaattatttgctaagcatattttctctaggcttttttccttttggggttctacagtcgtaaaagagataataagattagttggacagtttaaagcttttattcgtcctttgacaaaagtaaatgggagggcattccatcccttcctgaagggggacactccatgagtgtctgtgagaggcagctatctgcactctaaactgcaaacagaaatcaggtgttttaagactgaatgttttatttatcaaaatgtagcttttggggagggaggggaaatgtaatactggaataatttgtaaatgattttaattttatattcagtgaaaagattttatttatggaattaaccatttaataaagaaatatttacctaatatctgagtgtatgccattcggtatttttagaggtgctccaaagtcattaggaacaacctagctcacgtactcaattattcaaacaggacttattgggatacagcagtgaattaagctattaaaataagataatgattgcttttataccttcagtagagaaaagtctttgcatataaagtaatgtttaaaaaacatgtattgaacacgacattgtatgaagcacaataaagattctgaagctaaatttgtgatttaa

SEQ ID NO: 7293 - DNA, 1336 bp, Homo sapiens
  source 1..1336: mol_type = unassigned DNA
agaccgcgagcgagagcgcccccgagcagcgcccgcgccctccgcgccttctccgccgggacctcgagcgaaagacgcccgcccgccgcccagccctcgcctccctgcccaccgggcccaccgcgccgccaccccgaccccgctgcgcacggcctgtccgctgcacaccagcttgttggcgtcttcgtcgccgcgctcgccccgggctactcctgcgcgccacaatgagctcccgcatcgccagggcgctcgccttagtcgtcacccttctccacttgaccaggctggcgctctccacctgcggctgctgtaaggtctgcgccaagcagctcaacgaggactgcagcaaaacgcagccctgcgaccacaccaaggggctggaatgcaacttcggcgccagctccaccgctctgaaggggatctgcagagctcagtcagagggcagaccctgtgaatataactccagaatctaccaaaacggggaaagtttccagcccaactgtaaacatcagtgcacatgtattgatggcgccgtgggctgcattcctctgtgtccccaagaactatctctccccaacttgggctgtcccaaccctcggctggtcaaagttaccgggcagtgctgcgaggagtgggtctgtgacgaggatagtatcaaggaccccatggaggaccaggacggcctccttggcaaggagctgggattcgatgcctccgaggtggagttgacgagaaacaatgaattgattgcagttggaaaaggcagctcactgaagcggctccctgtttttggaatggagcctcgcatcctatacaaccctttacaaggccagaaatgtattgttcaaacaacttcatggtcccagtgctcaaagacctgtggaactggtatctccacacgagttaccaatgacaaccctgagtgccgccttgtgaaagaaacccggatttgtgaggtgcggccttgtggacagccagtgtacagcagcctgaaaaagggcaagaaatgcagcaagaccaagaaatcccccgaaccagtcaggtttacttacgctggatgtttgagtgtgaagaaataccggcccaagtactgcggttcctgcgtggacggccgatgctgcacgccccagctgaccaggactgtgaagatgcggttccgctgcgaagatggggagacattttccaagaacgtcatgatgatccagtcctgcaaatgcaactacaactgcccgcatgccaatgaagcagcgtttcccttctacaggctgttcaatgacattcacaaatttagggactaaatgctacctgggtttccagggcacacctagacaaacaa

SEQ ID NO: 7294 - DNA, 2576 bp, Homo sapiens
  source 1..2576: mol_type = unassigned DNA
gagcaggcactctgtgaatggactgtgcttttacgaccctacagggtatcaagatactgtgcagctcgccaacaaggattaattgcaaggactggtagatcgaatttactgaagacttggagcttgcttctgagaacaaacgcaaaaggacagtaaactgtggaccttgaagttagcagcgtgggcttcctctaatattacaccgtaaaaggcattgatcaccataagaaggaacatttgtgaaggtactccagtgccagaaagaggcacaaagcagacattcgtagagaaacatggatgaaacaggaaatctgacagtatcttctgccacatgccatgacactattgatgacttccgcaatcaagtgtattccaccttgtactctatgatctctgttgtaggcttctttggcaatggctttgtgctctatgtcctcataaaaacctatcacaagaagtcagccttccaagtatacatgattaatttagcagtagcagatctactttgtgtgtgcacactgcctctccgtgtggtctattatgttcacaaaggcatttggctctttggtgacttcttgtgccgcctcagcacctatgctttgtatgtcaacctctattgtagcatcttctttatgacagccatgagctttttccggtgcattgcaattgtttttccagtccagaacattaatttggttacacagaaaaaagccaggtttgtgtgtgtaggtatttggatttttgtgattttgaccagttctccatttctaatggccaaaccacaaaaagatgagaaaaataataccaagtgctttgagcccccacaagacaatcaaactaaaaatcatgttttggtcttgcattatgtgtcattgtttgttggctttatcatcccttttgttattataattgtctgttacacaatgatcattttgaccttactaaaaaaatcaatgaaaaaaaatctgtcaagtcataaaaaggctataggaatgatcatggtcgtgaccgctgcctttttagtcagtttcatgccatatcatattcaacgtaccattcaccttcattttttacacaatgaaactaaaccctgtgattctgtccttagaatgcagaagtccgtggtcataaccttgtctctggctgcatccaattgttgctttgaccctctcctatatttcttttctgggggtaactttaggaaaaggctgtctacattcagaaagcattctttgtccagcgtgacttatgtacccagaaagaaggcctctttgccagaaaaaggagaagaaatatgtaaagtatagtttaaacccatttccagtccaaaccaatgaaaatagtttcccaaataagtattttgtcaaatcatttacaaaaaaaataaaaattttacttaatattttacaaatacttaactatttgggcctacaactctatctcatttatgcatccacatgattagatatttatagatattttaagtgctaaaaattcggtccacaactatgaactgaattataaataattttgaccactcaccagaatttggagaatatttttatctttgcactataaaatatgtcttatattaaagttttcctcttcaaataaaagctttacaaacgataaaatatataaaattagtcaataaaaatacatgcaagctaaaagttataaaatataaaactagatataaaattggcaaatagttctgaatcattctaacatattcctttgcatgcatgccatcagatgagaactggagatgactcaggagctacataaaacgtactgtcacccttctttgtagtactgattcgctaggcaaattagggccatttcttccaaaagagaatgtaaaagtgctagaacagactagtattcagctaaagggtcctaaaagcaccatacaatgttcaatatggcaacaggagaaatctggtcaaaagccagtttgtctccagttttcttctgcctttgcctcaggctcccaaaattgaatagtggagttttagctgctcagtgaggttcctgtagagatttctctccatccatgacatataattcttccttaagaagccagacaactggcactcctatatataaatagaagtaattaaaaacttatctgaagaagagaaaaggaaaaggaatctacttttctatatgccaattgctgggatcaaaataaactacaaaggatttatgaagaaaattgtgaatgttcacattacaaattcttttaagaagtgcatacatttatgtatatgtatacaactatatgtaagagattttgctgtatgatatgcattatgggtgaaagttcacgataagttttattattgctttattactttttattggtatgttgacaggaatatcatggatatgtttacagtgacttttatattacagtggacgctttgatcttaaaacagccacaacaactcatctacggctgaaatataatatgcgtggacaagcttttgctgaagtgtagtgtgtcctttaagtttgttttttaaaaagtaacttacctcagaagaaataaataactataaagaaaaaagaaa

SEQ ID NO: 7295 - DNA, 2548 bp, Homo sapiens
  source 1..2548: mol_type = unassigned DNA
agcatggagagaaaatttatgtccttgcaaccatccatctccgtatcagaaatggaaccaaatggcaccttcagcaataacaacagcaggaactgcacaattgaaaacttcaagagagaatttttcccaattgtatatctgataatatttttctggggagtcttgggaaatgggttgtccatatatgttttcctgcagccttataagaagtccacatctgtgaacgttttcatgctaaatctggccatttcagatctcctgttcataagcacgcttcccttcagggctgactattatcttagaggctccaattggatatttggagacctggcctgcaggattatgtcttattccttgtatgtcaacatgtacagcagtatttatttcctgaccgtgctgagtgttgtgcgtttcctggcaatggttcacccctttcggcttctgcatgtcaccagcatcaggagtgcctggatcctctgtgggatcatatggatccttatcatggcttcctcaataatgctcctggacagtggctctgagcagaacggcagtgtcacatcatgcttagagctgaatctctataaaattgctaagctgcagaccatgaactatattgccttggtggtgggctgcctgctgccatttttcacactcagcatctgttatctgctgatcattcgggttctgttaaaagtggaggtcccagaatcggggctgcgggtttctcacaggaaggcactgaccaccatcatcatcaccttgatcatcttcttcttgtgtttcctgccctatcacacactgaggaccgtccacttgacgacatggaaagtgggtttatgcaaagacagactgcataaagctttggttatcacactggccttggcagcagccaatgcctgcttcaatcctctgctctattactttgctggggagaattttaaggacagactaaagtctgcactcagaaaaggccatccacagaaggcaaagacaaagtgtgttttccctgttagtgtgtggttgagaaaggaaacaagagtataaggagctcttagatgagacctgttcttgtatccttgtgtccatcttcattcactcatagtctccaaatgactttgtatttacatcactcccaacaaatgttgattcttaatatttagttgaccattacttttgttaataagacctacttcaaaaattttattcagtgtattttcagttgttgagtcttaatgagggatacaggaggaaaaatccctactagagtcctgtgggctgaaatatcagactgggaaaaaatgcaaagcacattggatcctacttttcttcagatattgaaccagatctctggcccatcaggctttctaaattcttcaaaagagccacaacttccccagcttctccagctcccctgtcctcttcaatcccttgagatatagccaactaacgacgctactggaagccccagagcagaaaagaagcacatcctaagattcagggaaagactaactgtgaaaaggaaggctgtcctataacaaagcagcatcaagtcccaagtaaggacagtgagagaaaagggggagaaggattggagcaaaagagaactggcaataagtaggggaaggaagaatttcattttgcattgggagagaggttctaacacactgaaggcaaccctatttctactgtttctctcttgccagggtattaggaaggacaggaaaagtaggaggaggatctggggcattgccctaggaaatgaaagaattgtgtatagaatggaagggggatcatcaaggacatgtatctcaaattttctttgagatgcaggttagttgaccttgctgcagttctccttcccattaattcattgggatggaagccaaaaataaaagaggtgcctctgaggattagggttgagcactcaagggaaagatggagtagagggcaaatagcaaaagttgttgcactcctgaaattctattaacatttccgcagaagatgagtagggagatgctgccttcccttttgagatagtgtagaaaaacactagatagtgtgagaggttcctttctgtccactgaaacaaggctaaggatactaccaactactatcaccatgaccattgtactgacaacaattgaatgcagtctccctgcagggcagattatgccaggcactttacatttgttgatcccatttgacattcacaccaaagctctgagttccattttacagctgaagaaattgaagcttagagaaattaagaagcttgtttaagtttacacagctagtaagagttttaaaaatctctgtgcagaagtgttggctgggtgctctccccaccactacccttgtaaacttccaggaagattggttgaaagtctgaataaaagctgtcctttcctaccaatttcctccccctcctcactctcacaagaaaaccaaaagtttctcttcagagttgttgactcatagtacagtaaagggtggaggtgatatggcattctgaaagtagggagggactaagtcagtcatcatactaaac

SEQ ID NO: 7296 - DNA, 2491 bp, Homo sapiens
  source 1..2491: mol_type = unassigned DNA
agattctaggaagtgtctgtagccgcagctgcgggtccgggattcccagccatggcagattcctccgggcagcagggcaaaggccggcgtgtgcagccccagtggtcccctcctgctgggacccagccatgcagactccacctttacaacagcctcaccaggaacaaggaagtgttcatacctcaagatgggaaaaaggtgacgtggtattgctgtgggccaaccgtctatgacgcatctcacatggggcacgccaggtcctacatctcttttgatatcttgagaagagtgttgaaggattacttcaaatttgatgtcttttattgcatgaacattacggatattgatgacaagatcatcaagagggcccggcagaaccacctgttcgagcagtatcgggagaagaggcctgaagcggcacagctcttggaggatgttcaggccgccctgaagccattttcagtaaaattaaatgagaccacggatcccgataaaaagcagatgctcgaacggattcagcacgcagtgcagcttgccacagagccacttgagaaagctgtgcagtccagactcacgggagaggaagtcaacagctgtgtggaggtgttgctggaagaagccaaggatttgctctctgactggctggattctacacttggctgtgatgtcactgacaattccatcttctccaagctgcccaagttctgggagggggacttccacagagacatggaagctctgaatgttctccctccagatgtcttaacccgggttagtgagtatgtgccagaaattgtgaactttgtccagaagattgtggacaacggttacggctatgtctccaatgggtctgtctactttgatacagcgaagtttgcttctagcgagaagcactcctatgggaagctggtgcctgaggccgttggagatcagaaagcccttcaagaaggggaaggtgacctgagcatctctgcagaccgcctgagtgagaagcgctctcccaacgactttgccttatggaaggcctctaagcccggagaaccgtcctggccgtgcccttggggaaagggtcgtccgggctggcatatcgagtgctcggccatggcaggcaccctcctaggggcttcgatggacattcacggaggtgggttcgacctccggttcccccaccatgacaatgagctggcacagtcggaggcctactttgaaaacgactgctgggtcaggtacttcctgcacacaggccacctgaccattgcaggctgcaaaatgtcaaagtcactaaaaaacttcatcaccattaaagatgccttgaaaaagcactcagcacggcagttgcggctggccttcctcatgcactcgtggaaggacaccctggactactccagcaacaccatggagtcagcgcttcaatatgagaagttcttgaatgagtttttcttaaatgtgaaagatatccttcgcgctcctgttgacatcactggtcagtttgagaagtggggagaagaagaagcagaactgaataagaacttttatgacaagaagacagcaattcacaaagccctctgtgacaatgttgacacccgcaccgtcatggaagagatgcgggccttggtcagtcagtgcaacctctatatggcagcccggaaagccgtgaggaagaggcccaaccaggctctgctggagaacatcgccctgtacctcacccatatgctgaagatctttggggccgtagaagaggacagctccctgggattcccggtcggagggcctggaaccagcctcagtctcgaggccacagtcatgccctaccttcaggtgttatcagaattccgagaaggagtgcggaagattgcccgagagcaaaaagtccctgagattctgcagctcagcgatgccctgcgggacaacatcctgcccgagcttggggtgcggtttgaagaccacgaaggactgcccacagtggtgaaactggtagacagaaacaccttattaaaagagagagaagaaaagagacgggttgaagaggagaagaggaagaagaaagaggaggcggcccggaggaaacaggaacaagaagcagcaaagctggccaagatgaagattccccccagtgagatgttcttgtcagaaaccgacaaatactccaagtttgatgaaaatgtaagcatggtctgcccacacatgacatggagggcaaagagctcagcaaagggcaagccaagaagctgaagaagctcttcgaggctcaggagaagctctacaaggaatatctgcagatggcccagaatggaagcttccagtgagggggcacaggactgactttttaaaccattgtggactagtggctgctgtctgcctcagtgacaatgtcccagcgctcctatcatgtttacagtcacccttgggtcctaaattaagagttgtgttcatgtaggttcgtgtcgtcgttggctctgagacattgataataaatttttctcaacagtga

SEQ ID NO: 7297 - DNA, 2758 bp, Homo sapiens
  source 1..2758: mol_type = unassigned DNA
ccggggcggcggttgcatcagattctaggaagtgtctgtagccgcagctgcgggtccgggattcccagccatggcagattcctccgggcagcaggctcctgactacaggtccattctgagcattagtgacgaggcagccagggcacaagccctgaacgagcacctcagcacgcgtagctatgtccaggggtactcactgtcccaggcagacgtggacgcgttcaggcagctctcggccccgcccgctgacccccagctcttccacgtggctcggtggttcaggcacatagaagcgctcctgggtagcccctgtggcaaaggccagccctgcaggctccaagcaagcaaaggccggcgtgtgcagccccagtggtcccctcctgctgggacccagccatgcagactccacctttacaacagcctcaccaggaacaaggaagtgttcatacctcaagatgggaaaaaggtgacgtggtattgctgtgggccaaccgtctatgacgcatctcacatggggcacgccaggtcctacatctcttttgatatcttgagaagagtgttgaaggattacttcaaatttgatgtcttttattgcatgaacattacggatattgatgacaagatcatcaagagggcccggcagaaccacctgttcgagcagtatcgggagaagaggcctgaagcggcacagctcttggaggatgttcaggccgccctgaagccattttcagtaaaattaaatgagaccacggatcccgataaaaagcagatgctcgaacggattcagcacgcagtgcagcttgccacagagccacttgagaaagctgtgcagtccagactcacgggagaggaagtcaacagctgtgtggaggtgttgctggaagaagccaaggatttgctctctgactggctggattctacacttggctgtgatgtcactgacaattccatcttctccaagctgcccaagttctgggagggggacttccacagagacatggaagctctgaatgttctccctccagatgtcttaacccgggttagtgagtatgtgccagaaattgtgaactttgtccagaagattgtggacaacggttacggctatgtctccaatgggtctgtctactttgatacagcgaagtttgcttctagcgagaagcactcctatgggaagctggtgcctgaggccgttggagatcagaaagcccttcaagaaggggaaggtgacctgagcatctctgcagaccgcctgagtgagaagcgctctcccaacgactttgccttatggaaggcctctaagcccggagaaccgtcctggccgtgcccttggggaaagggtcgtccgggctggcatatcgagtgctcggccatggcaggcaccctcctaggggcttcgatggacattcacggaggtgggttcgacctccggttcccccaccatgacaatgagctggcacagtcggaggcctactttgaaaacgactgctgggtcaggtacttcctgcacacaggccacctgaccattgcaggctgcaaaatgtcaaagtcactaaaaaacttcatcaccattaaagatgccttgaaaaagcactcagcacggcagttgcggctggccttcctcatgcactcgtggaaggacaccctggactactccagcaacaccatggagtcagcgcttcaatatgagaagttcttgaatgagtttttcttaaatgtgaaagatatccttcgcgctcctgttgacatcactggtcagtttgagaagtggggagaagaagaagcagaactgaataagaacttttatgacaagaagacagcaattcacaaagccctctgtgacaatgttgacacccgcaccgtcatggaagagatgcgggccttggtcagtcagtgcaacctctatatggcagcccggaaagccgtgaggaagaggcccaaccaggctctgctggagaacatcgccctgtacctcacccatatgctgaagatctttggggccgtagaagaggacagctccctgggattcccggtcggagggcctggaaccagcctcagtctcgaggccacagtcatgccctaccttcaggtgttatcagaattccgagaaggagtgcggaagattgcccgagagcaaaaagtccctgagattctgcagctcagcgatgccctgcgggacaacatcctgcccgagcttggggtgcggtttgaagaccacgaaggactgcccacagtggtgaaactggtagacagaaacaccttattaaaagagagagaagaaaagagacgggttgaagaggagaagaggaagaagaaagaggaggcggcccggaggaaacaggaacaagaagcagcaaagctggccaagatgaagattccccccagtgagatgttcttgtcagaaaccgacaaatactccaagtttgatgaaaatggtctgcccacacatgacatggagggcaaagagctcagcaaagggcaagccaagaagctgaagaagctcttcgaggctcaggagaagctctacaaggaatatctgcagatggcccagaatggaagcttccagtgagggggcacaggactgactttttaaaccattgtggactagtggctgctgtctgcctcagtgacaatgtcccagcgctcctatcatgtttacagtcacccttgggtcctaaattaagagttgtgttcatgtaggttcgtgtcgtcgttggctctgagacattgataataaatttttctcaacagtgagaccctc

SEQ ID NO: 7298 - DNA, 2685 bp, Homo sapiens
  source 1..2685: mol_type = unassigned DNA
gactactcccagcacggccactgaacgcttggccgcgcgatgctccggagcgcgggtcgccattgggttgaactacagctcccagcatgctccgggccggcgacatccggagcccctggtagttgcctagcgaccgggcgtgtcccggaagacgggcccggcgtggggcgcgacttccggggcggcggttgcatcagattctaggaagtgtctgtagccgcagctgcgggtccgggattcccagccatggcagattcctccgggcagcagggcaaaggccggcgtgtgcagccccagtggtcccctcctgctgggacccagccatgcagactccacctttacaacagcctcaccaggaacaaggaagtgttcatacctcaagatgggaaaaaggtgacgtggtattgctgtgggccaaccgtctatgacgcatctcacatggggcacgccaggtcctacatctcttttgatatcttgagaagagtgttgaaggattacttcaaatttgatgtcttttattgcatgaacattacggatattgatgacaagatcatcaagagggcccggcagaaccacctgttcgagcagtatcgggagaagaggcctgaagcggcacagctcttggaggatgttcaggccgccctgaagccattttcagtaaaattaaatgagaccacggatcccgataaaaagcagatgctcgaacggattcagcacgcagtgcagcttgccacagagccacttgagaaagctgtgcagtccagactcacgggagaggaagtcaacagctgtgtggaggtgttgctggaagaagccaaggatttgctctctgactggctggattctacacttggctgtgatgtcactgacaattccatcttctccaagctgcccaagttctgggagggggacttccacagagacatggaagctctgaatgttctccctccagatgtcttaacccgggttagtgagtatgtgccagaaattgtgaactttgtccagaagattgtggacaacggttacggctatgtctccaatgggtctgtctactttgatacagcgaagtttgcttctagcgagaagcactcctatgggaagctggtgcctgaggccgttggagatcagaaagcccttcaagaaggggaaggtgacctgagcatctctgcagaccgcctgagtgagaagcgctctcccaacgactttgccttatggaaggcctctaagcccggagaaccgtcctggccgtgcccttggggaaagggtcgtccgggctggcatatcgagtgctcggccatggcaggcaccctcctaggggcttcgatggacattcacggaggtgggttcgacctccggttcccccaccatgacaatgagctggcacagtcggaggcctactttgaaaacgactgctgggtcaggtacttcctgcacacaggccacctgaccattgcaggctgcaaaatgtcaaagtcactaaaaaacttcatcaccattaaagatgccttgaaaaagcactcagcacggcagttgcggctggccttcctcatgcactcgtggaaggacaccctggactactccagcaacaccatggagtcagcgcttcaatatgagaagttcttgaatgagtttttcttaaatgtgaaagatatccttcgcgctcctgttgacatcactggtcagtttgagaagtggggagaagaagaagcagaactgaataagaacttttatgacaagaagacagcaattcacaaagccctctgtgacaatgttgacacccgcaccgtcatggaagagatgcgggccttggtcagtcagtgcaacctctatatggcagcccggaaagccgtgaggaagaggcccaaccaggctctgctggagaacatcgccctgtacctcacccatatgctgaagatctttggggccgtagaagaggacagctccctgggattcccggtcggagggcctggaaccagcctcagtctcgaggccacagtcatgccctaccttcaggtgttatcagaattccgagaaggagtgcggaagattgcccgagagcaaaaagtccctgagattctgcagctcagcgatgccctgcgggacaacatcctgcccgagcttggggtgcggtttgaagaccacgaaggactgcccacagtggtgaaactggtagacagaaacaccttattaaaagagagagaagaaaagagacgggttgaagaggagaagaggaagaagaaagaggaggcggcccggaggaaacaggaacaagaagcagcaaagctggccaagatgaagattccccccagtgagatgttcttgtcagaaaccgacaaatactccaagtttgatgaaaatggtctgcccacacatgacatggagggcaaagagctcagcaaagggcaagccaagaagctgaagaagctcttcgaggctcaggagaagctctacaaggaatatctgcagatggcccagaatggaagcttccagtgagggggcacaggactgactttttaaaccattgtggactagtggctgctgtctgcctcagtgacaatgtcccagcgctcctatcatgtttacagtcacccttgggtcctaaattaagagttgtgttcatgtaggttcgtgtcgtcgttggctctgagacattgataataaatttttctcaacagtgagaccctc

SEQ ID NO: 7299 - DNA, 2778 bp, Homo sapiens
  source 1..2778: mol_type = unassigned DNA
agattctaggaagtgtctgtagccgcagctgcgggtccgggattcccagccatggcagattcctccgggcagcaggctcctgactacaggtccattctgagcattagtgacgaggcagccagggcacaagccctgaacgagcacctcagcacgcgtagctatgtccaggggtactcactgtcccaggcagacgtggacgcgttcaggcagctctcggccccgcccgctgacccccagctcttccacgtggctcggtggttcaggcacatagaagcgctcctgggtagcccctgtggcaaaggccagccctgcaggctccaagcaagcaaaggccggcgtgtgcagccccagtggtcccctcctgctgggacccagccatgcagactccacctttacaacagcctcaccaggaacaagtgtttcttgcatttcttgtgatcgtcattccttcattcctaacaaaggaagtgttcatacctcaagatgggaaaaaggtgacgtggtattgctgtgggccaaccgtctatgacgcatctcacatggggcacgccaggtcctacatctcttttgatatcttgagaagagtgttgaaggattacttcaaatttgatgtcttttattgcatgaacattacggatattgatgacaagatcatcaagagggcccggcagaaccacctgttcgagcagtatcgggagaagaggcctgaagcggcacagctcttggaggatgttcaggccgccctgaagccattttcagtaaaattaaatgagaccacggatcccgataaaaagcagatgctcgaacggattcagcacgcagtgcagcttgccacagagccacttgagaaagctgtgcagtccagactcacgggagaggaagtcaacagctgtgtggaggtgttgctggaagaagccaaggatttgctctctgactggctggattctacacttggctgtgatgtcactgacaattccatcttctccaagctgcccaagttctgggagggggacttccacagagacatggaagctctgaatgttctccctccagatgtcttaacccgggttagtgagtatgtgccagaaattgtgaactttgtccagaagattgtggacaacggttacggctatgtctccaatgggtctgtctactttgatacagcgaagtttgcttctagcgagaagcactcctatgggaagctggtgcctgaggccgttggagatcagaaagcccttcaagaaggggaaggtgacctgagcatctctgcagaccgcctgagtgagaagcgctctcccaacgactttgccttatggaaggcctctaagcccggagaaccgtcctggccgtgcccttggggaaagggtcgtccgggctggcatatcgagtgctcggccatggcaggcaccctcctaggggcttcgatggacattcacggaggtgggttcgacctccggttcccccaccatgacaatgagctggcacagtcggaggcctactttgaaaacgactgctgggtcaggtacttcctgcacacaggccacctgaccattgcaggctgcaaaatgtcaaagtcactaaaaaacttcatcaccattaaagatgccttgaaaaagcactcagcacggcagttgcggctggccttcctcatgcactcgtggaaggacaccctggactactccagcaacaccatggagtcagcgcttcaatatgagaagttcttgaatgagtttttcttaaatgtgaaagatatccttcgcgctcctgttgacatcactggtcagtttgagaagtggggagaagaagaagcagaactgaataagaacttttatgacaagaagacagcaattcacaaagccctctgtgacaatgttgacacccgcaccgtcatggaagagatgcgggccttggtcagtcagtgcaacctctatatggcagcccggaaagccgtgaggaagaggcccaaccaggctctgctggagaacatcgccctgtacctcacccatatgctgaagatctttggggccgtagaagaggacagctccctgggattcccggtcggagggcctggaaccagcctcagtctcgaggccacagtcatgccctaccttcaggtgttatcagaattccgagaaggagtgcggaagattgcccgagagcaaaaagtccctgagattctgcagctcagcgatgccctgcgggacaacatcctgcccgagcttggggtgcggtttgaagaccacgaaggactgcccacagtggtgaaactggtagacagaaacaccttattaaaagagagagaagaaaagagacgggttgaagaggagaagaggaagaagaaagaggaggcggcccggaggaaacaggaacaagaagcagcaaagctggccaagatgaagattccccccagtgagatgttcttgtcagaaaccgacaaatactccaagtttgatgaaaatggtctgcccacacatgacatggagggcaaagagctcagcaaagggcaagccaagaagctgaagaagctcttcgaggctcaggagaagctctacaaggaatatctgcagatggcccagaatggaagcttccagtgagggggcacaggactgactttttaaaccattgtggactagtggctgctgtctgcctcagtgacaatgtcccagcgctcctatcatgtttacagtcacccttgggtcctaaattaagagttgtgttcatgtaggttcgtgtcgtcgttggctctgagacattgataataaatttttctcaacagtg

SEQ ID NO: 7300 - DNA, 2637 bp, Homo sapiens
  source 1..2637: mol_type = unassigned DNA
ctgtagccgcagctgcgggtccgggattcccagccatggcagattcctccgggcagcaggcttttcctttgcggtcttgaaggtgcataggcttggtgcctgtccaagagcctgattatttcagaaggatgagtttcatttctgaggtttctggggtagatggagcctacctcagggcctttccgcacagacttgggataccacttggtcggctgctcatcaggcaaaggccggcgtgtgcagccccagtggtcccctcctgctgggacccagccatgcagactccacctttacaacagcctcaccaggaacaaggaagtgttcatacctcaagatgggaaaaaggtgacgtggtattgctgtgggccaaccgtctatgacgcatctcacatggggcacgccaggtcctacatctcttttgatatcttgagaagagtgttgaaggattacttcaaatttgatgtcttttattgcatgaacattacggatattgatgacaagatcatcaagagggcccggcagaaccacctgttcgagcagtatcgggagaagaggcctgaagcggcacagctcttggaggatgttcaggccgccctgaagccattttcagtaaaattaaatgagaccacggatcccgataaaaagcagatgctcgaacggattcagcacgcagtgcagcttgccacagagccacttgagaaagctgtgcagtccagactcacgggagaggaagtcaacagctgtgtggaggtgttgctggaagaagccaaggatttgctctctgactggctggattctacacttggctgtgatgtcactgacaattccatcttctccaagctgcccaagttctgggagggggacttccacagagacatggaagctctgaatgttctccctccagatgtcttaacccgggttagtgagtatgtgccagaaattgtgaactttgtccagaagattgtggacaacggttacggctatgtctccaatgggtctgtctactttgatacagcgaagtttgcttctagcgagaagcactcctatgggaagctggtgcctgaggccgttggagatcagaaagcccttcaagaaggggaaggtgacctgagcatctctgcagaccgcctgagtgagaagcgctctcccaacgactttgccttatggaaggcctctaagcccggagaaccgtcctggccgtgcccttggggaaagggtcgtccgggctggcatatcgagtgctcggccatggcaggcaccctcctaggggcttcgatggacattcacggaggtgggttcgacctccggttcccccaccatgacaatgagctggcacagtcggaggcctactttgaaaacgactgctgggtcaggtacttcctgcacacaggccacctgaccattgcaggctgcaaaatgtcaaagtcactaaaaaacttcatcaccattaaagatgccttgaaaaagcactcagcacggcagttgcggctggccttcctcatgcactcgtggaaggacaccctggactactccagcaacaccatggagtcagcgcttcaatatgagaagttcttgaatgagtttttcttaaatgtgaaagatatccttcgcgctcctgttgacatcactggtcagtttgagaagtggggagaagaagaagcagaactgaataagaacttttatgacaagaagacagcaattcacaaagccctctgtgacaatgttgacacccgcaccgtcatggaagagatgcgggccttggtcagtcagtgcaacctctatatggcagcccggaaagccgtgaggaagaggcccaaccaggctctgctggagaacatcgccctgtacctcacccatatgctgaagatctttggggccgtagaagaggacagctccctgggattcccggtcggagggcctggaaccagcctcagtctcgaggccacagtcatgccctaccttcaggtgttatcagaattccgagaaggagtgcggaagattgcccgagagcaaaaagtccctgagattctgcagctcagcgatgccctgcgggacaacatcctgcccgagcttggggtgcggtttgaagaccacgaaggactgcccacagtggtgaaactggtagacagaaacaccttattaaaagagagagaagaaaagagacgggttgaagaggagaagaggaagaagaaagaggaggcggcccggaggaaacaggaacaagaagcagcaaagctggccaagatgaagattccccccagtgagatgttcttgtcagaaaccgacaaatactccaagtttgatgaaaatgtaagcatggtctgcccacacatgacatggagggcaaagagctcagcaaagggcaagccaagaagctgaagaagctcttcgaggctcaggagaagctctacaaggaatatctgcagatggcccagaatggaagcttccagtgagggggcacaggactgactttttaaaccattgtggactagtggctgctgtctgcctcagtgacaatgtcccagcgctcctatcatgtttacagtcacccttgggtcctaaattaagagttgtgttcatgtaggttcgtgtcgtcgttggctctgagacattgataataaatttttctcaacagtg

SEQ ID NO: 7301 - DNA, 1879 bp, Homo sapiens
  source 1..1879: mol_type = unassigned DNA
agcgaccggcagcgtacccggcgtggctcccgtctccgcccagtcgtaggcgctggccgctgacatgttgaggactacgcgcggcccaggcctgggccccccgctgctccaggccgcgctgggccttgggcgggctgggtggcactggcctgcgggccgggcggcgagcggggggcgcgggcgggcctggctgcagcccacgggccgggagacgggtgtgcaggtgtacaacagcctcaccgggaggaaggaacccctaatcgtggcgcacgccgaagccgcctcctggtatagctgtggaccaactgtatatgatcatgcgcaccttggccatgcttgctcatatgttagatttgatatcattcgaaggatcctaaccaaggtttttggatgcagcatagtcatggtgatgggtattacagatgtagatgataaaatcatcaaaagagccaatgagatgaatatttcccccgcttccctcgccagtctttatgaggaagacttcaagcaggacatggcagccctgaaggttctcccacccacggtgtacctgagggtaaccgaaaatattcctcagataatttctttcattgaaggaatcattgctcgtgggaacgcttattcaacggcaaaaggcaatgtctacttcgatctgaagtctagaggagacaagtatggcaaattggtcggcgtggtccctggtccagtcggagagccagcggactctgacaagcgtcatgccagtgacttcgccctgtggaaggcggccaaaccccaggaggtgttctgggcctctccctggggacccgggaggccgggctggcacatcgagtgctctgccatcgctagtatggtatttggaagtcaactggatatccattcaggtgggatagatttagcttttccacatcatgaaaacgaaattgcacagtgcgaagtctttcatcagtgcgagcagtggggaaattattttctgcattctgggcatttgcacgccaaaggcaaagaagaaaaaatgtccaaatcattaaagaactacattactattaaggactttctgaagaccttttcccccgatgtcttccggttcttctgcctgcggagcagctaccgctcagccatcgactacagtgacagcgccatgctccaagctcagcagctgctcctggggctgggctctttcctggaggacgcacgtgcctacatgaaggggcagctggcctgcggctccgtcagggaagcgatgctgtgggagaggctctccagcaccaagagggccgtgaaggcggccttggcagatgattttgacacacccagggtggttgatgccatcctgggccttgcacaccacgggaatggacagctcagggcgtccctgaaggaacctgaagggccgagaagtcctgctgtgtttggtgccatcatctcttactttgaacagttttttgaaactgttggaatttctctggcaaatcaacagtacgtttcaggagacggcagcgaggctaccttgcatggtgtggtggacgagctggtgcggttccggcagaaggtccggcagtttgcgctggccatgcccgaggccacgggggacgcccggcggcagcagctcctagaaaggcagcccctgctggaagcatgcgacaccctgcgccggggcctgactgcccacggcatcaacatcaaggacagaagcagtacaacatccacgtgggaactgctggatcaaaggacaaaagaccaaaaatcagcgggctgaggatggagcacagccatgaacctgctcacgacaagacgcacccatgcttctcagggtcaaggctttatgttaaagcttcctgtcggggctgctaggtcagcattaaagtaaggcaaccaa

SEQ ID NO: 7302 - DNA, 1342 bp, Homo sapiens
  source 1..1342: mol_type = unassigned DNA
ggccgctgacatgttgaggactacgcgcggcccaggcctgggccccccgctgctccaggccgcgctgggccttgggcgggctgggtggcactggcctgcgggccgggcggcgagcggggggcgcgggcgggcctggctgcagcccacgggccgggagacgggtgtgcaggtgtacaacagcctcaccgggaggaaggaacccctaatcgtggcgcacgccgaagccgcctcctggtatagctgtggaccaactgtatatgatcatgcgcaccttggccatgcttgctcatatgttagatttgatatcattcgaaggatcctaaccaaggtttttggatgcagcatagtcatggtgatgggtattacagatgtagatgataaaatcatcaaaagagccaatgagatgaatatttcccccgcttccctcgccagtctttatgaggaagacttcaagcaggacatggcagccctgaaggttctcccacccacggtgtacctgagggtaaccgaaaatattcctcagataatttctttcattgaaggaatcattgctcgtgggaacgcttattcaacggcaaaaggcaatgtctacttcgatctgaagtctagaggagacaagtatggcaaattggtcggcgtggtccctggtccagtcggagagccagcggactctgacaagcgtcatgccagtgacttcgccctgtggaaggcggccaaaccccaggaggtgttctgggcctctccctggggacccgggaggccgggctggcacatcgagtgctctgccatcgctagtatggtatttggaagtcaactggatatccattcaggtgggatagatttagcttttccacatcatgaaaacgaaattgcacagtgcgaagtctttcatcagtgcgagcagtggggaaattattttctgcattctgggcatttgcacgccaaaggcaaagaagaaaaaatgtccaaatcattaaagaactacattactattaaggactttctgaagaccttttcccccgatgtcttccggttcttctgcctgcggagcagctaccgctcagccatcgactacagtgacagcgccatgctccaagctcagcagctgctcctggggctgggctctttcctggaggacgcacgtgcctacatgaaggggcagctggcctgcggctccgtcagggaagcgatgctgtgggagaggctctccagcaccaagagggccgtgaaggcggccttggcagatgattttgacacacccagggtggttgatgccatcctgggccttgcacaccacgggaatggacagctcagggcgtccctgaagaagcccgggtctgcc

SEQ ID NO: 7303 - DNA, 963 bp, Homo sapiens
  source 1..963: mol_type = unassigned DNA
gtccaaaccatgggaggctcctctcctagaccctgcatcctgaaagctgcgtacctgagagcctgcggtctggctgcagggacacacccaaggggaggagctgcaatcgtgtctggggccccagcccaggctggccggagctcctgtttcccgctgctctgctgcctgcccggggtaccaacatggcccagaagcgtcctgcctgcaccctgaagcctgagtgtgtccagcagctgctggtttgctcccaggaggccaagaagtcagcctactgcccctacagtcactttcctgtgggggctgccctgctcacccaggaggggagaatcttcaaagggtgcaacatagaaaatgcctgctacccgctgggcatctgtgctgaacggaccgctatccagaaggccgtctcagaagggtacaaggatttcagggcaattgctatcgccagtgacatgcaagatgattttatctctccatgtggggcctgcaggcaagtcatgagagagtttggcaccaactggcccgtgtacatgaccaagccggatggtacgtatattgtcatgacggtccaggagctgctgccctcctcctttgggcctgaggacctgcagaagacccagtgacagccagagaatgcccactgcctgtaacagccacctggagaacttcataaagatgtctcacagccctggggacacctgcccagtgggccccagccctacagggactgggcaaagatgatgtttccagattacactccagcctgagtcagcacccctcctagcaacctgccttgggacttagaacaccgccgccccctgccccacctttcctttccttcctgtgggccctctttcaaagtccagcctagtctggactgcttccccatcagccttcccaaggttctatcctgttccgagcaacttttctaattataaacatcacagaacatcctggatcaaa

SEQ ID NO: 7304 - DNA, 2930 bp, Homo sapiens
  source 1..2930: mol_type = unassigned DNA
gacagggccgcggacgcccgggcagccacggcggcggggccgcggcgggcgccggctcagcccgcccctttctcccgccgcctccccgccccgccccgcgccgcgccggccgctgtcagctccctcagcgtccggccgaggcgcggtgtatgctgagccgctgccgcagcgggctgctccacgtcctgggccttagcttcctgctgcagacccgccggccgattctcctctgctctccacgtctcatgaagccgctggtcgtgttcgtcctcggcggccccggcgccggcaaggggacccagtgcgcccgcatcgtcgagaaatatggctacacacacctttctgcaggagagctgcttcgtgatgaaaggaagaacccagattcacagtatggtgaacttattgaaaagtacattaaagaaggaaagattgtaccagttgagataaccatcagtttattaaagagggaaatggatcagacaatggctgccaatgctcagaagaataaattcttgattgatgggtttccaagaaatcaagacaaccttcaaggatggaacaagaccatggatgggaaggcagatgtatctttcgttctcttttttgactgtaataatgagatttgtattgaacgatgtcttgagaggggaaagagtagtggtaggagtgatgacaacagagagagcttggaaaagagaattcagacctaccttcagtcaacaaagccaattattgacttatatgaagaaatggggaaagtcaagaaaatagatgcttctaaatctgttgatgaagtttttgatgaagttgtgcagatttttgacaaggaaggctaattctaaacctgaaggcatccttgaaatcatgcttgaatattgctttgatagctgctatcatgacccctttttaaggcaattctaatctttcataactacatctcaattagtggctggaaagtacatggtaaaacaaagtaaatttttttatgttcttttttttggtcacaggagtagacagtgaattcaggtttaacttcaccttagttatggtgctcaccaaacgaagggtatcagctattttttttaaaattcaaaaagaatatcccttttatagtttgtgccttctgtgagcaaaactttttagtacgcgtatatatccctctagtaatcacaacattttaggatttagggatacccgcttcctctttttcttgcaagttttaaatttccaaccttaagtgaatttgtggaccaaatttcaaaggaactttttgtgtagtcagttcttgcacaatgtgtttggtaaacaaactcaaaatggattcttaggagcattttagtgtttattaaataactgaccatttgctgtagaaagatgagaaaacttaagctttgttttactacaacttgtacaaagttgtatgacagggcatattctttgcttccaagatttgggttgggggcactaggggttcagagcctggcagaattgtcagctttagtctgacataatctaagggtatggggcaaggatcacatctaatgcttgtgttccttatactctattatatagtgttattcatgattcagctgatcttaacaaaattcgtagcagtggaaccttgaaatgcatgtggctagatttatgctaaaatgattctcagttagcattttagtaacacttcaaaggtttttttttgtttgttttctagacttaataaaagcttaggattaattagaagaagcaatctagttaaatttcccatttgtattttattttcttgaatacttttttcatagttatttgtttaaaaagatttaaaaatcattgcactttggtcagaaaaataataaatatatcttataaatgtttgattcccttccttgctatttttattcagtagatttttgtttggcatcatgttgaagcaccgaaagataaatgatttttaaaaggctatagagtccaaaggaatattcttttacaccaattcttcctttaaaaatctctgaggaatttgttttcgccttacttttttttcttctgtcacaatgctaagtggtatccgaggttcttaatatgagatttaaaatcttaaaatgtttcttattttcagcacttacatcatttggtacacagggtcaaatagggcaaataattttgtctttgtataatagatttgatatttaaagtcactggaaataggacaagttaatggatgtttttatattttaatagaatcatttatttctatgtgttatgaaattcacttaatgataaatttttcaacatacttgccattagaaaacaaagtattgctaagtactataacatattggccactaaaattcatattgagattatcttggtttcttggaagagataggaatgagttcttatctagtgttgcaggccagcaaatacagaggtggtttaatcaaacagctctagtatgaagcaagagtaaagactaaggtttcgagagcattcctactcacataagtgaagaaatctgtcagataggaatctaaatatttatagtgagattgtgaaagcaaccttaaagttttgaagaagactgatgagactaggtgctttgcttcctttcatcaggtatctttctgtggcatttgagaacagaaaccaagaaacatggtaattactaaattatgaggctttgctttttgtttgcttttaagtagaaaaacatgttggcaacattgagttttggagttgattgagataatatgacttaactagttttgtcattccatttgttaaagatacagtcaccaagaatgttttgagttttttgaaagaccccaatttaagccttgcttatttttaaattatttccattcagtgatgttggatgtatatcagttatttagtaaataatctcaataaattttgtgctgtggcctttgcta

SEQ ID NO: 7305 - DNA, 950 bp, Homo sapiens
  source 1..950: mol_type = unassigned DNA
agctccctcagcgtccggccgaggcgcggtgtatgctgagccgctgccgcagcgggctgctccacgtcctgggccttagcttcctgctgcagacccgccggccgattctcctctgctctccacgtctcatgaagccgctggtcgtgttcgtcctcggcggccccggcgccggcaaggggacccagtgcgcccgcatcgtcgaggaaatggatcagacaatggctgccaatgctcagaagaataaattcttgattgatgggtttccaagaaatcaagacaaccttcaaggatggaacaagaccatggatgggaaggcagatgtatctttcgttctcttttttgactgtaataatgagatttgtattgaacgatgtcttgagaggggaaagagtagtggtaggagtgatgacaacagagagagcttggaaaagagaattcagacctaccttcagtcaacaaagccaattattgacttatatgaagaaatggggaaagtcaagaaaatagatgcttctaaatctgttgatgaagtttttgatgaagttgtgcagatttttgacaaggaaggctaattctaaacctgaaggcatccttgaaatcatgcttgaatattgctttgatagctgctatcatgacccctttttaaggcaattctaatctttcataactacatctcaattagtggctggaaagtacatggtaaaacaaagtaaatttttttatgttcttttttttggtcacaggagtagacagtgaattcaggtttaacttcaccttagttatggtgctcaccaaacgaagggtatcagctattttttttaaaattcaaaaagaatatcccttttatagtttgtgccttctgtgagcaaaactttttagtacgcgtatatatccctctagtaatcacaacattttaggatttagggatacccgcttcctctttttcttgc

SEQ ID NO: 7306 - DNA, 2042 bp, Homo sapiens
  source 1..2042: mol_type = unassigned DNA
cgtcgctgaggcgcccatggccttcgcccgccggctcctgcgcgggccactgtcggggccgctgctcgggcggcgcggggtctgcgctggggccatggctccgccgcgccgcttcgtcctggagcttcccgactgcaccctggctcacttcgccctaggcgccgacgcccccggcgacgcagacgcccccgacccccgcctggcggcgctgctggggcccccggagcgcagctactcgctgtgcgtgcccgtgaccccggacgccggctgcggggcccgggtccgggcggcgcggctgcaccagcgcctgctgcaccagctgcgccgcggccccttccagcggtgccagctgctcaggctgctctgctactgcccgggcggccaggccggcggcgcacagcaaggcttcctgctgcgcgaccccctggatgaccctgacacccggcaagcgctgctcgagctgctgggcgcctgtcaggaggcaccacgcccgcacttgggcgagttcgaggccgacccgcgcggccagctgtggcagcgcctctgggaggtgcaagacggcaggcggctgcaggtgggctgcgcacaggtcgtgcccgtcccggagcccccgctgcacccggtggtgccagacttgcccagttccgtggtcttcccggaccgggaagccgcccgggccgttttggaggagtgtacctcctttattcctgaagcccgggcagtgcttgacctggtcgaccagtgcccaaaacagatccagaaaggaaagttccaggttgttgccatcgaaggactggatgccacgggtaaaaccacggtgacccagtcagtggcagattcacttaaggctgtcctcttaaagtcaccaccctcttgcattggccagtggaggaagatctttgatgatgaaccaactatcattagaagagctttttactctttgggcaattatattgtggcctccgaaatagctaaagaatctgccaaatctcctgtgattgtagacaggtactggcacagcacggccacctatgccatagccactgaggtgagtgggggtctccagcacctgcccccagcccatcaccctgtgtaccagtggccagaggacctgctcaaacctgaccttatcctgctgctcactgtgagtcctgaggagaggttgcagaggctgcagggccggggcatggagaagaccagggaagaagcagaacttgaggccaacagtgtgtttcgtcaaaagtaggtgtcccagtgcaatgcaatgtgagcggcaggcattcctgaagggagatgaaccactggcactggctttaggattgtgaggaagtgatattgtttccagttttcaaacacaagagacaacatcctctaagttacttcagccccttccaatgggcttgtcaccacagggctgcagcattgttatcttaaagcaaaggtcatcggactagggatcagaccctgccactgatcctggctgtgctaggagcagctgcacctgggtaagacagtaagtgtctctgtgcctcagtttccccagtcatagtataatcacacagagcactagataacgagctcatagtaacatctacctattagatgcttcccgtgtgtcaggcattttactgatgttatgtcatccttgtgaggaaaacattagccgtattttacagtttacaactttaaggctcaaaggattaagtgatttgtctaaatgtacataactattcactagtaaaaccgggattaaaatctttctgattttgcagccagtgtttttgttttaattagaaagttataaacacgactgcagaagagagtctggccaggcctcctgcctcatgactgagtatgaatcagttctacaccactgcctttaaaaactgaagcagaaatattttctctaactgaacaatgatagccctgttatcataacatagtaatgttataaataatggtagctgctgtgggtaaagatattatgttaagcaatttacttgtattaattccattaaacttcagtgaacatttgcaaggaa

SEQ ID NO: 7307 - DNA, 2884 bp, Homo sapiens
  source 1..2884: mol_type = unassigned DNA
atggccttcgcccgccggctcctgcgcgggccactgtcggggccgctgctcgggcggcgcggggtctgcgctggggccatggctccgccgcgccgcttcgtcctggagcttcccgactgcaccctggctcacttcgccctaggcgccgacgcccccggcgacgcagacgcccccgacccccgcctggcggcgctgctggggcccccggagcgcagctactcgctgtgcgtgcccgtgaccccggacgccggctgcggggcccgggtccgggcggcgcggctgcaccagcgcctgctgcaccagctgcgccgcggccccttccagcggtgccagctgctcaggctgctctgctactgcccgggcggccaggccggcggcgcacagcaaggcttcctgctgcgcgaccccctggatgaccctgacacccggcaagcgctgctcgagctgctgggcgcctgtcaggaggcaccacgcccgcacttgggcgagttcgaggccgacccgcgcggccagctgtggcagcgcctctgggaggtgcaagacggcaggcggctgcaggtgggctgcgcacaggtcgtgcccgtcccggagcccccgctgcacccggtggtgccagacttgcccagttccgtggtcttcccggaccgggaagccgcccgggccgttttggaggagtgtacctcctttattcctgaagcccgggcagtgcttgacctggtcgaccagtgcccaaaacagatccagaaaggaaagttccaggttgttgccatcgaaggactggatgccacgggtaaaaccacggtgacccagtcagtggcagattcacttaaggctgtcctcttaaagtcaccaccctcttgcattggccagtggaggaagatctttgatgatgaaccaactatcattagaagagctttttactctttgggcaattatattgtggcctccgaaatagctaaagaatctgccaaatctcctgtgattgtagacaggtactggcacagcacggccacctatgccatagccactgaggtgagtgggggtctccagcacctgcccccagcccatcaccctgtgtaccagtggccagaggacctgctcaaacctgaccttatcctgctgctcactgtgagtcctgaggagaggttgcagaggctgcagggccggggcatggagaagaccagggaagaagcagaacttgaggccaacagtgtgtttcgtcaaaaggtagaaatgtcctaccagcggatggagaatcctggctgccatgtggttgatgccagcccctccagagaaaaggtcctgcagacggtattaagcctaatccagaatagttttagtgaaccgtagttactctggccaggtgccacgtctaactagattagatgttgtttgaaacatctacatccaccatttgttatgcagtgttcccaaatttctgttctacaagcatgttgtgtggcagaaaactggagaccaggcatcttaattttacttcagccatcgtaccctcttctgactgatggacccgtcatcacaaaggtccctctcatcatgttccagtgagaggccagcgattgctttcttcctggcatagtaaacattttcttggaacatatgtttcacttaatcactaccaaatatctggaagacctgtcttactcagacagcaccaggtgtacagaagcagcagacaagatcttccagatcagcagggagaccccggagcctctgcttctcctacactggcatgctgatgagatcgtgacatgcccacattggcttcttccacatctggttgcactcgtcatgatgggctcgctgcatctccctcagtcccaaattctagagccaagtgttcctgcagaggctgtctatgtgtcctggctgcccaaggacactcctgcagagccatttttgggtaaggaacacttacaaagaaggcattgatcttgtgtctgaggctcagagcccttttgataggcttctgagtcatatataaagacattcaagccaagatgctccaactgcaaatataccaaccttctctgaattatattttgcttatttatatttcttttctttttttctaaagtatggctctgaatagaatgcacattttccattgaactggatgcatttcatttagccaatccagtaatttatttatattaatctatacataatatgtttcctcagcataggagctatgattcattaattaaaagtggagtcaaaacgctaaatgcaatgtttgttgtgtattttcattacacaaacttaatttgtcttgttaaataagtacagtggatcttggagtgggatttcttggtaaattatcttgcacttgaatgtctcatgattacatatgaaatcgctttgacatatctttagacagaaaaaagtagctgagtgagggggaaattatagagctgtgtgactttagggagtaggttgaaccaggtgattacctaaaattccttccagttcaaaggcagataaatctgtaaattattttatcctatctaccatttcttaagaagacattactccaaaataattaaatttaaggctttatcaggtctgcatatagaatcttaaattctaataaagtttcatgttaatgtcataggatttttaaaagagctataggtaatttctatataatatgtgtatattaaaatgtaattgatttcagttgaaagtattttaaagctgataaatagcattagggttctttgcaatgtggtatctagctgtattattggttttatttactttaaacattttgaaaagcttatactggcagcctagaaaaacaaacaattaatgtatctttatgtccctggcacatgaataaactttgctgtggtttactaatcta

SEQ ID NO: 7308 - DNA, 1210 bp, Homo sapiens
  source 1..1210: mol_type = unassigned DNA
gtttcccgctggcgcctggctccctccgggtttcgtttcccgccggcgcctggctcccgccaggtttcgtttccgaggcggggccgagggcggcgtcgctgaggcgcccatggccttcgcccgccggctcctgcgcgggccactgtcggggccgctgctcgggcggcgcggggtctgcgctggggccatggctccgccgcgccgcttcgtcctggagcttcccgactgcaccctggctcacttcgccctaggcgccgacgcccccggcgacgcagacgcccccgacccccgcctggcggcgctgctggggcccccggagcgcagctactcgctgtgcgtgcccgtgaccccggacgccggctgcggggcccgggtccgggcggcgcggctgcaccagcgcctgctgcaccagctgcgccgcggccccttccagcggtgccagctgctcaggctgctctgctactgcccgggcggccaggccggcggcgcacagcaaggcttcctgctgcgcgaccccctggatgaccctgacacccggcaagcgctgctcgagctgctgggcgcctgtcaggaggcaccacgcccgcacttgggcgagttcgaggccgacccgcgcggccagctgtggcagcgcctctgggaggtgcaagacggcaggcggctgcaggtgggctgcgcacaggtcgtgcccgtcccggagcccccgctgcacccggtggtgccagacttgcccagttccgtggtcttcccggaccgggaagccgcccgggccgttttggaggagtgtacctcctttattcctgaagcccgggcagtgcttgacctggtcgaccagtgcccaaaacagatccagaaaggaaagttccaggttgttgccatcgaaggactggatgccacgggtaaaaccacggtgacccagtcagtggcagattcacttaaggctgtcctcttaaagtcaccaccctcttgcattggccagtggaggaagatctttgatgatgaaccaactatcattagaagagctttttactctttgggcaattatattgtggcctccgaaatagctaaagaatctgccaaatctcctgtgattgtagacaggtcccagctgggaggaaccttataccatccttctctccacctgctcggcagtgaagtttgtgggactggaatcttggattcatcacactcgagtcaaggcctggaatga

SEQ ID NO: 7309 - DNA, 1787 bp, Homo sapiens
  source 1..1787: mol_type = unassigned DNA
gggggagggggcggggcgagggacggccgcgcgcgccagctgccaggcggggatcgggcggcgccgagctgaggtggtgagggactagctcccggatgtggagaagctggggagaaggcgtgggaggaagatggactcggtggagaagggggccgccacctccgtctccaacccgcgggggcgaccgtcccggggccggccgccgaagctgcagcgcaactctcgcggcggccagggccgaggtgtggagaagcccccgcacctggcagccctaattctggcccggggaggcagcaaaggcatccccctgaagaacattaagcacctggcgggggtcccgctcattggctgggtcctgcgtgcggccctggattcaggggccttccagagtgtatgggtttcgacagaccatgatgaaattgagaatgtggccaaacaatttggtgcacaagttcatcgaagaagttctgaagtttcaaaagacagctctacctcactagatgccatcatagaatttcttaattatcataatgaggttgacattgtaggaaatattcaagctacttctccatgtttacatcctactgatcttcaaaaagttgcagaaatgattcgagaagaaggatatgattctgttttctctgttgtgagacgccatcagtttcgatggagtgaaattcagaaaggagttcgtgaagtgaccgaacctctgaatttaaatccagctaaacggcctcgtcgacaagactgggatggagaattatatgaaaatggctcattttattttgctaaaagacatttgatagagatgggttacttgcagggtggaaaaatggcatactacgaaatgcgagctgaacatagtgtggatatagatgtggatattgattggcctattgcagagcaaagagtattaagatatggctattttggcaaagagaagcttaaggaaataaaacttttggtttgcaatattgatggatgtctcaccaatggccacatttatgtatcaggagaccaaaaagaaataatatcttatgatgtaaaagatgctattgggataagtttattaaagaaaagtggtattgaggtgaggctaatctcagaaagggcctgttcaaagcagacgctgtcttctttaaaactggattgcaaaatggaagtcagtgtatcagacaagctagcagttgtagatgaatggagaaaagaaatgggcctgtgctggaaagaagtggcatatcttggaaatgaagtgtctgatgaagagtgcttgaagagagtgggcctaagtggcgctcctgctgatgcctgttctactgcccagaaggctgttggatacatttgcaaatgtaatggtggccgtggtgccatccgagaatttgcagagcacatttgcctactaatggaaaaggttaataattcatgccaaaaatagaaattagcgtaatattgagaaaaaaatgatacagccttcttcagccagtttgcttttatttttgattaagtaaattccatgttgtaatgttacagagagtgtgatttggtttgtgatatatatatattgtgctctacttttctctttacgcaagataattatttagagactgattacagtctttctcagatttttagtaaatgcaagtaagaacatcatcaaagttcactttgtattgtaccctgtaaaactgtgtgtttgtgtgctttcaaagatgttgggattttatttatctggggacagtgtgtatggtaagacatgcccttctattaataaaactacatttctcaaa

SEQ ID NO: 7310 - DNA, 687 bp, Homo sapiens
  source 1..687: mol_type = unassigned DNA
cgcgcctagcagtgtcccagccgggttcgtgtcgccatggggcagatcgagtgggccatgtgggccaacgaacaggcgctggcgtccggcctgatcctcatcaccgggggcatcgtggccacagctgggcgcttcacccagtggtactttggtgcctactccattgtggcgggcgtgtttgtgtgcctgctggagtacccccgggggaagaggaagaagggctccaccatggagcgctggggacagaagtacatgaccgccgtggtgaagctgttcgggccctttaccaggaattactatgttcgggccgtcctgcatctcctgctctcggtgcccgccggcttcctgctggccaccatccttgggaccgcctgcctggccattgcgagcggcatctacctactggcggctgtgcgtggcgagcagtggacgcccatcgagcccaagccccgggagcggccgcagatcggaggcaccatcaagcagccgcccagcaaccccccgccgcggcccccggccgaggcccgcaagaagcccagcgaggaggaggctgcggtggcggcggggggacccccgggaggtccccaggtcaaccccatcccggtgaccgacgaggtcgtgtgacctcgccccggacctgccctcccgccaggtgcacccacctgcaataaatgcagcgaagccggg

SEQ ID NO: 7311 - DNA, 4324 bp, Homo sapiens
  source 1..4324: mol_type = unassigned DNA
ttcctcattggaagaagaagcatagtatagaagaaaggcaaacacaacacattcaacctctgccaccatggggaactgggctgtgaatgaggggctctccatttttgtcattctggtttggctggggttgaacgtcttcctctttgtctggtattaccgggtttatgatattccacctaagttcttttacacaagaaaacttcttgggtcagcactggcactggccagggcccctgcagcctgcctgaatttcaactgcatgctgattctcttgccagtctgtcgaaatctgctgtccttcctcaggggttccagtgcgtgctgctcaacaagagttcgaagacaactggacaggaatctcacctttcataaaatggtggcatggatgattgcacttcactctgcgattcacaccattgcacatctatttaatgtggaatggtgtgtgaatgcccgagtcaataattctgatccttattcagtagcactctctgaacttggagacaggcaaaatgaaagttatctcaattttgctcgaaagagaataaagaaccctgaaggaggcctgtacctggctgtgaccctgttggcaggcatcactggagttgtcatcacgctgtgcctcatattaattatcacttcctccaccaaaaccatccggaggtcttactttgaagtcttttggtacacacatcatctctttgtgatcttcttcattggccttgccatccatggagctgaacgaattgtacgtgggcagaccgcagagagtttggctgtgcataatataacagtttgtgaacaaaaaatctcagaatggggaaaaataaaggaatgcccaatccctcagtttgctggaaaccctcctatgacttggaaatggatagtgggtcccatgtttctgtatctctgtgagaggttggtgcggttttggcgatctcaacagaaggtggtcatcaccaaggtggtcactcaccctttcaaaaccatcgagctacagatgaagaagaaggggttcaaaatggaagtgggacaatacatttttgtcaagtgcccaaaggtgtccaagctggagtggcacccttttacactgacatccgcccctgaggaagacttctttagtatccatatccgcatcgttggggactggacagaggggctgttcaatgcttgtggctgtgataagcaggagtttcaagatgcgtggaaactacctaagatagcggttgatgggccctttggcactgccagtgaagatgtgttcagctatgaggtggtgatgttagtgggagcagggattggggtcacacccttcgcatccattctcaagtcagtctggtacaaatattgcaataacgccaccaatctgaagctcaaaaagatctacttctactggctgtgccgggacacacatgcctttgagtggtttgcagatctgctgcaactgctggagagccagatgcaggaaaggaacaatgccggcttcctcagctacaacatctacctcactggctgggatgagtctcaggccaatcactttgctgtgcaccatgatgaggagaaagatgtgatcacaggcctgaaacaaaagactttgtatggacggcccaactgggataatgaattcaagacaattgcaagtcaacaccctaataccagaataggagttttcctctgtggacctgaagccttggctgaaaccctgagtaaacaaagcatctccaactctgagtctggccctcggggagtgcatttcattttcaacaaggaaaacttctaacttgtctcttccatgaggaaataaatgtgggttgtgctgccaaatgctcaaataatgctaattgataatataaataccccctgcttaaaaatggacaaaaagaaactataatgtaatggttttcccttaaaggaatgtcaaagattgtttgatagtgataagttacatttatgtggagctctatggttttgagagcacttttacaaacattatttcatttttttcctctcagtaatgtcagtggaagttagggaaaagattcttggactcaattttagaatcaaaagggaaaggatcaaaaggttcagtaacttccctaagattatgaaactgtgaccagatctagcccatcttactccaggtttgatactctttccacaatactgagctgcctcagaatcctcaaaatcagtttttatattccccaaaagaagaaggaaaccaaggagtagctatatatttctactttgtgtcatttttgccatcattattatcatactgaaggaaattttccagatcattaggacataatacatgttgagagtgtctcaacacttattagtgacagtattgacatctgagcatactccagtttactaatacagcagggtaactgggccagatgttctttctacagaagaatattggattgattggagttaatgtaatactcatcatttaccactgtgcttggcagagagcggatactcaagtaagttttgttaaatgaatgaatgaatttagaaccacacaatgccaagatagaattaatttaaagccttaaacaaaatttatctaaagaaataacttctattactgtcatagaccaaaggaatctgattctccctagggtcaagaacaggctaaggatactaaccaataggattgcctgaagggttctgcacattcttatttgaagcatgaaaaaagagggttggaggtggagaattaacctcctgccatgactctggctcatctagtcctgctccttgtgctataaaataaatgcagactaatttcctgcccaaagtggtcttctccagctagcccttatgaatattgaacttaggaattgtgacaaatatgtatctgatatggtcatttgttttaaataacacccaccccttattttccgtaaatacacacacaaaatggatcgcatctgtgtgactaatggtttatttgtattatatcatcatcatcatcctaaaattaacaacccagaaacaaaaatctctatacagagatcaaattcacactcaatagtatgttctgaatatatgttcaagagagagtctctaaatcactgttagtgtggccaagagcagggttttctttttgttcttagaactgctcccatttctgggaactaaaaccagttttatttgccccaccccttggagccacaaatgtttagaactcttcaacttcggtaatgaggaagaaggagaaagagctgggggaagggcagaagactggtttaggaggaaaaggaaataaggagaaaagagaatgggagagtgagagaaaataaaaaaggcaaaagggagagagaggggaagggggtctcatattggtcattccctgccccagatttcttaaagtttgatatgtatagaatataattgaaggaggtatacacatattgatgttgttttgattatctatggtattgaatcttttaaaatctggtcacaaattttgatgctgagggggattattcaagggactaggatgaactaaataagaactcagttgttctttgtcatactactattcctttcgtctcccagaatcctcagggcactgagggtaggtctgacaaataaggcctgctgtgcgaatatagcctttctgaaatgtaccaggatggtttctgcttagagacacttaggtccagcctgttcacactgcacctcaggtatcaattcatctattcaacagatatttattgtgttattactatgagtcaggctctgtttattgtttcaattctttacaccaaagtatgaactggagagggtacctcagttataaggagtctgagaatattggccctttctaacctatgtgcataattaaaaccagcttcatttgttgctccgagagtgtttctccaaggttttctatcttcaaaaccaactaagttatgaaagtagagagatctgccctgtgttatccagttatgagataaaaaatgaatataagagtgcttgtcattataaaagtttccttttttattctctcaagccaccagctgccagccaccagcagccagctgccagcctagctttttttttttttttttttttttagcacttagtatttagcatttattaacaggtactctaagaatgatgaagcattgtttttaatcttaagactatgaaggtttttcttagttcttctgcttttgcaattgtgtttgtgaaatttgaatacttgcaggctttgtatgtgaataattctagcgggggacctgggagataattcctacggggaattcttaaaactgtgctcaactattaaaatgaatgagctttc

SEQ ID NO: 7312 - DNA, 1608 bp, Homo sapiens
  source 1..1608: mol_type = unassigned DNA
caacctctgccaccatggggaactgggctgtgaatgaggggctctccatttttgtcattctggtttggctggggttgaacgtcttcctctttgtctggtattaccgggtttatgatattccacctaagttcttttacacaagaaaacttcttgggtcagcactggcactggccagggcccctgcagcctgcctgaatttcaactgcatgctgattctcttgccagtctgtcgaaatctgctgtccttcctcaggggttccagtgcgtgctgctcaacaagagttcgaagacaactggacaggaatctcacctttcataaaatggtggcatggatgattgcacttcactctgacgaattgtacgtgggcagaccgcagagagtttggctgtgcataatataacagtttgtgaacaaaaaatctcagaatggggaaaaataaaggaatgcccaatccctcagtttgctggaaaccctcctatgacttggaaatggatagtgggtcccatgtttctgtatctctgtgagaggttggtgcggttttggcgatctcaacagaaggtggtcatcaccaaggtggtcactcaccctttcaaaaccatcgagctacagatgaagaagaaggggttcaaaatggaagtgggacaatacatttttgtcaagtgcccaaaggtgtccaagctggagtggcacccttttacactgacatccgcccctgaggaagacttctttagtatccatatccgcatcgttggggactggacagaggggctgttcaatgcttgtggctgtgataagcaggagtttcaagatgcgtggaaactacctaagatagcggttgatgggccctttggcactgccagtgaagatgtgttcagctatgaggtggtgatgttagtgggagcagggattggggtcacacccttcgcatccattctcaagtcagtctggtacaaatattgcaataacgccaccaatctgaagctcaaaaagatctacttctactggctgtgccgggacacacatgcctttgagtggtttgcagatctgctgcaactgctggagagccagatgcaggaaaggaacaatgccggcttcctcagctacaacatctacctcactggctgggatgagtctcaggccaatcactttgctgtgcaccatgatgaggagaaagatgtgatcacaggcctgaaacaaaagactttgtatggacggcccaactgggataatgaattcaagacaattgcaagtcaacaccctaataccagaataggagttttcctctgtggacctgaagccttggctgaaaccctgagtaaacaaagcatctccaactctgagtctggccctcggggagtgcatttcattttcaacaaggaaaacttctaacttgtctcttccatgaggaaataaatgtgggttgtgctgccaaatgctcaaataatgctaattgataatataaataccccctgcttaaaaatggacaaaaagaaactataatgtaatggttttcccttaaaggaatgtcaaagattgtttgatagtgataagttacatttatgtggagctctatggttttgagagcacttttacaaacattatttcat

SEQ ID NO: 7313 - DNA, 1822 bp, Homo sapiens
  source 1..1822: mol_type = unassigned DNA
acattcaacctctgccaccatggggaactgggctgtgaatgaggggctctccatttttgtcatttcagcactggcactggccagggcccctgcagcctgcctgaatttcaactgcatgctgattctcttgccagtctgtcgaaatctgctgtccttcctcaggggttccagtgcgtgctgctcaacaagagttcgaagacaactggacaggaatctcacctttcataaaatggtggcatggatgattgcacttcactctgcgattcacaccattgcacatctatttaatgtggaatggtgtgtgaatgcccgagtcaataattctgatccttattcagtagcactctctgaacttggagacaggcaaaatgaaagttatctcaattttgctcgaaagagaataaagaaccctgaaggaggcctgtacctggctgtgaccctgttggcaggcatcactggagttgtcatcacgctgtgcctcatattaattatcacttcctccaccaaaaccatccggaggtcttactttgaagtcttttggtacacacatcatctctttgtgatcttcttcattggccttgccatccatggagctgaacgaattgtacgtgggcagaccgcagagagtttggctgtgcataatataacagtttgtgaacaaaaaatctcagaatggggaaaaataaaggaatgcccaatccctcagtttgctggaaaccctcctatgacttggaaatggatagtgggtcccatgtttctgtatctctgtgagaggttggtgcggttttggcgatctcaacagaaggtggtcatcaccaaggtggtcactcaccctttcaaaaccatcgagctacagatgaagaagaaggggttcaaaatggaagtgggacaatacatttttgtcaagtgcccaaaggtgtccaagctggagtggcacccttttacactgacatccgcccctgaggaagacttctttagtatccatatccgcatcgttggggactggacagaggggctgttcaatgcttgtggctgtgataagcaggagtttcaagatgcgtggaaactacctaagatagcggttgatgggccctttggcactgccagtgaagatgtgttcagctatgaggtggtgatgttagtgggagcagggattggggtcacacccttcgcatccattctcaagtcagtctggtacaaatattgcaataacgccaccaatctgaagctcaaaaagatctacttctactggctgtgccgggacacacatgcctttgagtggtttgcagatctgctgcaactgctggagagccagatgcaggaaaggaacaatgccggcttcctcagctacaacatctacctcactggctgggatgagtctcaggccaatcactttgctgtgcaccatgatgaggagaaagatgtgatcacaggcctgaaacaaaagactttgtatggacggcccaactgggataatgaattcaagacaattgcaagtcaacaccctaataccagaataggagttttcctctgtggacctgaagccttggctgaaaccctgagtaaacaaagcatctccaactctgagtctggccctcggggagtgcatttcattttcaacaaggaaaacttctaacttgtctcttccatgaggaaataaatgtgggttgtgctgccaaatgctcaaataatgctaattgataatataaataccccctgcttaaaaatggacaaaaagaaactataatgtaatggttttcccttaaaggaatgtcaaagattgtttgatagtgataagttacatttatgtggagctctatgg

SEQ ID NO: 7314 - DNA, 860 bp, Homo sapiens
  source 1..860: mol_type = unassigned DNA
gactccagtgacccggcgggaggagaggcaactttccctgtcgggcttgagttgggagaggagcagggcggccttgtagggacccgtccctgctcctgaccatcaccgtcactggggtcactgtgctcgtgttggtcctgaagagcatgaactccaggaggagagagccaatcaccttacaggaccctgaagccaagtacccgctgcccttgattgagaaagagaaaatcagccacaacacccggaggttccgctttggactgccttcgccggaccatgtcttagggcttcctgtaggtaactatgtccagctcttggcaaaaatcgataatgaattggtggtcagggcttacacccctgtctccagtgatgatgacagaggctttgtggacctaattataaagatctacttcaaaaatgtacacccccaatatcctgaaggtgggaagatgactcagtatttggagaacatgaaaatcggggagaccatcttttttcgagggccaaggggacgcttgttttaccatgggccagggaatcttggaatcagaccagaccagacgagtgagcctaaaaaaacactggccgatcacctgggaatgattgctgggggcacaggcatcacacccatgttgcagctcattcgccacatcaccaaggaccccagtgacaggaccaggatgtccctcatctttgccaaccagacagaggaggatatcttggtcagaaaagagcttgaagaaattgccaggactcacccagaccagttcaacctgtggtacaccctggacaggcctcccattggtccctggtcggcagagggcgctaccctactgagcaattctgcgcagttccactaa

SEQ ID NO: 7315 - DNA, 1254 bp, Homo sapiens
  source 1..1254: mol_type = unassigned DNA
tgagactccagtgacccggcgggaggagaggcaactttccctgtcgggcttgagttgggagaggagcagggcggccttgtagggacccgtccctgctcctgaccatcaccgtcactggggtcactgtgctcgtgttggtcctgaagagcatgaactccaggaggagagagccaatcaccttacaggaccctgaagccaagtacccgctgcccttgattgagaaagagaaaatcagccacaacacccggaggttccgctttggactgccttcgccggaccatgtcttagggcttcctgtaggtaactatgtccagctcttggcaaaaatcgataatgaattggtggtcagggcttacacccctgtctccagtgatgatgacagaggctttgtggacctaattataaagatctacttcaaaaatgtacacccccaatatcctgaaggtgggaagatgactcagtatttggagaacatgaaaatcggggagaccatcttttttcgagggccaaggggacgcttgttttaccatgggccagggaatcttggaatcagaccagaccagacgagtgagcctaaaaaaacactggccgatcacctgggaatgattgctgggggcacaggcatcacacccatgttgcagctcattcgccacatcaccaaggaccccagtgacaggaccaggatgtccctcatctttgccaaccagacagaggaggatatcttggtcagaaaagagcttgaagaaattgccaggactcacccagaccagttcaacctgtggtacaccctggacaggcctcccattggctggaagtacagctcaggcttcgttactgccgacatgatcaaggagcaccttcctcctccagcgaagtccacgctcatcctggtgtgtggcccgccaccactaatccagacggcggctcaccctaacctggagaagctgggttatacccaggacatgattttcacctactaacacctccacgtgctcagcaattttgcatgtcccttttcatctgtttcagagtaagttcaatttcaccacggtaaactgggatgttttcaaaagtgccttgccatgtaccttcgcgcacacactggttctcctcttttgggtgtgggcctaacaaaaagggctcaaggggctggagactggctgctggggcctccttgcttggaggctggaaagagctccatttcagtatctttctccgtggttttgtgaaataaactcaagtacaaagcagaca

SEQ ID NO: 7316 - DNA, 579 bp, Homo sapiens
  source 1..579: mol_type = unassigned DNA
gagcggcccccggccaaccccagttcgacgacgtgttgggcgtctcactccgggtgggttccgcggcggggtgtatttatggagtattgaagaaatatctccgtcgggacggccggaaggaaagaggccagaggcgcggaggccggctagagccgggaacgaacgacccgtccctgctcctgaccatcaccgtcactggggtcactgtgctcgtgttggtcctgaagagcatgaactccaggaggagagagccaatcaccttacaggaccctgaagccaagtacccgctgcccttgattgagaaagagaaaatcagccacaacacccggaggttccgctttggactgccttcgccggaccatgtcttagggcttcctgtaggtaactatgtccagctcttggcaaaaatcgataatgaattggtggtcagggcttacacccctgtctccagtgatgatgacagaggctttgtggacctaattataaagatctacttcaaaaatgtacacccccaatatcctgaaggtgggaagatgactcagtatttggagaacatgaaaatcggggagaccatctttt

SEQ ID NO: 7317 - DNA, 1338 bp, Homo sapiens
  source 1..1338: mol_type = unassigned DNA
ggcaactttccctgtcgggcttgagttgggagaggagcagggcggccttgtagggacccgtccctgctcctgaccatcaccgtcactggggtcactgtgctcgtgttggtcctgaagagcatgaactccaggaggagagagccaatcaccttacaggaccctgaagccaagtacccgctgcccttgattgagaaagagaaaatcagccacaacacccggaggttccgctttggactgccttcgccggaccatgtcttagggcttcctgtaggtaactatgtccagctcttggcaaaaatcgataatgaattggtggtcagggcttacacccctgtctccagtgatgatgacagaggctttgtggacctaattataaagatctacttcaaaaatgtacacccccaatatcctgaaggtgggaagatgactcagtatttggagaacatgaaaatcggggagaccatcttttttcgagggccaaggggacgcttgttttaccatgggccagggaatcttggaatcagaccagaccagacgagtgagcctaaaaaaacactggccgatcacctgggaatgattgctgggggcacaggcatcacacccatgttgcagctcattcgccacatcaccaaggaccccagtgacaggaccaggatgtccctcatctttgccaaccagacagaggaggatatcttggtcagaaaagagcttgaagaaattgccaggactcacccagaccagttcaacctgtggtacaccctggacaggcctcccattggtccctggtcggcagagggcgctaccctactgagcaattctgcgcagttccactaacaccaggccacaccctgccggacaactccagctggctgtactgattcacacacctcggctggaagtacagctcaggcttcgttactgccgacatgatcaaggagcaccttcctcctccagcgaagtccacgctcatcctggtgtgtggcccgccaccactaatccagacggcggctcaccctaacctggagaagctgggttatacccaggacatgattttcacctactaacacctccacgtgctcagcaattttgcatgtcccttttcatctgtttcagagtaagttcaatttcaccacggtaaactgggatgttttcaaaagtgccttgccatgtaccttcgcgcacacactggttctcctcttttgggtgtgggcctaacaaaaagggctcaaggggctggagactggctgctggggcctccttgcttggaggctggaaagagctccatttcagtatctttctccgtggttttgtgaaataaactcaagtacaaagcagaca

SEQ ID NO: 7318 - DNA, 611 bp, Homo sapiens
  source 1..611: mol_type = unassigned DNA
gaatgaatatattcgcgcgctctttgcagctgcctgaattcttccttccccagcatccccctccgcccggtcacccagacggccttctccagccttgccgagcttaagacccgtccctgctcctgaccatcaccgtcactggggtcactgtgctcgtgttggtcctgaagagcatgaactccaggaggagagagccaatcaccttacaggaccctgaagccaagtacccgctgcccttgattgagaaagagaaaatcagccacaacacccggaggttccgctttggactgccttcgccggaccatgtcttagggcttcctgtaggtaactatgtccagctcttggcaaaaatcgataatgaattggtggtcagggcttacacccctgtctccagtgatgatgacagaggctttgtggacctaattataaagatctacttcaaaaatgtacacccccaatatcctgaaggtgggaagatgactcagtatttggagaacatgaaaatcggggagaccatcttttttcgagggccaaggggacgcttgttttaccatgggccagggaatcttggaatcagaccagaccagacgagtgagcctaaaaaaacactg

SEQ ID NO: 7319 - DNA, 872 bp, Homo sapiens
  source 1..872: mol_type = unassigned DNA
agggtaggcgcccatgaggtatgtcgaatgaatatattcgcgcgctctttgcagctgcctgaattcttccttccccagcatccccctccgcccggtcacccagacggccttctccagccttgccgagcttaagtaagctgaggggcgctcagtgtggcagctctgcgtgtgcagggaaggggccaggatgcagaggggcagcgcaggagcgaggacgccacggctcagcgccccgccagcctcatgatggagcgctgccctgggggcagggctgacccagagccagcggctcgacccgtccctgctcctgaccatcaccgtcactggggtcactgtgctcgtgttggtcctgaagagcatgaactccaggaggagagagccaatcaccttacaggaccctgaagccaagtacccgctgcccttgattgagaaagagaaaatcagccacaacacccggaggttccgctttggactgccttcgccggaccatgtcttagggcttcctgtaggtaactatgtccagctcttggcaaaaatcgataatgaattggtggtcagggcttacacccctgtctccagtgatgatgacagaggctttgtggacctaattataaagatctacttcaaaaatgtacacccccaatatcctgaaggtgggaagatgactcagtatttggagaacatgaaaatcggggagaccatcttttttcgagggccaaggggacgcttgttttaccatgggccagggaatcttggaatcagaccagaccagacgagtgagcctaaaaaaacactggccgatcacctgggaatgattgctgggggcacaggcatcacacccatgttgcagctcattcgccacatcaccaagg

SEQ ID NO: 7320 - DNA, 1658 bp, Homo sapiens
  source 1..1658: mol_type = unassigned DNA
attcgcgcgctctttgcagctgcctgaattcttccttccccagcatccccctccgcccggtcacccagacggccttctccagccttgccgagcttaagtaagctgaggggcgctcagtgtggcagctctgcgtgtgcagggaaggggccaggatgcagaggggcagcgcaggagcgaggacgccacggctcagcgccccgccagcctcatgatggagcgctgccctgggggcagggctgacccagagccagcggctcgtgagtgagagccccccgaccacggcccttctcggggagcgggccagccgccggggtcccagcctgcggggtccgcccgcgcttttgtcctcccgggcgtgcgtgtccgggtctcggccggttccccgtcggccaggcggagctgcggggcgacgccacgagtctgcgggcccgcggcggggagcggcccccggccaaccccagttcgacgacgtgttgggcgtctcactccgggacccgtccctgctcctgaccatcaccgtcactggggtcactgtgctcgtgttggtcctgaagagcatgaactccaggaggagagagccaatcaccttacaggaccctgaagccaagtacccgctgcccttgattgagaaagagaaaatcagccacaacacccggaggttccgctttggactgccttcgccggaccatgtcttagggcttcctgtaggtaactatgtccagctcttggcaaaaatcgataatgaattggtggtcagggcttacacccctgtctccagtgatgatgacagaggctttgtggacctaattataaagatctacttcaaaaatgtacacccccaatatcctgaaggtgggaagatgactcagtatttggagaacatgaaaatcggggagaccatcttttttcgagggccaaggggacgcttgttttaccatgggccagggaatcttggaatcagaccagaccagacgagtgagcctaaaaaaacactggccgatcacctgggaatgattgctgggggcacaggcatcacacccatgttgcagctcattcgccacatcaccaaggaccccagtgacaggaccaggatgtccctcatctttgccaaccagacagaggaggatatcttggtcagaaaagagcttgaagaaattgccaggactcacccagaccagttcaacctgtggtacaccctggacaggcctcccattggctggaagtacagctcaggcttcgttactgccgacatgatcaaggagcaccttcctcctccagcgaagtccacgctcatcctggtgtgtggcccgccaccactaatccagacggcggctcaccctaacctggagaagctgggttatacccaggacatgattttcacctactaacacctccacgtgctcagcaattttgcatgtcccttttcatctgtttcagagtaagttcaatttcaccacggtaaactgggatgttttcaaaagtgccttgccatgtaccttcgcgcacacactggttctcctcttttgggtgtgggcctaacaaaaagggctcaaggggctggagactggctgctggggcctccttgcttggaggctggaaagagctccatttcagtatctttctccgtggttttgtgaaataaactcaagtacaaagca

SEQ ID NO: 7321 - DNA, 2124 bp, Homo sapiens
  source 1..2124: mol_type = unassigned DNA
gaggccaccgtcccgcgcggggcagcacagcggcgggagagctcggagcgcagagggccgcatccccagttcccagtctccatccccggcagaagcaggcggagcgacccggtccccgcccccgcgcccgccccgccccgcgcgcccgcctggcccctcggccccgcccctgctccggagtgacgcgggcccgggcgcgacggtctcggcggcggcggcggcggcgacagagcgagcgcggcgcggggccaccatgggggcccagctcagcacgttgggccatatggtgctcttcccagtctggttcctgtacagtctgctcatgaagctgttccagcgctccacgccagccatcaccctcgagagcccggacatcaagtacccgctgcggctcatcgaccgggagatcatcagccatgacacccggcgcttccgctttgccctgccgtcaccccagcacatcctgggcctccctgtcggccagcacatctacctctcggctcgaattgatggaaacctggtcgtccggccctatacacccatctccagcgatgatgacaagggcttcgtggacctggtcatcaaggtttacttcaaggacacccatcccaagtttcccgctggagggaagatgtctcagtacctggagagcatgcagattggagacaccattgagttccggggccccagtgggctgctggtctaccagggcaaagggaagttcgccatccgacctgacaaaaagtccaaccctatcatcaggacagtgaagtctgtgggcatgatcgcgggagggacaggcatcaccccgatgctgcaggtgatccgcgccatcatgaaggaccctgatgaccacactgtgtgccacctgctctttgccaaccagaccgagaaggacatcctgctgcgacctgagctggaggaactcaggaacaaacattctgcacgcttcaagctctggtacacgctggacagagcccctgaagcctgggactacggccagggcttcgtgaatgaggagatgatccgggaccaccttccacccccagaggaggagccgctggtgctgatgtgtggccccccacccatgatccagtacgcctgccttcccaacctggaccacgtgggccaccccacggagcgctgcttcgtcttctgagggccgggcacggtcacacggccacccgccccgcgcaccccacgccctgttcacgctcacccagtcacctccccacatcgcacactggggccccgggttcagcctggcctgcccgtgccctggtgaatcacctggctgagcagttcccctggagccccttcgggagcagggctgtgtcccagatgggccacggctgagccttcagagtacgtcctgcctggcacttactggtccttaccagagacgcccagccccatccctgtcctcatgacccctcgtccaccccccacacacactataaggctgagggctgccagcagccccgtctgcccaccattcccggccgtggaccatagtcgggatgtcagcagacacacatgggcagcccaaagctgcaggtgccagggcccaccccagcctcgcctgtcacccccactcccgcctcagggccaggcccaggcctcaccacctgacgctgcatgagacattgacaccagaaagccctcttgggggcactgctccctaccccagggccctggccagccgggagcttggctctcctctggctagagtgggaagagggggctggccatggggccctcccagaacctcagcatttccttccagcccatccaaacactgaggcagccttggggaaccccgagctggggggttggcagcccactgcaccgcctcagggttttggggtcctgggctggggccaccatccctgatggcagaactcccacaaccacatgtatttattcctctgtcctaaaccgtcccctccttccctcacccccagcacagggggattctgagcagtgcctcttgtctgagggacatatcagtgacctcgacgttgcctttagactacagttgtgttagcctcttgcgtattggctttttcagagtcatttatgagcagaaaaaaaaaaagtaaaactttgctaatattaaccctt

SEQ ID NO: 7322 - DNA, 2938 bp, Homo sapiens
  source 1..2938: mol_type = unassigned DNA
atgaataggagtttgctggttggatgcatgcagagcaaggacatttggggcagagaggagagcatatgcgaacgcctgaagcaagatgggcttgatgttgaaagagcagagagctgggagttgggccatatggtgctcttcccagtctggttcctgtacagtctgctcatgaagctgttccagcgctccacgccagccatcaccctcgagagcccggacatcaagtacccgctgcggctcatcgaccgggagatcatcagccatgacacccggcgcttccgctttgccctgccgtcaccccagcacatcctgggcctccctgtcggccagcacatctacctctcggctcgaattgatggaaacctggtcgtccggccctatacacccatctccagcgatgatgacaagggcttcgtggacctggtcatcaaggtttacttcaaggacacccatcccaagtttcccgctggagggaagatgtctcagtacctggagagcatgcagattggagacaccattgagttccggggccccagtgggctgctggtctaccagggcaaagggaagttcgccatccgacctgacaaaaagtccaaccctatcatcaggacagtgaagtctgtgggcatgatcgcgggagggacaggcatcaccccgatgctgcaggtgatccgcgccatcatgaaggaccctgatgaccacactgtgtgccacctgctctttgccaaccagaccgagaaggacatcctgctgcgacctgagctggaggaactcaggaacaaacattctgcacgcttcaagctctggtacacgctggacagagcccctgaagcctgggactacggccagggcttcgtgaatgaggagatgatccgggaccaccttccacccccagaggaggagccgctggtgctgatgtgtggccccccacccatgatccagtacgcctgccttcccaacctggaccacgtgggccaccccacggagcgctgcttcgtcttctgagggccgggcacggtcacacggccacccgccccgcgcaccccacgccctgttcacgctcacccagtcacctccccacatcgcacactggggccccgggttcagcctggcctgcccgtgccctggtgaatcacctggctgagcagttcccctggagccccttcgggagcagggctgtgtcccagatgggccacggctgagccttcagagtacgtcctgcctggcacttactggtccttaccagagacgcccagccccatccctgtcctcatgacccctcgtccaccccccacacacactataaggctgagggctgccagcagccccgtctgcccaccattcccggccgtggaccatagtcgggatgtcagcagacacacatgggcagcccaaagctgcaggtgccagggcccaccccagcctcgcctgtcacccccactcccgcctcagggccaggcccaggcctcaccacctgacgctgcatgagacattgacaccagaaagccctcttgggggcactgctccctaccccagggccctggccagccgggagcttggctctcctctggctagagtgggaagagggggctggccatggggccctcccagaacctcagcatttccttccagcccatccaaacactgaggcagccttggggaaccccgagctggggggttggcagcccactgcaccgcctcagggttttggggtcctgggctggggccaccatccctgatggcagaactcccacaaccacatgtatttattcctctgtcctaaaccgtcccctccttccctcacccccagcacagggggattctgagcagtgcctcttgtctgagggacatatcagtgacctcgacgttgcctttagactacagttgtgttagcctcttgcgtattggctttttcagagtcatttatgagcagaaaaaaaaaaagtaaaactttgctaatattaacccttctctagctcctcgagggtctgtgacctgcaacacaaggggtggggtcaggaaagggctggggaagacctagcattttttttttcttttttttttttttttgagacggagtctccctttgtcacccaggctggagtggcatgatctcagctcactacaacctccacctctcgggttcaagcgattctcctgcctcagcctcccgagtagctgggactaaaagtgcccaccaccacacccagctagtttttgtatttttttttttttttttttgagacggagtctcgctctgtcgcccaggctggagtgcagtggcgggatctcggctcactgcaagctccgcctcccgggttcacgccattctcctgcctcagcctcccaagtagctgggactacaggcgcccgccactacgcccggctaattttttgtatttttagtagagacggggtttcaccgttttagccgggatggtctcgatctcctgacctcgtgatccgcccgcctcggcctcccaaagtgctgggattacaggcgtgagccactgcgcccggctccagcatttatttctgatgtatctttgtggtagaaaatttggaaagtgcagagaagtatacacaggaagaaaaattcccaacccccagaggcaaaccagctgaaaccacgcaaccccagtcaccccaatgcaccgcgaggctgctgcctcctgtcagggtcagatgagcctcgaggctcaggaaagtcagaggatgccatctgcatggtggtaaattacagaggtgatgaggcaaggtgggtgtggggctgttcttaaaacggggcagcaggaaggccccaaggagatggatttgggctgggacgggaagagagagctggccatgctggggtgggtgggtgttcaaatggtggaaacagcagacgcaaaggccctgccgttggaaccagcttgtggaataaactttcagaaacaga

SEQ ID NO: 7323 - DNA, 2922 bp, Homo sapiens
  source 1..2922: mol_type = unassigned DNA
agccacactgggaaaacattggagcttggtctgccatcctgaactgtggttcccctgcctcccagcccggctgtgagtgctcagcgaccctgacaggctgacagttgggccatatggtgctcttcccagtctggttcctgtacagtctgctcatgaagctgttccagcgctccacgccagccatcaccctcgagagcccggacatcaagtacccgctgcggctcatcgaccgggagatcatcagccatgacacccggcgcttccgctttgccctgccgtcaccccagcacatcctgggcctccctgtcggccagcacatctacctctcggctcgaattgatggaaacctggtcgtccggccctatacacccatctccagcgatgatgacaagggcttcgtggacctggtcatcaaggtttacttcaaggacacccatcccaagtttcccgctggagggaagatgtctcagtacctggagagcatgcagattggagacaccattgagttccggggccccagtgggctgctggtctaccagggcaaagggaagttcgccatccgacctgacaaaaagtccaaccctatcatcaggacagtgaagtctgtgggcatgatcgcgggagggacaggcatcaccccgatgctgcaggtgatccgcgccatcatgaaggaccctgatgaccacactgtgtgccacctgctctttgccaaccagaccgagaaggacatcctgctgcgacctgagctggaggaactcaggaacaaacattctgcacgcttcaagctctggtacacgctggacagagcccctgaagcctgggactacggccagggcttcgtgaatgaggagatgatccgggaccaccttccacccccagaggaggagccgctggtgctgatgtgtggccccccacccatgatccagtacgcctgccttcccaacctggaccacgtgggccaccccacggagcgctgcttcgtcttctgagggccgggcacggtcacacggccacccgccccgcgcaccccacgccctgttcacgctcacccagtcacctccccacatcgcacactggggccccgggttcagcctggcctgcccgtgccctggtgaatcacctggctgagcagttcccctggagccccttcgggagcagggctgtgtcccagatgggccacggctgagccttcagagtacgtcctgcctggcacttactggtccttaccagagacgcccagccccatccctgtcctcatgacccctcgtccaccccccacacacactataaggctgagggctgccagcagccccgtctgcccaccattcccggccgtggaccatagtcgggatgtcagcagacacacatgggcagcccaaagctgcaggtgccagggcccaccccagcctcgcctgtcacccccactcccgcctcagggccaggcccaggcctcaccacctgacgctgcatgagacattgacaccagaaagccctcttgggggcactgctccctaccccagggccctggccagccgggagcttggctctcctctggctagagtgggaagagggggctggccatggggccctcccagaacctcagcatttccttccagcccatccaaacactgaggcagccttggggaaccccgagctggggggttggcagcccactgcaccgcctcagggttttggggtcctgggctggggccaccatccctgatggcagaactcccacaaccacatgtatttattcctctgtcctaaaccgtcccctccttccctcacccccagcacagggggattctgagcagtgcctcttgtctgagggacatatcagtgacctcgacgttgcctttagactacagttgtgttagcctcttgcgtattggctttttcagagtcatttatgagcagaaaaaaaaaaagtaaaactttgctaatattaacccttctctagctcctcgagggtctgtgacctgcaacacaaggggtggggtcaggaaagggctggggaagacctagcattttttttttcttttttttttttttttgagacggagtctccctttgtcacccaggctggagtggcatgatctcagctcactacaacctccacctctcgggttcaagcgattctcctgcctcagcctcccgagtagctgggactaaaagtgcccaccaccacacccagctagtttttgtatttttttttttttttttttgagacggagtctcgctctgtcgcccaggctggagtgcagtggcgggatctcggctcactgcaagctccgcctcccgggttcacgccattctcctgcctcagcctcccaagtagctgggactacaggcgcccgccactacgcccggctaattttttgtatttttagtagagacggggtttcaccgttttagccgggatggtctcgatctcctgacctcgtgatccgcccgcctcggcctcccaaagtgctgggattacaggcgtgagccactgcgcccggctccagcatttatttctgatgtatctttgtggtagaaaatttggaaagtgcagagaagtatacacaggaagaaaaattcccaacccccagaggcaaaccagctgaaaccacgcaaccccagtcaccccaatgcaccgcgaggctgctgcctcctgtcagggtcagatgagcctcgaggctcaggaaagtcagaggatgccatctgcatggtggtaaattacagaggtgatgaggcaaggtgggtgtggggctgttcttaaaacggggcagcaggaaggccccaaggagatggatttgggctgggacgggaagagagagctggccatgctggggtgggtgggtgttcaaatggtggaaacagcagacgcaaaggccctgccgttggaaccagcttgtggaataaactttcagaaacaga

SEQ ID NO: 7324 - DNA, 1050 bp, Homo sapiens
  source 1..1050: mol_type = unassigned DNA
tctgccatcctgaactgtggttcccctgcctcccagcccggctgtgagtgctcagcgaccctgacaggctgacaggaccaggagggaggtgccgctcagattctggcaggaccgctggcgggcaggcaggggacagttgggccatatggtgctcttcccagtctggttcctgtacagtctgctcatgaagctgttccagcgctccacgccagccatcaccctcgagagcccggacatcaagtacccgctgcggctcatcgaccgggagatcatcagccatgacacccggcgcttccgctttgccctgccgtcaccccagcacatcctgggcctccctgtcggccagcacatctacctctcggctcgaattgatggaaacctggtcgtccggccctatacacccatctccagcgatgatgacaagggcttcgtggacctggtcatcaaggtttacttcaaggacacccatcccaagtttcccgctggagggaagatgtctcagtacctggagagcatgcagattggagacaccattgagttccggggccccagtgggctgctggtctaccagggcaaagggaagttcgccatccgacctgacaaaaagtccaaccctatcatcaggacagtgaagtctgtgggcatgatcgcgggagggacaggcatcaccccgatgctgcaggtgatccgcgccatcatgaaggaccctgatgaccacactgtgtgccacctgctctttgccaaccagaccgagaaggacatcctgctgcgacctgagctggaggaactcaggaacaaacattctgcacgcttcaagctctggtacacgctggacagagcccctgaagcctgggactacggccagggcttcgtgaatgaggagatgatccgggaccaccttccacccccagaggaggagccgctggtgctgatgtgtggccccccacccatgatccagtacgcctgccttcccaacctggaccacgtgggccaccccacggagcgctgcttcgtcttctgagggccgggcacggtcacacggccacccgc

SEQ ID NO: 7325 - DNA, 1849 bp, Homo sapiens
  source 1..1849: mol_type = unassigned DNA
aaaggcaggctcctgcactgaccccgcgggtcctgtcgtttcagttgggccatatggtgctcttcccagtctggttcctgtacagtctgctcatgaagctgttccagcgctccacgccagccatcaccctcgagagcccggacatcaagtacccgctgcggctcatcgaccgggagatcatcagccatgacacccggcgcttccgctttgccctgccgtcaccccagcacatcctgggcctccctgtcggccagcacatctacctctcggctcgaattgatggaaacctggtcgtccggccctatacacccatctccagcgatgatgacaagggcttcgtggacctggtcatcaaggtttacttcaaggacacccatcccaagtttcccgctggagggaagatgtctcagtacctggagagcatgcagattggagacaccattgagttccggggccccagtgggctgctggtctaccagggcaaagggaagttcgccatccgacctgacaaaaagtccaaccctatcatcaggacagtgaagtctgtgggcatgatcgcgggagggacaggcatcaccccgatgctgcaggtgatccgcgccatcatgaaggaccctgatgaccacactgtgtgccacctgctctttgccaaccagaccgagaaggacatcctgctgcgacctgagctggaggaactcaggaacaaacattctgcacgcttcaagctctggtacacgctggacagagcccctgaagcctgggactacggccagggcttcgtgaatgaggagatgatccgggaccaccttccacccccagaggaggagccgctggtgctgatgtgtggccccccacccatgatccagtacgcctgccttcccaacctggaccacgtgggccaccccacggagcgctgcttcgtcttctgagggccgggcacggtcacacggccacccgccccgcgcaccccacgccctgttcacgctcacccagtcacctccccacatcgcacactggggccccgggttcagcctggcctgcccgtgccctggtgaatcacctggctgagcagttcccctggagccccttcgggagcagggctgtgtcccagatgggccacggctgagccttcagagtacgtcctgcctggcacttactggtccttaccagagacgcccagccccatccctgtcctcatgacccctcgtccaccccccacacacactataaggctgagggctgccagcagccccgtctgcccaccattcccggccgtggaccatagtcgggatgtcagcagacacacatgggcagcccaaagctgcaggtgccagggcccaccccagcctcgcctgtcacccccactcccgcctcagggccaggcccaggcctcaccacctgacgctgcatgagacattgacaccagaaagccctcttgggggcactgctccctaccccagggccctggccagccgggagcttggctctcctctggctagagtgggaagagggggctggccatggggccctcccagaacctcagcatttccttccagcccatccaaacactgaggcagccttggggaaccccgagctggggggttggcagcccactgcaccgcctcagggttttggggtcctgggctggggccaccatccctgatggcagaactcccacaaccacatgtatttattcctctgtcctaaaccgtcccctccttccctcacccccagcacagggggattctgagcagtgcctcttgtctgagggacatatcagtgacctcgacgttgcctttagactacagttgtgttagcctcttgcgtattggctttttcagagtcattt

SEQ ID NO: 7326 - DNA, 2153 bp, Homo sapiens
  source 1..2153: mol_type = unassigned DNA
aaaacattggagcttggtctgccatcctgaactgtggttcccctgcctcccagcccggctgtgagtgctcagcgaccctgacaggctgacaggtacagtctgccgggctttcctactgtccctggcagccccatgcttactctgcggcccagatcccagctctgtgtccacctgttccttctcctgggttcccttcccccacagttcccagccaagccagagccccccactgcagaacttcctccactccctcccacttcctcccggttagaacaggaccaggagggaggtgccgctcagattctggcaggaccgctggcgggcaggcaggggacagttgggccatatggtgctcttcccagtctggttcctgtacagtctgctcatgaagctgttccagcgctccacgccagccatcaccctcgagagcccggacatcaagtacccgctgcggctcatcgaccgggagatcatcagccatgacacccggcgcttccgctttgccctgccgtcaccccagcacatcctgggcctccctgtcggccagcacatctacctctcggctcgaattgatggaaacctggtcgtccggccctatacacccatctccagcgatgatgacaagggcttcgtggacctggtcatcaaggtttacttcaaggacacccatcccaagtttcccgctggagggaagatgtctcagtacctggagagcatgcagattggagacaccattgagttccggggccccagtgggctgctggtctaccagggcaaagggaagttcgccatccgacctgacaaaaagtccaaccctatcatcaggacagtgaagtctgtgggcatgatcgcgggagggacaggcatcaccccgatgctgcaggtgatccgcgccatcatgaaggaccctgatgaccacactgtgtgccacctgctctttgccaaccagaccgagaaggacatcctgctgcgacctgagctggaggaactcaggaacaaacattctgcacgcttcaagctctggtacacgctggacagagcccctgaagcctgggactacggccagggcttcgtgaatgaggagatgatccgggaccaccttccacccccagaggaggagccgctggtgctgatgtgtggccccccacccatgatccagtacgcctgccttcccaacctggaccacgtgggccaccccacggagcgctgcttcgtcttctgagggccgggcacggtcacacggccacccgccccgcgcaccccacgccctgttcacgctcacccagtcacctccccacatcgcacactggggccccgggttcagcctggcctgcccgtgccctggtgaatcacctggctgagcagttcccctggagccccttcgggagcagggctgtgtcccagatgggccacggctgagccttcagagtacgtcctgcctggcacttactggtccttaccagagacgcccagccccatccctgtcctcatgacccctcgtccaccccccacacacactataaggctgagggctgccagcagccccgtctgcccaccattcccggccgtggaccatagtcgggatgtcagcagacacacatgggcagcccaaagctgcaggtgccagggcccaccccagcctcgcctgtcacccccactcccgcctcagggccaggcccaggcctcaccacctgacgctgcatgagacattgacaccagaaagccctcttgggggcactgctccctaccccagggccctggccagccgggagcttggctctcctctggctagagtgggaagagggggctggccatggggccctcccagaacctcagcatttccttccagcccatccaaacactgaggcagccttggggaaccccgagctggggggttggcagcccactgcaccgcctcagggttttggggtcctgggctggggccaccatccctgatggcagaactcccacaaccacatgtatttattcctctgtcctaaaccgtcccctccttccctcacccccagcacagggggattctgagcagtgcctcttgtctgagggacatatcagtgacctcgacgttgcctttagactacagttgtgttagcctcttgcgtattggctttttcagagtcatttatgagcagaaa

SEQ ID NO: 7327 - DNA, 675 bp, Homo sapiens
  source 1..675: mol_type = unassigned DNA
atctaagacatgcaggccccatgggaggcctctcccaacactttgtgggatccaggccaggggttggccctggagtctgccagccacactgggaaaacattggagcttggtctgccatcctgaactgtggttcccctgcctcccagcccggctgtgagtgctcagcgaccctgacaggctgacagttgggccatatggtgctcttcccagtctggttcctgtacagtctgctcatgaagctgttccagcgctccacgccagccatcaccctcgagagcccggacatcaagtacccgctgcggctcatcgaccgggagatcatcagccatgacacccggcgcttccgctttgccctgccgtcaccccagcacatcctgggcctccctgtcggccagcacatctacctctcggctcgaattgatggaaacctggtcgtccggccctatacacccatctccagcgatgatgacaagggcttcgtggacctggtcatcaaggtttacttcaaggacacccatcccaagtttcccgctggagggaagatgtctcagtacctggagagcatgcagattggagacaccattgagttccggggccccagtgggctgctggtctaccagggcaaagggaagttcgccatccgacctgacaaaaagtccaaccctatcatcagga

SEQ ID NO: 7328 - DNA, 768 bp, Homo sapiens
  source 1..768: mol_type = unassigned DNA
gcctcacccctggcgaccccggaagtgggtcgggggcttggcctctgcccggccacagagccggagctggaggtgctgtcccgtctggcggcgatccccgggcagggcccggggccggggtttgaagatgctgaacgtcccttcccagtctttcccggcccccaggtcgcagcagcgtgtcgcctccggggggcgtagcaaggtacctttaaaacagggcagaagccttatggattggattcgactgaccaaaagtggaaaggatctaacgggattaaaaggcaggttaattgaagtaactgaagaagaacttaagaaacacaacaaaaaagatgattgttggatatgcataagaggtttcgtttataatgtcagcccttatatggagtatcatcctggtggagaagatgaactaatgagagcagcaggatcagatggtactgaactttttgatcaggttcatcgttgggtcaattatgaatccatgctgaaagaatgcctggttggcagaatggccattaaacctgctgttctgaaaggcaaactctggcacctgtagagctgaggatggagatagacaccaggacctatagtgggctgagacattactttcaaagatttcttttactgtcacagcactgtgagcaaggacaagacatctattgaatgggctgcctgccagttggaagttcaacttttgtaaagtcagtcaaagttctttcttctagaagcctcagtttcctcattggtaaaatggagacaatttag

SEQ ID NO: 7329 - DNA, 2255 bp, Homo sapiens
  source 1..2255: mol_type = unassigned DNA
tgcgtcagaatgcgcctcacccctggcgaccccggaagtgggtcgggggcttggcctctgcccggccacagagccggagctggaggtgctgtcccgtctggcggcgatccccgggcagggcccggggccggggtttgaagatgctgaacgtcccttcccagtctttcccggcccccaggtcgcagcagcgtgtcgcctccggggggcgtagcaaggtacctttaaaacagggcagaagccttatggattggattcgactgaccaaaagtggaaaggatctaacgggattaaaaggcaggttaattgaagtaactgaagaagaacttaagaaacacaacaaaaaagatgattgttggatatgcataagaggtttcgtttataatgtcagcccttatatggagtatcatcctggtggagaagatgaactaatgagagcagcaggatcagatggtactgaactttttgatcaggttcatcgttgggtcaattatgaatccatgctgaaagaatgcctggttggcagaatggccattaaacctgctgttctgaaagactatcgtgaggaggaaaagaaagtcttaaatggcatgcttcccaagagccaagtgacagatacacttgccaaagaaggtcctagttatccaagctatgattggttccaaacagactctttagtcaccattgccatatatactaaacagaaggatatcaatttagactcaataatagttgatcatcagaatgattcctttagagcagaaacaattattaaggattgtttatatcttatacatattgggctaagccatgaggttcaggaagatttttctgtgcgggttgttgagagtgtgggaaaaatagagattgttctacaaaaaaaagagaatacttcttgggactttcttggccatcccctgaagaatcataattcacttattccaaggaaagatacaggtttgtactacagaaagtgccagttaatttccaaggaagatgttactcatgatacgaggcttttctgtttgatgctgccaccaagcactcatcttcaagtgcccattgggcaacatgtttacctcaagctacctattacaggtacagaaatagtaaagccatatacacctgtatctggttccttactctcagagttcaaggaaccagttcttcccaacaataaatacatctactttttgataaaaatctatcccactggactcttcacaccagagcttgatcgtcttcagattggagattttgtttctgtaagcagtcctgagggcaattttaaaatatccaagttccaagaattagaagatctctttttgttggcagctggaacaggcttcacaccaatggttaaaatactgaattatgctttgactgatatacccagtctcaggaaagtgaagctgatgttcttcaataaaacagaagatgatataatttggagaagccaattggagaaattagcatttaaagataaaagactggatgttgaatttgttctctcagcacctatttctgaatggaatggcaaacagggacatatttcaccagctcttctttctgaatttttgaaaagaaatttggacaaatccaaagttctcgtctgcatttgtggaccagtgccatttacagaacaaggagtaaggttgctgcatgatctcaacttttccaaaaatgagatccatagttttacagcataatgaagagctgtcattgtcctttattcaactagtttatctaaatttgtgattgcttagggttttttaagagaacatttttgtacataacaaaaggttaactagaatccagccttcagtttcttaaatgaaatcaaatgttccttcagtacaggtaacttcttggctttcttttgtaccacaacttattttactactgatatttgacctggaaagttaatcatggcaacaaatacatacaggattctttgttatgaatcacaaatttccttgccatttaaattatatcactgttctacaataagcacttgtgttttatgacatgataaagtaaatgatcacttcgatcatgtttctatgctgtaaaatgtcttattagcaatacagattaaattttaccttgcactgttaactcaggaaatgatcatttatgtccttgttattaatgttaaaacatagaatgttataacttattaagtgatccaaacatttttttgtgtgtgtatggcattgatgcagaatagaataaaattatacttaagttctttttaa

SEQ ID NO: 7330 - DNA, 363 bp, Homo sapiens
  source 1..363: mol_type = unassigned DNA
ggctgagtcgcgcgctctgctccacccgacggggctgtgtgtgctgggcctggctcgcggcgaaccgagatggcagagcagtcggacgaggccgtgaagtactacaccctagaggagattcagaagcacaaccacagcaagagcacctggctgatcctgcaccacaaggtgtacgatttgaccaaatttctggaagagcatcctggtggggaagaagttttaagggaacaagctggaggtgacgctactgagaactttgaggatgtcgggcactctacagatgccagggaaatgtccaaaacattcatcattggggagctccatccagatgacagaccaaagttaaacaagcctccgaaacct

SEQ ID NO: 7331 - DNA, 834 bp, Homo sapiens
  source 1..834: mol_type = unassigned DNA
gcgccccgcccctgagccggccgcccagcccccagtggggttcccggcgcggggaatgtcccgggtggagctggctgagtcgcgcgctctgctccacccgacggggctgtgtgtgctgggcctggctcgcggcgaaccgagatggcagagcagtcggacgaggccgtgaagtactacaccctagaggagattcagaagcacaaccacagcaagagcacctggctgatcctgcaccacaaggtgtacgatttgaccaaatttctggaagagcatcctggtggggaagaagttttaagggaacaagctggaggtgacgctactgagaactttgaggatgtcgggcactctacagatgccagggaaatgtccaaaacattcatcattggggagctccatccagatgacagaccaaagttaaacaagcctccggaaactcttatcactactattgattctagttccagttggtggaccaactgggtgatccctgccatctctgcagtggccgtcgccttgatgtatcgcctatacatggcagaggactgaacacctcctcagaagtcagcgcaggaagagcctgctttggacacgggagaaaagaagccattgctaactacttcaactgacagaaaccttcacttgaaaacaatgattttaatatatctctttctttttcttccgacattagaaacaaaacaaaaagaactgtcctttctgcgctcaaatttttcgagtgtgcctttttattcatctactttattttgatgtttccttaatgtgtaatttacttattataagcatgatcttttaaaaatatatttggcttttaaagta

SEQ ID NO: 7332 - DNA, 777 bp, Homo sapiens
  source 1..777: mol_type = unassigned DNA
cccagtggggttcccggcgcggggaatgtcccgggtggagctggctgagtcgcgcgctctgctccacccgacggggctgtgtgtgctgggcctggctcgcggcgaaccgagatggcagagcagtcggacgaggccgtgaagtactacaccctagaggagattcagaagcacaaccacagcaagagcacctggctgatcctgcaccacaaggtgtacgatttgaccaaatttctggaagagcatcctggtggggaagaagttttaagggaacaagctggaggtgacgctactgagaactttgaggatgtcgggcactctacagatgccagggaaatgtccaaaacattcatcattggggagctccatccagaaactcttatcactactattgattctagttccagttggtggaccaactgggtgatccctgccatctctgcagtggccgtcgccttgatgtatcgcctatacatggcagaggactgaacacctcctcagaagtcagcgcaggaagagcctgctttggacacgggagaaaagaagccattgctaactacttcaactgacagaaaccttcacttgaaaacaatgattttaatatatctctttctttttcttccgacattagaaacaaaacaaaaagaactgtcctttctgcgctcaaatttttcgagtgtgcctttttattcatctactttattttgatgtttccttaatgtgtaatttacttattataagcatgatcttttaaaaatatatttggcttttaaagtatgc

SEQ ID NO: 7333 - DNA, 776 bp, Homo sapiens
  source 1..776: mol_type = unassigned DNA
gcgcgctctgctccacccgacggggctgtgtgtgctgggcctggctcgcggcgaaccgagatggcagagcagtcggacgaggccgtgaagtactacaccctagaggagattcagaagcacaaccacagcaagagcacctggctgatcctgcaccacaaggtgtacgatttgaccaaatttctggaagagcatcctggtggggaagaagttttaagggaacaagctggaggtgacgctactgagaactttgaggatgtcgggcactctacagatgccagggaaatgtccaaaacattcatcattggggagctccatccagatgacagaccaaagttaaacaagcctccggaaccttaaaggcggtgtttcaaggaaactcttatcactactattgattctagttccagttggtggaccaactgggtgatccctgccatctctgcagtggccgtcgccttgatgtatcgcctatacatggcagaggactgaacacctcctcagaagtcagcgcaggaagagcctgctttggacacgggagaaaagaagccattgctaactacttcaactgacagaaaccttcacttgaaaacaatgattttaatatatctctttctttttcttccgacattagaaacaaaacaaaaagaactgtcctttctgcgctcaaatttttcgagtgtgcctttttattcatctactttattttgatgtttccttaatgtgtaatttacttattataagcatgatcttttaaaaatatatttggcttttaaagt

SEQ ID NO: 7334 - DNA, 4286 bp, Homo sapiens
  source 1..4286: mol_type = unassigned DNA
tgggccctggttacggaagccgaggaaggctgagcgcgggctctcaaggaaagtagtcgcggaatctcagttagcggtggagaggcagtatgtccggttcaatggcgactgcggaagctagcggcagcgatgggaaagggcaggaagtcgagacctcagtcacctattaccggttggaggaggtggcaaagcgcaactccttgaaggaactgtggcttgtgatccatgggcgagtctacgatgtcacccgcttcctcaacgagcaccctggaggagaagaggttctgctggaacaagctggtgtagatgcaagtgaaagctttgaagatgtaggacactcttctgatgccagagaaatgctaaagcagtactacattggtgatatccatccgagtgaccttaaacctgaaagtggtagcaaggacccttcaaaaaatgatacatgcaaaagttgctgggcatattggattttacccatcataggcgctgttctcttaggtttcctgtaccgctactacacatcggaaagcaaatcctcctgaggaggccttgctgaagttagaaagtgcatccactttggggcgaaaactagagacttgcttgggggctgcagaagtgccctctcctcgaatcctgccagttgcattcttcccccttggagccaagacgattggccagacatcacctcagatctgagaccagcgtcttccatctctcagagccttactcccaaagtacctgctcactgttccgtgttgaacaattgccggtgtttcctctcttcactggtttccatgagtacccttatatttcacaactttctgttcataagttatagtgacattgctctttggtaaaaatgcctgctttccaatactttgattgcatattagacattcttaacagggcggcagtctagtgttgaaagttttatttttccatttttcttttaagtaaattttttttaaaaaattctgatttagggctaggtgtggtggctcaggcctgtaatcctggcactttgggaggccaaggtgggaagatcgcttgaggccaagagttcaagaccagcctgggcaacatagcgagacccctatctgtattaaaaaaaaatctgatttaattcttttatttatcataaggggtttaattcctgaagtaaaggtttgcacctattaaacttaaaactgccaaatgatttttgttcttttatgtgcgtgataaaaatacaaagaatggtgtggccacctcctccctttcaagctagggcagcaggtagctcttcccagcccctgagcccagccccttcccaagtggtgccggacaaaaaactacatggccctttcgtgtcttgggggtggaaaggtagggatgaattggggtgatagaaccctggtgaattcagagtaatctttctttagaaaactggtgttttctaaagaaacaggataggagtttagagaaggcaccaaagctttcactttggtttggcaccagtttctaaccatctgttttttctaccctagctatcttttattggtaaaatataaatgtataattatgtttgtagagctttaccaaggagtttccctccttttttgtttgttgattagcaaatttttgattctccattttccaaaagtaagagactccagcatggccttctgtttgccccgcagtaaagtaacttccatataaaatggtatttgaaagtgagagttcatgacaacagaccgttttccatttcatctgtattttatctccgtgactccaacttgtgggtttgttctgtttttccatgagaataaaatactggcggtttttttctcagatgtgtgttcattgagaagtaggttactagaattatgttactgtgtcttattggttcaatgatgatttctctggcatattagacttttattttttcccccatggaagcacttgaggaaataaatagtacactggctgttttctgccagcaactgtggtgatttttctccctgtcctttgagaattgctagtctgcttctgagccattgtcatatccagcagggagcagcttggttcaagaaggaccatagaggctgctcagcatctcctccctccctcccagcttgccagggatttgatgagacaggaaactgcccagcaaaccagggactgcccatgtaaactatttaagaaaaagttcaacccaggtcttgtatcctgtgatttagcagttgaatgaatacagaattcatcaaaataatattaaccttgtacttgcacacttggatatatttgggagtaattttaggagatttctggctgacttttattatcagggatatgggtttagtaaagcttttatctttagaaaaatgtttgtatgcattataagatgctacttttaagacaatattgaaaaaaactttggttattatttaacaaaagtggtatgacttgatgcttctctatttaaaggcaaggaaggattggtatatgattgcctgtaataaataaattgcgtgattattggagtacattggggtaaaagtaaagaacagaggagtattgaggagcttgaaagggaacattcaaactaaagccaagcctgaagataacttgaatcagttgtaaaagtgtgttggcaatgtccgaaattgaatgaaaaacatctggcttataagaaatgttaaagaactaccatcttaagtaaaattggtgtttttgttatttttaaggtaaatgccaatgcaaaaggtatgtttttctacttcacattggttttcttttcctgtttacatctgcacttgttttttgctgagagccagaggaaaagataattagactttgtctcttccacccatgaaatcccccagtacccagggcttcttctgaactactgccgatgtgatgtcactttgtatctggaaaatcactttggggtccatttactgttattttgttgcctacaaaaacagccaggtgaaagctaaatcttgtgtgagagtttgcagaggtttttctatacaataaagtagtatagcacactagccaaatccatccaaaaggaccttttttttaggaagtagacttgaattcacaaaacagtcttgacatgggtagctggtgaaaaaccctctggagagcaagtggagccagtccccattggctgacagtgccacctggagctggtctctggggtgttcggttgtttattcctgaggaagactagctgctgctgctgctgctgctgcaaactgtactgtacacatcatggctgctggacacgaaggaggaggtgagagaagtttcatgctaccgaaatagagggtgttggtaccactgcccctggcctgagagccagggtttaaacctgcctcagtagagtctagtttgaaatgacaccaaaattcctcagcccctactcagcaattggttttggtttccaaatgacttctgcatttgtaaagataacagagtggtggggtcaaagtttatcttgtgtttagatctcttcaagactgcttaagcaaaaacaaaaatcccttggaacctatcgtttgagcctgtaaagttgttttagcagttgtcataaatgcatatgttgtgaaatcagaacactgtcgagtttatactcatttagctgcaatgtgggacaatgaaaaatgctttacaggcctggagtatcattacttatggtatctcctgctttaaaatctcaagcgatatctatctggttaaattccattttaggagattgagatgcagaacgttaatgttcattacctcctcctaccccaagagaaatggattcagacatgtcttgtctcaacaagaaattgatttttttttaaactatcttattctgttgccaaatatcacagaagtaatgaggagtttagttacatttggctgttgtgctctgaaagagccaggtttggaatttgtgggggtgatctaggaagaaggttccaaagaagcagaggcatttgtcaagttacctaccctatatccagcatcctcctcatgagcttcagtagctgctctttgcccacgcttgtatcctacgtttgctatttgggcaaaccattacttcagttatttaacttccctttttttttaacttcacctttgactatgaacaagtaacggtaacattccttttgtgtattcaataatgcagttagtttacctttttcagaatattttgaacaaagatctttgtctctttctgctggaatgcgcacacagtgaacgtttgttagaactacacacaataaagacactgttttcctttt

SEQ ID NO: 7335 - DNA, 4358 bp, Homo sapiens
  source 1..4358: mol_type = unassigned DNA
gaaaagaaaacgaaccaggaactattcggaagtgtgattggctgttgctaggaaccgtctcaaggccttatgggccctggttacggaagccgaggaaggctgagcgcgggctctcaaggaaagtagtcgcggaatctcagttagcggtggagaggcagtatgtccggttcaatggcgactgcggaagctagcggcagcgatgggaaagggcaggaagtcgagacctcagtcacctattaccggttggaggaggtggcaaagcgcaactccttgaaggaactgtggcttgtgatccatgggcgagtctacgatgtcacccgcttcctcaacgagcaccctggaggagaagaggttctgctggaacaagctggtgtagatgcaagtgaaagctttgaagatgtaggacactcttctgatgccagagaaatgctaaagcagtactacattggtgatatccatccgagtgaccttaaacctgaaagtggtagcaaggacccttcaaaaaatgatacatgcaaaagttgctgggcatattggattttacccatcataggcgctgttctcttaggtttcctgtaccgctactacacatcggaaagcaaatcctcctgaggaggccttgctgaagttagaaagtgcatccactttggggcgaaaactagagacttgcttgggggctgcagaagtgccctctcctcgaatcctgccagttgcattcttcccccttggagccaagacgattggccagacatcacctcagatctgagaccagcgtcttccatctctcagagccttactcccaaagtacctgctcactgttccgtgttgaacaattgccggtgtttcctctcttcactggtttccatgagtacccttatatttcacaactttctgttcataagttatagtgacattgctctttggtaaaaatgcctgctttccaatactttgattgcatattagacattcttaacagggcggcagtctagtgttgaaagttttatttttccatttttcttttaagtaaattttttttaaaaaattctgatttagggctaggtgtggtggctcaggcctgtaatcctggcactttgggaggccaaggtgggaagatcgcttgaggccaagagttcaagaccagcctgggcaacatagcgagacccctatctgtattaaaaaaaaatctgatttaattcttttatttatcataaggggtttaattcctgaagtaaaggtttgcacctattaaacttaaaactgccaaatgatttttgttcttttatgtgcgtgataaaaatacaaagaatggtgtggccacctcctccctttcaagctagggcagcaggtagctcttcccagcccctgagcccagccccttcccaagtggtgccggacaaaaaactacatggccctttcgtgtcttgggggtggaaaggtagggatgaattggggtgatagaaccctggtgaattcagagtaatctttctttagaaaactggtgttttctaaagaaacaggataggagtttagagaaggcaccaaagctttcactttggtttggcaccagtttctaaccatctgttttttctaccctagctatcttttattggtaaaatataaatgtataattatgtttgtagagctttaccaaggagtttccctccttttttgtttgttgattagcaaatttttgattctccattttccaaaagtaagagactccagcatggccttctgtttgccccgcagtaaagtaacttccatataaaatggtatttgaaagtgagagttcatgacaacagaccgttttccatttcatctgtattttatctccgtgactccaacttgtgggtttgttctgtttttccatgagaataaaatactggcggtttttttctcagatgtgtgttcattgagaagtaggttactagaattatgttactgtgtcttattggttcaatgatgatttctctggcatattagacttttattttttcccccatggaagcacttgaggaaataaatagtacactggctgttttctgccagcaactgtggtgatttttctccctgtcctttgagaattgctagtctgcttctgagccattgtcatatccagcagggagcagcttggttcaagaaggaccatagaggctgctcagcatctcctccctccctcccagcttgccagggatttgatgagacaggaaactgcccagcaaaccagggactgcccatgtaaactatttaagaaaaagttcaacccaggtcttgtatcctgtgatttagcagttgaatgaatacagaattcatcaaaataatattaaccttgtacttgcacacttggatatatttgggagtaattttaggagatttctggctgacttttattatcagggatatgggtttagtaaagcttttatctttagaaaaatgtttgtatgcattataagatgctacttttaagacaatattgaaaaaaactttggttattatttaacaaaagtggtatgacttgatgcttctctatttaaaggcaaggaaggattggtatatgattgcctgtaataaataaattgcgtgattattggagtacattggggtaaaagtaaagaacagaggagtattgaggagcttgaaagggaacattcaaactaaagccaagcctgaagataacttgaatcagttgtaaaagtgtgttggcaatgtccgaaattgaatgaaaaacatctggcttataagaaatgttaaagaactaccatcttaagtaaaattggtgtttttgttatttttaaggtaaatgccaatgcaaaaggtatgtttttctacttcacattggttttcttttcctgtttacatctgcacttgttttttgctgagagccagaggaaaagataattagactttgtctcttccacccatgaaatcccccagtacccagggcttcttctgaactactgccgatgtgatgtcactttgtatctggaaaatcactttggggtccatttactgttattttgttgcctacaaaaacagccaggtgaaagctaaatcttgtgtgagagtttgcagaggtttttctatacaataaagtagtatagcacactagccaaatccatccaaaaggaccttttttttaggaagtagacttgaattcacaaaacagtcttgacatgggtagctggtgaaaaaccctctggagagcaagtggagccagtccccattggctgacagtgccacctggagctggtctctggggtgttcggttgtttattcctgaggaagactagctgctgctgctgctgctgctgcaaactgtactgtacacatcatggctgctggacacgaaggaggaggtgagagaagtttcatgctaccgaaatagagggtgttggtaccactgcccctggcctgagagccagggtttaaacctgcctcagtagagtctagtttgaaatgacaccaaaattcctcagcccctactcagcaattggttttggtttccaaatgacttctgcatttgtaaagataacagagtggtggggtcaaagtttatcttgtgtttagatctcttcaagactgcttaagcaaaaacaaaaatcccttggaacctatcgtttgagcctgtaaagttgttttagcagttgtcataaatgcatatgttgtgaaatcagaacactgtcgagtttatactcatttagctgcaatgtgggacaatgaaaaatgctttacaggcctggagtatcattacttatggtatctcctgctttaaaatctcaagcgatatctatctggttaaattccattttaggagattgagatgcagaacgttaatgttcattacctcctcctaccccaagagaaatggattcagacatgtcttgtctcaacaagaaattgatttttttttaaactatcttattctgttgccaaatatcacagaagtaatgaggagtttagttacatttggctgttgtgctctgaaagagccaggtttggaatttgtgggggtgatctaggaagaaggttccaaagaagcagaggcatttgtcaagttacctaccctatatccagcatcctcctcatgagcttcagtagctgctctttgcccacgcttgtatcctacgtttgctatttgggcaaaccattacttcagttatttaacttccctttttttttaacttcacctttgactatgaacaagtaacggtaacattccttttgtgtattcaataatgcagttagtttacctttttcagaatattttgaacaaagatctttgtctctttctgctggaatgcgcacacagtgaacgtttgttagaactacacacaataaagacactgttttccttttct

SEQ ID NO: 7336 - DNA, 2981 bp, Homo sapiens
  source 1..2981: mol_type = unassigned DNA
caccgcccagcccgccgcccggttgccatggcgacgccgtcgcgccacggcccgcagaaccggccaagcgacccgggcgcggcgcggggaggctgaagggacgctcgggtaggcaagcgtttgcctcagcatggagggcggggccgcggcagccacccccacagcactgccttactacgtggccttctcccagctgctgggcctgaccttggtggccatgaccggcgcgtggctcgggctgtaccgaggcggcattgcctgggagagcgacctgcagttcaacgcgcaccccctctgcatggtcataggcctgatcttcctgcagggaaatgccctgctggtttaccgtgtcttcaggaacgaagctaaacgcaccaccaaggtcctgcacgggctgctgcacatctttgcgctcgtcatcgccctggttggcttggtggcggtgttcgactaccacaggaagaagggctacgctgacctgtacagcctacacagctggtgcgggatccttgtctttgtcctgtactttgtgcagtggctggtgggcttcagcttcttcctgttccccggagcttcattctccctgcggagccgctaccgcccacagcacatcttctttggtgctaccatcttcctcctttccgtgggcaccgccctgctgggcctgaaggaggcactgctgttcaacctcgggggcaagtatagcgcatttgagcccgagggtgtcctggccaacgtgctgggcctgctgctggcctgcttcggtggggcggtgctctacatcttgacccgggccgactggaagcggccttcccaggcggaagagcaggccctctccatggacttcaagacgctgacggagggagatagccccggctcccagtgatgcgcccggccggccctgggggttcgcggggtgtcttcttgcctgcccctgctgaggcgtcttcaggactgcaggctccggagagtggctctggcagcaggcgggcgcgtgggtgcagctgcatctgtttgagtgctgctttctggggtcaggtctccgcctcctctgcttctcctttctccgctgctatagaccagttcattgtgtgtggctcccgtgtctctgttgcccccttcagtgcagaaggctttgggtaggacttcgggtgttcggtcctggtcgcagagcacagatctttaaagaagcgagagaggaggccccaccctcctggcagcagatgcctggggcaaggccaggggaaactgggggggcctcagggacaggcctggaaaggccacgatggctgctgaattcaaacaaggagtccctccagcctgaataacacgtggcacaaatgggcccggcctttggcagaggagcaagtgatatgatgtgtaaagtatgttggtggtgaaagcaaggttccccaggagaggggagggactggcccctgggaagctctgagatgaggctgtggcccagctgtagtcctgaccttcctcttctttaaccctttagccctaggatggctttggtgggagaggggatagaagcccatgacttcagacagactttctcttggcagatgcaggcgggcctcctcccaggctgctccagacatgggggttggggatggggggcaccttgcagccccttcctgctggggctccctccttgtagcaccccccttgcggctcagctctggtttcctctcccaggctcacccaggctctgctcaggctgggaggcagagggcacaaaccttataattttttaaatgaaaaaccgctgctgctggctgtggctagagccccctggggctgctggagctgctgcctctgttctggaggacgagccttctccttatctgctgcccatctttccaggaagtcaggatggagtcagaacaactacagtcatcccccgtggtgtctgcacatcactccagccccataaagagtgtcatgttagctgagtcaccatttggcttcggcctggaaatagtgtgattagaacactgatcgtgtgcgaggccaggagatcaagaccatcctgactaacaaacacagtgaaaccccgtctctactaaaaatacaaaaaaattagccaggcgtggtggtgggcgcctgtagtcccagctacttgggaggctgaggcaggagaatggtgtgaacccgggagatggcgcttgcagtgagctgagattgcactccagcctgggcgacaggctcaaaaaagaaaaaaaaaagaacaccgatcatgtgcttcttggatctggtgactgttctctccctgttttcctttctttttgggtgtttgaggagcatggcttagcttgagacacacacagacactgtgtacttcagtgaagggcttaatatacagtttccaaacctgacgactcttcttcttgtaatggctgcccttttcctacctgaggccgtcttagagaaaggggccagtctcctctaatgctcagatttcccatagttggcttttgctgtgtctcctgcctcaggcagtgtcatttctgggagcaggtggttgtagtccaggcccctccccagcagggtctgcccaggctccttcgagcccctttccccgcctcctctcagcctgtccggatgacagtgttcgcctcctgtttagactgtacactcttcaggggtaggggtgccgtcagttcttcaatcagctggcacacacttgtatagtgaaatgtttacatgtgggaaaactccgccttagacaaactaccaaagtacaatcgtgtctctctctagccggaatgctacagagagaaatggaaccttagatttgcaacaaaagtctgtaaactggtctgtttgccaaagtgaacactggatgactaaggagctgaagaaggcccccagaagcggatttgtggtgggttattttattttgcctgtggccaatcttctgtgaaatacaatgtgctgttggtgcaacagatgattcaataaatgtctacagc

SEQ ID NO: 7337 - DNA, 2984 bp, Homo sapiens
  source 1..2984: mol_type = unassigned DNA
gggggacagcacttctttcagtacattttcctgttagactcggggtattagagacccaaagatacccaaggaggagtgagagcgtccctgccttcgaggagcagacagggcaccgcgaggcgtttgcctcagcatggagggcggggccgcggcagccacccccacagcactgccttactacgtggccttctcccagctgctgggcctgaccttggtggccatgaccggcgcgtggctcgggctgtaccgaggcggcattgcctgggagagcgacctgcagttcaacgcgcaccccctctgcatggtcataggcctgatcttcctgcagggaaatgccctgctggtttaccgtgtcttcaggaacgaagctaaacgcaccaccaaggtcctgcacgggctgctgcacatctttgcgctcgtcatcgccctggttggcttggtggcggtgttcgactaccacaggaagaagggctacgctgacctgtacagcctacacagctggtgcgggatccttgtctttgtcctgtactttgtgcagtggctggtgggcttcagcttcttcctgttccccggagcttcattctccctgcggagccgctaccgcccacagcacatcttctttggtgctaccatcttcctcctttccgtgggcaccgccctgctgggcctgaaggaggcactgctgttcaacctcgggggcaagtatagcgcatttgagcccgagggtgtcctggccaacgtgctgggcctgctgctggcctgcttcggtggggcggtgctctacatcttgacccgggccgactggaagcggccttcccaggcggaagagcaggccctctccatggacttcaagacgctgacggagggagatagccccggctcccagtgatgcgcccggccggccctgggggttcgcggggtgtcttcttgcctgcccctgctgaggcgtcttcaggactgcaggctccggagagtggctctggcagcaggcgggcgcgtgggtgcagctgcatctgtttgagtgctgctttctggggtcaggtctccgcctcctctgcttctcctttctccgctgctatagaccagttcattgtgtgtggctcccgtgtctctgttgcccccttcagtgcagaaggctttgggtaggacttcgggtgttcggtcctggtcgcagagcacagatctttaaagaagcgagagaggaggccccaccctcctggcagcagatgcctggggcaaggccaggggaaactgggggggcctcagggacaggcctggaaaggccacgatggctgctgaattcaaacaaggagtccctccagcctgaataacacgtggcacaaatgggcccggcctttggcagaggagcaagtgatatgatgtgtaaagtatgttggtggtgaaagcaaggttccccaggagaggggagggactggcccctgggaagctctgagatgaggctgtggcccagctgtagtcctgaccttcctcttctttaaccctttagccctaggatggctttggtgggagaggggatagaagcccatgacttcagacagactttctcttggcagatgcaggcgggcctcctcccaggctgctccagacatgggggttggggatggggggcaccttgcagccccttcctgctggggctccctccttgtagcaccccccttgcggctcagctctggtttcctctcccaggctcacccaggctctgctcaggctgggaggcagagggcacaaaccttataattttttaaatgaaaaaccgctgctgctggctgtggctagagccccctggggctgctggagctgctgcctctgttctggaggacgagccttctccttatctgctgcccatctttccaggaagtcaggatggagtcagaacaactacagtcatcccccgtggtgtctgcacatcactccagccccataaagagtgtcatgttagctgagtcaccatttggcttcggcctggaaatagtgtgattagaacactgatcgtgtgcgaggccaggagatcaagaccatcctgactaacaaacacagtgaaaccccgtctctactaaaaatacaaaaaaattagccaggcgtggtggtgggcgcctgtagtcccagctacttgggaggctgaggcaggagaatggtgtgaacccgggagatggcgcttgcagtgagctgagattgcactccagcctgggcgacaggctcaaaaaagaaaaaaaaaagaacaccgatcatgtgcttcttggatctggtgactgttctctccctgttttcctttctttttgggtgtttgaggagcatggcttagcttgagacacacacagacactgtgtacttcagtgaagggcttaatatacagtttccaaacctgacgactcttcttcttgtaatggctgcccttttcctacctgaggccgtcttagagaaaggggccagtctcctctaatgctcagatttcccatagttggcttttgctgtgtctcctgcctcaggcagtgtcatttctgggagcaggtggttgtagtccaggcccctccccagcagggtctgcccaggctccttcgagcccctttccccgcctcctctcagcctgtccggatgacagtgttcgcctcctgtttagactgtacactcttcaggggtaggggtgccgtcagttcttcaatcagctggcacacacttgtatagtgaaatgtttacatgtgggaaaactccgccttagacaaactaccaaagtacaatcgtgtctctctctagccggaatgctacagagagaaatggaaccttagatttgcaacaaaagtctgtaaactggtctgtttgccaaagtgaacactggatgactaaggagctgaagaaggcccccagaagcggatttgtggtgggttattttattttgcctgtggccaatcttctgtgaaatacaatgtgctgttggtgcaacagatgattcaataaatgtctacagc

SEQ ID NO: 7338 - DNA, 3151 bp, Homo sapiens
  source 1..3151: mol_type = unassigned DNA
aggtgagccctgactgcgcagggagggacagcgcggggctcccgagtagcagccggcctcgcacctgccccttgcggccgcgcactggactgcggcgccgacccgcaccctgggcccgagggctgcagggctcgcccgccctctcggagccgagcctctcccggtccaggcggcccctgccctggcctgcccgggtgccgggtctctgctgaagttagaaccgagacccccgcttgctggtgaccccgagtttggatctttgctcctgcgccgcgttctagagcaagcgtttgcctcagcatggagggcggggccgcggcagccacccccacagcactgccttactacgtggccttctcccagctgctgggcctgaccttggtggccatgaccggcgcgtggctcgggctgtaccgaggcggcattgcctgggagagcgacctgcagttcaacgcgcaccccctctgcatggtcataggcctgatcttcctgcagggaaatgccctgctggtttaccgtgtcttcaggaacgaagctaaacgcaccaccaaggtcctgcacgggctgctgcacatctttgcgctcgtcatcgccctggttggcttggtggcggtgttcgactaccacaggaagaagggctacgctgacctgtacagcctacacagctggtgcgggatccttgtctttgtcctgtactttgtgcagtggctggtgggcttcagcttcttcctgttccccggagcttcattctccctgcggagccgctaccgcccacagcacatcttctttggtgctaccatcttcctcctttccgtgggcaccgccctgctgggcctgaaggaggcactgctgttcaacctcgggggcaagtatagcgcatttgagcccgagggtgtcctggccaacgtgctgggcctgctgctggcctgcttcggtggggcggtgctctacatcttgacccgggccgactggaagcggccttcccaggcggaagagcaggccctctccatggacttcaagacgctgacggagggagatagccccggctcccagtgatgcgcccggccggccctgggggttcgcggggtgtcttcttgcctgcccctgctgaggcgtcttcaggactgcaggctccggagagtggctctggcagcaggcgggcgcgtgggtgcagctgcatctgtttgagtgctgctttctggggtcaggtctccgcctcctctgcttctcctttctccgctgctatagaccagttcattgtgtgtggctcccgtgtctctgttgcccccttcagtgcagaaggctttgggtaggacttcgggtgttcggtcctggtcgcagagcacagatctttaaagaagcgagagaggaggccccaccctcctggcagcagatgcctggggcaaggccaggggaaactgggggggcctcagggacaggcctggaaaggccacgatggctgctgaattcaaacaaggagtccctccagcctgaataacacgtggcacaaatgggcccggcctttggcagaggagcaagtgatatgatgtgtaaagtatgttggtggtgaaagcaaggttccccaggagaggggagggactggcccctgggaagctctgagatgaggctgtggcccagctgtagtcctgaccttcctcttctttaaccctttagccctaggatggctttggtgggagaggggatagaagcccatgacttcagacagactttctcttggcagatgcaggcgggcctcctcccaggctgctccagacatgggggttggggatggggggcaccttgcagccccttcctgctggggctccctccttgtagcaccccccttgcggctcagctctggtttcctctcccaggctcacccaggctctgctcaggctgggaggcagagggcacaaaccttataattttttaaatgaaaaaccgctgctgctggctgtggctagagccccctggggctgctggagctgctgcctctgttctggaggacgagccttctccttatctgctgcccatctttccaggaagtcaggatggagtcagaacaactacagtcatcccccgtggtgtctgcacatcactccagccccataaagagtgtcatgttagctgagtcaccatttggcttcggcctggaaatagtgtgattagaacactgatcgtgtgcgaggccaggagatcaagaccatcctgactaacaaacacagtgaaaccccgtctctactaaaaatacaaaaaaattagccaggcgtggtggtgggcgcctgtagtcccagctacttgggaggctgaggcaggagaatggtgtgaacccgggagatggcgcttgcagtgagctgagattgcactccagcctgggcgacaggctcaaaaaagaaaaaaaaaagaacaccgatcatgtgcttcttggatctggtgactgttctctccctgttttcctttctttttgggtgtttgaggagcatggcttagcttgagacacacacagacactgtgtacttcagtgaagggcttaatatacagtttccaaacctgacgactcttcttcttgtaatggctgcccttttcctacctgaggccgtcttagagaaaggggccagtctcctctaatgctcagatttcccatagttggcttttgctgtgtctcctgcctcaggcagtgtcatttctgggagcaggtggttgtagtccaggcccctccccagcagggtctgcccaggctccttcgagcccctttccccgcctcctctcagcctgtccggatgacagtgttcgcctcctgtttagactgtacactcttcaggggtaggggtgccgtcagttcttcaatcagctggcacacacttgtatagtgaaatgtttacatgtgggaaaactccgccttagacaaactaccaaagtacaatcgtgtctctctctagccggaatgctacagagagaaatggaaccttagatttgcaacaaaagtctgtaaactggtctgtttgccaaagtgaacactggatgactaaggagctgaagaaggcccccagaagcggatttgtggtgggttattttattttgcctgtggccaatcttctgtgaaatacaatgtgctgttggtgcaacagatgattcaataaatgtctacagc

SEQ ID NO: 7339 - DNA, 1496 bp, Homo sapiens
  source 1..1496: mol_type = unassigned DNA
acccgggcgcggcgcggggaggctgaagggacgctcgggtaggcaagcgtttgcctcagcatggagggcggggccgcggcagccacccccacagcactgccttactacgtggccttctcccagctgctgggcctgaccttggtggccatgaccggcgcgtggctcgggctgtaccgaggcggcattgcctgggagagcgacctgcagttcaacgcgcaccccctctgcatggtcataggcctgatcttcctgcagggaaatgccctgctggtttaccgtgtcttcaggaacgaagctaaacgcaccaccaaggtcctgcacgggctgctgcacatctttgcgctcgtcatcgccctggttggcttggtggcggtgttcgactaccacaggaagaagggctacgctgacctgtacagcctacacagctggtgcgggatccttgtctttgtcctgtactttgtgcaggggcaagtatagcgcatttgagcccgagggtgtcctggccaacgtgctgggcctgctgctggcctgcttcggtggggcggtgctctacatcttgacccgggccgactggaagcggccttcccaggcggaagagcaggccctctccatggacttcaagacgctgacggagggagatagccccggctcccagtgatgcgcccggccggccctgggggttcgcggggtgtcttcttgcctgcccctgctgaggcgtcttcaggactgcaggctccggagagtggctctggcagcaggcgggcgcgtgggtgcagctgcatctgtttgagtgctgctttctggggtcaggtctccgcctcctctgcttctcctttctccgctgctatagaccagttcattgtgtgtggctcccgtgtctctgttgcccccttcagtgcagaaggctttgggtaggacttcgggtgttcggtcctggtcgcagagcacagatctttaaagaagcgagagaggaggccccaccctcctggcagcagatgcctggggcaaggccaggggaaactgggggggcctcagggacaggcctggaaaggccacgatggctgctgaattcaaacaaggagtccctccagcctgaataacacgtggcacaaatgggcccggcctttggcagaggagcaagtgatatgatgtgtaaagtatgttggtggtgaaagcaaggttccccaggagaggggagggactggcccctgggaagctctgagatgaggctgtggcccagctgtagtcctgaccttcctcttctttaaccctttagccctaggatggctttggtgggagaggggatagaagcccatgacttcagacagactttctcttggcagatgcaggcgggcctcctcccaggctgctccagacatgggggttggggatggggggcaccttgcagccccttcctgctggggctccctccttgtagcaccccccttgcggctcagctctggtttcctctcccaggctcacccaggctctgctca

SEQ ID NO: 7340 - DNA, 1302 bp, Homo sapiens
  source 1..1302: mol_type = unassigned DNA
gaccagccccttccttcccgtcaaggagcgcgcttgcctgtgtaactcacctgtaaagcccacccagggaaggccagggcctcatgaaacagaaaacaaagccgggcactgggcccttgagctcactagaatttggggtatctttccttgcaccctcaccgcatatggaactcctggcgtcgtgtcccaggtcacgcctgtccccgtggggaggctgggcccctccccccagccactcccgagacttgagacctctgcctcaggacgatggcgtttgcctcagcatggagggcggggccgcggcagccacccccacagcactgccttactacgtggccttctcccagctgctgggcctgaccttggtggccatgaccggcgcgtggctcgggctgtaccgaggcggcattgcctgggagagcgacctgcagttcaacgcgcaccccctctgcatggtcataggcctgatcttcctgcagggaaatgccctgctggtttaccgtgtcttcaggaacgaagctaaacgcaccaccaaggtcctgcacgggctgctgcacatctttgcgctcgtcatcgccctggttggcttggtggcggtgttcgactaccacaggaagaagggctacgctgacctgtacagcctacacagctggtgcgggatccttgtctttgtcctgtactttgtgcagtggctggtgggcttcagcttcttcctgttccccggagcttcattctccctgcggagccgctaccgcccacagcacatcttctttggtgctaccatcttcctcctttccgtgggcaccgccctgctgggcctgaaggaggcactgctgttcaacctcgggggcaagtatagcgcatttgagcccgagggtgtcctggccaacgtgctgggcctgctgctggcctgcttcggtggggcggtgctctacatcttgacccgggccgactggaagcggccttcccaggcggaagagcaggccctctccatggacttcaagacgctgacggagggagatagccccggctcccagtgatgcgcccggccggccctgggggttcgcggggtgtcttcttgcctgcccctgctgaggcgtcttcaggactgcaggctccggagagtggctctggcagcaggcgggcgcgtgggtgcagctgcatctgtttgagtgctgctttctggggtcaggtctccgcctcctctgcttctcctttctccgctgctatagaccagttcattgtgtgtggctcccgtgtctctgttgcccccttcagtgcagaaggctttgggtaggactt

SEQ ID NO: 7341 - DNA, 1225 bp, Homo sapiens
  source 1..1225: mol_type = unassigned DNA
ggaagtcctgggtgggtagacgtcgcacccggaagtaaagcggctccgtgacggagcggcggtgcgcgcggcagggcccggagtatcccgctttctttggaggaaaccaccgcatcagatctgcgctgcggcagaggcagccttttctccagtgaggagtgaacagtgggcacctgagatcctggcccacgctactatgctttcaggctacaaccactagcacggctgacgatggccctttctgcggagaccgagtcacacatctaccgagctctgcgtactgcttctggcgctgccgcccaccttgtggccctgggctttaccatctttgtggctgtgcttgccaggcctggctccagcctgttctcctggcacccggtgcttatgtctttggctttctccttcctgatgaccgaggcactactggtgttttctcctgagagttcgctgctgcactccctctcacggaaaggccgagcacgctgccactgggtgctgcagctgctggccctgctgtgtgcactgctgggcctcggccttgtcatcctccacaaagagcagcttggcaaagcccacctggttacgcggcatgggcaggcagggctgctggctgtgctgtgggcagggctgcagtgctcaggtggggtggggctgctctaccccaagctgctgccccgatggcccctggcgaagctcaagctataccatgctacttctgggctggtgggctacctgctgggtagtgccagcctcttgctgggcatgtgctcactctggttcactgcctctgtcactggtgcagcctggtacctggctgtattatgccctgtcctcaccagcttggtcattatgaaccaggtgagcaatgcctacctataccgcaagaggatccaaccatgagctcttcccagcctaggggaagcctggatttgcccctccatgtaggagctgggcctagggacctgttgaactctctcagctgagtcaggggacacctcaggcactgggacagttgggcatttggaggcccgtgtgtgaattcctgctcctcatgctggagtgcctcccatttccttcccctttctctgtcatcccagaggaacataggcatcatgtgtctggatgaagctggggctgcaagactgcctctcctgcaaggcagctcatacttgtactgtatgttcagaaattttaggagagaaaaaagtaaaaaatttgtaaaaaa

SEQ ID NO: 7342 - DNA, 1533 bp, Homo sapiens
  source 1..1533: mol_type = unassigned DNA
gggtagacgtcgcacccggaagtaaagcggctccgtgacggagcggcggtgcgcgcggcagggcccggagtatcccgctttctttggaggaaaccaccgcatcagatctgcgctgcggcagaggcaggcaagtccctagcgtggaggggcagcatgctggcagcacttggggaggcggtgcgctaagggattcacgctgtaactgggaccgcagcagggaactacaatttccatagtgctccgcgccctcccagctggctctactgccggcgacggcgtggtacacgctgggatttgtagtcttacatggctttgcgcctcctacctggaaggcgggccagcgattggtaccagttcagacatgggtacacgttgacaggccgccggccgtcgactggcatgttgtgaccattcctggtgctggtcttggtactgttctttcctaccataacttattggaagagggtggcattcctgccttgcagccttttctccagtgaggagtgaacagtgggcacctgagatcctggcccacgctactatgctttcaggctacaaccactagcacggctgacgatggccctttctgcggagaccgagtcacacatctaccgagctctgcgtactgcttctggcgctgccgcccaccttgtggccctgggctttaccatctttgtggctgtgcttgccaggcctggctccagcctgttctcctggcacccggtgcttatgtctttggctttctccttcctgatgaccgaggcactactggtgttttctcctgagagttcgctgctgcactccctctcacggaaaggccgagcacgctgccactgggtgctgcagctgctggccctgctgtgtgcactgctgggcctcggccttgtcatcctccacaaagagcagcttggcaaagcccacctggttacgcggcatgggcaggcagggctgctggctgtgctgtgggcagggctgcagtgctcaggtggggtggggctgctctaccccaagctgctgccccgatggcccctggcgaagctcaagctataccatgctacttctgggctggtgggctacctgctgggtagtgccagcctcttgctgggcatgtgctcactctggttcactgcctctgtcactggtgcagcctggtacctggctgtattatgccctgtcctcaccagcttggtcattatgaaccaggtgagcaatgcctacctataccgcaagaggatccaaccatgagctcttcccagcctaggggaagcctggatttgcccctccatgtaggagctgggcctagggacctgttgaactctctcagctgagtcaggggacacctcaggcactgggacagttgggcatttggaggcccgtgtgtgaattcctgctcctcatgctggagtgcctcccatttccttcccctttctctgtcatcccagaggaacataggcatcatgtgtctggatgaagctggggctgcaagactgcctctcctgcaaggcagctcatacttgtactgtatgttcagaa

SEQ ID NO: 7343 - DNA, 1212 bp, Homo sapiens
  source 1..1212: mol_type = unassigned DNA
ggaagtcctgggtgggtagacgtcgcacccggaagtaaagcggctccgtgacggagcggcggtgcgcgcggcagggcccggagtatcccgctttctttggaggaaaccaccgcatcagatctgcgctgcggcagaggcaggcaaccttttctccagtgaggagtgaacagtgggcacctgagatcctggcccacgctactatgctttcaggctacaaccactagcacggctgacgatggccctttctgcggagaccgagtcacacatctaccgagctctgcgtactgcttctggcgctgccgcccaccttgtggccctgggctttaccatctttgtggctgtgcttgccaggcctggctccagcctgttctcctggcacccggtgcttatgtctttggctttctccttcctgatgaccgaggcactactggtgttttctcctgagagttcgctgctgcactccctctcacggaaaggccgagcacgctgccactgggtgctgcagctgctggccctgctgtgtgcactgctgggcctcggccttgtcatcctccacaaagagcagcttggcaaagcccacctggttacgcggcatgggcaggcagggctgctggctgtgctgtgggcagggctgcagtgctcaggtggggtggggctgctctaccccaagctgctgccccgatggcccctggcgaagctcaagctataccatgctacttctgggctggtgggctacctgctgggtagtgccagcctcttgctgggcatgtgctcactctggttcactgcctctgtcactggtgcagcctggtacctggctgtattatgccctgtcctcaccagcttggtcattatgaaccaggtgagcaatgcctacctataccgcaagaggatccaaccatgagctcttcccagcctaggggaagcctggatttgcccctccatgtaggagctgggcctagggacctgttgaactctctcagctgagtcaggggacacctcaggcactgggacagttgggcatttggaggcccgtgtgtgaattcctgctcctcatgctggagtgcctcccatttccttcccctttctctgtcatcccagaggaacataggcatcatgtgtctggatgaagctggggctgcaagactgcctctcctgcaaggcagctcatacttgtactgtatgttcagaaattttaggagagaaaaaagt

SEQ ID NO: 7344 - DNA, 1309 bp, Homo sapiens
  source 1..1309: mol_type = unassigned DNA
cagaggcgtccccacctcctgtgaacacttgtcagagacagcctcgaggcctgtgtcgctggggcacgcaagcttgccaatccctctgcccaatggcgcctgcgcagcgcgactcagaggcgtggctggggcgggggacggctcgtcccaggaagtcctgggtgggtagacgtcgcacccggaagtaaagcggctccgtgacggagcggcggtgcgcgcggcagggcccggagtatcccgctttctttggaggaaaccaccgcatcagatctgcgctgcggcagaggcaggctacaaccactagcacggctgacgatggccctttctgcggagaccgagtcacacatctaccgagctctgcgtactgcttctggcgctgccgcccaccttgtggccctgggctttaccatctttgtggctgtgcttgccaggcctggctccagcctgttctcctggcacccggtgcttatgtctttggctttctccttcctgatgaccgaggcactactggtgttttctcctgagagttcgctgctgcactccctctcacggaaaggccgagcacgctgccactgggtgctgcagctgctggccctgctgtgtgcactgctgggcctcggccttgtcatcctccacaaagagcagcttggcaaagcccacctggttacgcggcatgggcaggcagggctgctggctgtgctgtgggcagggctgcagtgctcaggtggggtggggctgctctaccccaagctgctgccccgatggcccctggcgaagctcaagctataccatgctacttctgggctggtgggctacctgctgggtagtgccagcctcttgctgggcatgtgctcactctggttcactgcctctgtcactggtgcagcctggtacctggctgtattatgccctgtcctcaccagcttggtcattatgaaccaggtgagcaatgcctacctataccgcaagaggatccaaccatgagctcttcccagcctaggggaagcctggatttgcccctccatgtaggagctgggcctagggacctgttgaactctctcagctgagtcaggggacacctcaggcactgggacagttgggcatttggaggcccgtgtgtgaattcctgctcctcatgctggagtgcctcccatttccttcccctttctctgtcatcccagaggaacataggcatcatgtgtctggatgaagctggggctgcaagactgcctctcctgcaaggcagctcatacttgtactgtatgttcagaaattttaggagagaaaaaagtaaaaaatttgtaaaaaa

SEQ ID NO: 7345 - DNA, 1054 bp, Homo sapiens
  source 1..1054: mol_type = unassigned DNA
agagggttatgggagggctctggcgtcctggatggaggtgcgttcctttctgtggctggcgctggatccaccctgggtctccaaccagggctgcagagagggtagagccgtttcttaggccagagtggagtgggacaggaggtgccgagagaggactgaggtggcttgggacatggaagcgctgcagccttcgagcccggcatccagcattgcagccgccgcggcggcctaagagctcgaaccctttcacacgcgcgcaggaggaggagcggcggcggcagaacaagacgaccctcacttacgtggccgctgtcgccgtgggcatgctgggggcgtcctacgctgccgtacccctttatcggctctattgccagactactggacttggaggatcagcagttgcaggtcatgcctcagacaagattgaaaacatggtgcctgttaaagatcgaatcattaaaattagctttaatgcagatgtgcatgcaagtctccagtggaactttagacctcagcaaacagaaatatatgtggtgccaggagagactgcactggcgttttacagagctaagaatcctactgacaaaccagtaattggaatttctacatacaatattgttccatttgaagctggacagtatttcaataaaatacaggcttcaaagctgcacagagtctacgttttagagagttggcacctttgatgtggtagtgagctgatcatccactttcttctaaaataaagagaagaaaatggccagtattcatcctgtccttctctttccccattccttgataactctcttgtctttactgggaagctggagagtcacagtctagtagaagaaagattagaaaaatttcaactgtaggtgcctttgcaacctatcctgggagaccctaaaacatatttagttttagtgcctagagattttcactcctctaacatctctggatacagtgtccctggtcaacatgaagaagttacagaagaacgctttctgatcctggcccctaaagaatttacttgtgctaagtaataaaattcctattg

SEQ ID NO: 7346 - DNA, 708 bp, Homo sapiens
  source 1..708: mol_type = unassigned DNA
gcggccttgctctcttccggtcgcgggacaccgggtgtagagggcggtcgcggcgggcagtggcggcagaatgttggctaccagggtatttagcctagttggcaagcgagcaatttccacctctgtgtgtgtacgagctcatgaaagtgttgtgaagagcgaagacttttcgctcccagcttatatggatcggcgtgaccaccccttgccggaggtggcccatgtcaagcacctgtctgccagccagaaggcattgaaggagaaggagaaggcctcctggagcagcctctccatggatgagaaagtcgagttgtatcgcattaagttcaaggagagctttgctgagatgaacaggggctcgaacgagtggaagacggttgtgggcggtgccatgttcttcatcggtttcaccgcgctcgttatcatgtggcagaagcactatgtgtacggccccctcccgcaaagctttgacaaagagtgggtggccaagcagaccaagaggatgctggacatgaaggtgaaccccatccagggcttagcctccaagtgggactacgaaaagaacgagtggaagaagtgagagatgctggcctgcgcctgcacctgcgcctggctctgtcaccgccatgcaactccatgcctatttactggaaacctgttatgccaaacagttgtaccactgctaataaatgaccagtttacctgaaa

SEQ ID NO: 7347 - DNA, 693 bp, Homo sapiens
  source 1..693: mol_type = unassigned DNA
caggtccctccgcagcgggttctcagttgctcgctgggcagacccaggtcgcgctcccactgccgagcccgcgagatgctccccagagctgcctggagcttggtgctgaggaaaggtggaggtggaagacgagggatgcacagctcagaaggcaccacccgtggtggggggaagatgtccccctacaccaactgctatgcccagcgctactaccccatgccagaagagcccttctgcacagaactcaacgctgaggagcaggccctgaaggagaaggagaagggaagctggacccagctgacccacgccgaaaaggtggccttgtaccggctccagttcaatgagacctttgcggagatgaaccgtcgctccaatgagtggaagacagtgatgggttgtgtcttcttcttcattggattcgcagctctggtgatttggtggcagcgggtctacgtatttcctccaaagccgatcaccttgacggacgagcggaaagcccagcagctgcagcgcatgctggacatgaaggtgaatcctgtgcagggcctggcctcccgctgggactatgagaagaagcagtggaagaagtgacttgcatccccagctgtctccctgaggctccgccctggctgggagcctctggcggcccctcccctcccctgcccttaaccccagtaaagctccaaaaaaaaa

SEQ ID NO: 7348 - DNA, 712 bp, Homo sapiens
  source 1..712: mol_type = unassigned DNA
gtctctgcagcttgttcccggaagttttgctgctagtcgcggacgcaatggcttcaaggttacttcgcggagctggaacgctggccgcgcaggccctgagggctcgcggccccagtggcgcggccgcgatgcgctccatggcatctggaggtggtgttcccactgatgaagagcaggcgactgggttggagagggagatcatgctggctgcaaagaagggactggacccatacaatgtactggccccaaagggagcttcaggcaccagggaagaccctaatttagtcccctccatctccaacaagagaatagtaggctgcatctgtgaagaggacaataccagcgtcgtctggttttggctgcacaaaggcgaggcccagcgatgcccccgctgtggagcccattacaagctggtgccccagcagctggcacactgagcacctgcactaaattactcaaaatgtgctgtaaagtttcttctttccagtaaagactagccattgcattggctccttctcccatagatggctggtcttatttcttacccgtattctttggtaggcatggaatatgcttattttgggaaaagctgtctgttaatgctagcttgccatccacttactgaaagtgtataaccagtgtatagtgcttagattaataataagaatagatcgacaacccgtaatgcaatgaatgggaccacctggtatga

SEQ ID NO: 7349 - DNA, 572 bp, Homo sapiens
  source 1..572: mol_type = unassigned DNA
acttccgcttccggcgctgcggcagtccagatcaaaaatggcggtagttggtgtgtcctcggtttctcggctgctgggtcggtcccgcccacagctggggcggcctatgtcgagtggcgcccatggcgaagagggctcagctcgcatgtggaagactctcaccttcttcgtcgcgctccccggggtggcagtcagcatgctgaatgtgtacctgaagtcgcaccacggagagcacgagagacccgagttcatcgcctacccccatctccgcatcaggaccaagccgtttccctggggagatggtaaccatactctattccataaccctcatgtgaatccacttccaactggctacgaagatgaataaagagaatctggaccactacccgggcaccagggaccacagcactggtttggaccgttactctgcacatggaccagaaaaagtatatgggaccttaagctcaccttctttacttgtatcaaatgatgactggtatactggtctcccatccctttgcttgtggcaggagatggcttaaataaataacttaaatttagattggtcatga

SEQ ID NO: 7350 - DNA, 590 bp, Homo sapiens
  source 1..590: mol_type = unassigned DNA
tgggcgtggcttgaatgacttcagtggcctcctcctgggagggagctgaagccgctcgcaagactcccgtagtccccacctctctcagcttccggctggtagtagttccgcttcctgtccgactgtggtgtctttgctgagggtcacattgagctgcaggttgaatccggggtgcctttaggattcagcaccatggcggaagacatggagaccaaaatcaagaactacaagaccgccccttttgacagccgcttccccaaccagaaccagactagaaactgctggcagaactacctggacttccaccgctgtcagaaggcaatgaccgctaaaggaggcgatatctctgtgtgcgaatggtaccagcgtgtgtaccagtccctctgccccacatcctgggtcacagactgggatgagcaacgggctgaaggcacgtttcccgggaagatctgaactggctgcatctccctttcctctgtcctccatccttctcccaggatggtgaagggggacctggtacccagtgatccccaccccaggatcctaaatcatgacttacctgctaataaaaactcattggaaaagtgaga

SEQ ID NO: 7351 - DNA, 435 bp, Homo sapiens
  source 1..435: mol_type = unassigned DNA
catcctcccttttggacgttggaggggccgcagcgtcatctccgatgcaccctcatcctcagataccgggtagagatctcgccggattcagcaccatggcggaagacatggagaccaaaatcaagaactacaagaccgccccttttgacagccgcttccccaaccagaaccagactagaaactgctggcagaactacctggacttccaccgctgtcagaaggcaatgaccgctaaaggaggcgatatctctgtgtgcgaatggtaccagcgtgtgtaccagtccctctgccccacatcctgggtcacagactgggatgagcaacgggctgaaggcacgtttcccgggaagatctgaactggctgcatctccctttcctctgtcctccatccttctcccaggatggtgaagggggacctggtacccagtgatcccc

SEQ ID NO: 7352 - DNA, 433 bp, Homo sapiens
  source 1..433: mol_type = unassigned DNA
agcacggttcgtttttcctttagtcaggaaggacgttggtgttgagcatacgtatcaaggacagtaactaccatggctcccgaagttttgccaaaacctcggatgcgtggccttctggccaggcgtctgcgaaatcatatggctgtagcattcgtgctatccctgggggttgcagctttgtataagtttcgtgtggctgatcaaagaaagaaggcatacgcagatttctacagaaactacgatgtcatgaaagattttgaggagatgaggaaggctggtatctttcagagtgtaaagtaatcttggaatataaagaatttcttcaggttgaattacctagaagtttgtcactgacttgtgttcctgaactatgacacatgaatatgtgggctaagaaatagttcctcttgataaataaacaattaacaaatac

SEQ ID NO: 7353 - DNA, 428 bp, Homo sapiens
  source 1..428: mol_type = unassigned DNA
acggttcgtttttcctttagtcaggaaggacgttggtgttagcatacgtatcaaggacagtaactaccatggctcccgaagttttgccaaaacctcggatgcgtggccttctggccaggcgtctgcgaaatcatatggctgtagcattcgtgctatccctgggggttgcagctttgtataagtttcgtgtggctgatcaaagaaagaaggcatacgcagatttctacagaaactacgatgtcatgaaagattttgaggagatgaggaaggctggtatctttcagagtgtaaagtaatcttggaatataaagaatttcttcaggttgaattacctagaagtttgtcactgacttgtgttcctgaactatgacacatgaatatgtgggctaagaaatagttcctcttgataaataaacaattaacaaata

SEQ ID NO: 7354 - DNA, 724 bp, Homo sapiens
  source 1..724: mol_type = unassigned DNA
tgcgcgcggctacagcacggttcgtttttcctttagtcaggaaggacgttggtgttgaggttagcatacgtatcaaggacagtaactaccatggctcccgaagttttgccaaaacctcggatgcgtggccttctggccaggcgtctgcgaaatcatatggctgtagcattcgtgctatccctgggggttgcagctttgtataagtttcgtgtggctgatcaaagaaagaaggcatacgcagatttctacagaaactacgatgtcatgaaagattttgaggagatgaggaaggctggtatctttcagagtgtaaagtaatcttggaatataaagggtctccctctgtcacccaggccgtagtgctgtagtgcgatcatggctcactgcagcctcaacctcccaggctcaagggatcttcctgcctcagcctcccaagaagctggcactataggcatgtgccaccacacctggctaacttctttatttttagtagagacagggtttcaccatattacctgggctgtgcttgaattcctgggctcaggcgatccgtccaccttggcctcccaaagtgttgggattacaggcgtgagccactgtgcctggcataattttggtattttttgatagtagccatcctaataggtatgaggtggtatcattgtggttttgatttgcatttccctgattatttgtgttcttgagcatcttttcatgtacttat

SEQ ID NO: 7355 - DNA, 571 bp, Homo sapiens
  source 1..571: mol_type = unassigned DNA
ttgcatccctaccccgacactgcgggttgtcacaacggcaccctcccgctttctctctgcctcggatttagtcgtgactgtgtgtctccgccgtggtgcagcttcaggcctctcccgcatctactctctcacgcttccgctgcggcctgagggagggcggcgggcggaccacggaccggggttagcatacgtatcaaggacagtaactaccatggctcccgaagttttgccaaaacctcggatgcgtggccttctggccaggcgtctgcgaaatcatatggctgtagcattcgtgctatccctgggggttgcagctttgtataagtttcgtgtggctgatcaaagaaagaaggcatacgcagatttctacagaaactacgatgtcatgaaagattttgaggagatgaggaaggctggtatctttcagagtgtaaagtaatcttggaatataaagaatttcttcaggttgaattacctagaagtttgtcactgacttgtgttcctgaactatgacacatgaatatgtgggctaagaaatagttcctcttgataaataaacaattaacaaata

SEQ ID NO: 7356 - DNA, 828 bp, Homo sapiens
  source 1..828: mol_type = unassigned DNA
actgcatgggatcggtattaatctgtttgtctttttcatcttctgggctgtgagctcctagaagtcagctttttcacttttacccaagccaaacggttattcgcgtaaggttggttataattaaaatgtcggtttgtgcacatggtttgggactctgtgtatgagtacgactaatatcttcaatttactaagaagataaagaggtcgataaataaggaggtcaagcccgttttgcaaggtcacacaggaaagaagcagaccacgaaatgaacttcggctgtcacctgcggtgggcgcactagaggtcttttgaactccttcggctaccgtcgccgcgttctcgctgtgcactcttattctgcgcctgcgcgcggctacagcacggttcgtttttcctttagtcaggaaggacgttggtgttgaggttagcatacgtatcaaggacagtaactaccatggctcccgaagttttgccaaaacctcggatgcgtggccttctggccaggcgtctgcgaaatcatatggctgtagcattcgtgctatccctgggggttgcagctttgtataagtttcgtgtggctgatcaaagaaagaaggcatacgcagatttctacagaaactacgatgtcatgaaagattttgaggagatgaggaaggctggtatctttcagagtgtaaagtaatcttggaatataaagaatttcttcaggttgaattacctagaagtttgtcactgacttgtgttcctgaactatgacacatgaatatgtgggctaagaaatagttcctcttgataaataaacaattaacaaatactttggacagtaa

SEQ ID NO: 7357 - DNA, 566 bp, Homo sapiens
  source 1..566: mol_type = unassigned DNA
attctgcgcctgcgcgcggctacagcacggttcgtttttcctttagtcaggaaggacgttggtgttgaggttagcatacgtatcaaggacagtaactaccatggctcccgaagttttgccaaaacctcggatgcgtggccttctggccaggcgtctgcgaaatcatatggctgtagcattcgtgctatccctgggggttgcagctttgtataagtttcgtgtggctgatcaaagaaagaaggcatacgcagatttctacagaaactacgatgtcatgaaagattttgaggagatgaggaaggctggtatctttcagagtgtaaagtaatcttggaatataaagaatttcttcaggttgaattacctagaagtttgtcactgacttgtgttcctgaactatgacacatgaatatgtgggctaagaaatagttcctcttgataaataaacaattaacaaatactttggacaccagcccaagaaaaaaggagaaaaatctttcctccacataaatcatctattcaacattaaactcagcactgaaataaaagctctgtttgcctagctc

SEQ ID NO: 7358 - DNA, 562 bp, Homo sapiens
  source 1..562: mol_type = unassigned DNA
ttctgcgcctgcgcgcggctacagcacggttcgtttttcctttagtcaggaaggacgttggtgttgaggttagcatacgtatcaaggacagtaactaccatggctcccgaagttttgccaaaacctcggatgcgtggccttctggccaggcgtctgcgaaatcatatggctgtagcattcgtgctatccctgggggttgcagctttgtataagtttcgtgtggctgatcaaagaaagaaggcatacgcagatttctacagaaactacgatgtcatgaaagattttgaggagatgaggaaggctggtatctttcagagtgtaaagtaatcttggaatataaagaatttcttcaggttgaattacctagaagtttgtcactgacttgtgttcctgaactatgacacatgaatatgtgggctaagaaatagttcctcttgataaataaacaattaacaaatactttggacactatgatgattctccacagtacctgcctcaaacaaaaatacaagagaaggatcacagttgaagacagttcaacagcaaaagaaatctgcagtct

SEQ ID NO: 7359 - DNA, 694 bp, Homo sapiens
  source 1..694: mol_type = unassigned DNA
tttgcatccctaccccgacactgcgggttgtcacaacggcaccctcccgctttctctctgcctcggatttagtcgtgactgtgtgtctccgccgtggtgcagcttcaggcctctcccgcatctactctctcacgcttccgctgcggcctgagggagggcggcgggcggaccacggaccggggtgggttgcgacggccccaccgaagccgggtgggctgcgggaccctcgagaacccagctggcttcggagtgagctggcccggggctggtacccgctgcgctttttcacagccattgtgaccttggttagcatacgtatcaaggacagtaactaccatggctcccgaagttttgccaaaacctcggatgcgtggccttctggccaggcgtctgcgaaatcatatggctgtagcattcgtgctatccctgggggttgcagctttgtataagtttcgtgtggctgatcaaagaaagaaggcatacgcagatttctacagaaactacgatgtcatgaaagattttgaggagatgaggaaggctggtatctttcagagtgtaaagtaatcttggaatataaagaatttcttcaggttgaattacctagaagtttgtcactgacttgtgttcctgaactatgacacatgaatatgtgggctaagaaatagttcctcttgataaataaacaattaacaaa

SEQ ID NO: 7360 - DNA, 745 bp, Homo sapiens
  source 1..745: mol_type = unassigned DNA
cggttcgtttttcctttagtcaggaaggacgttggtgttgaggttagcatacgtatcaaggacagtaactaccatggctcccgaagttttgccaaaacctcggatgcgtggccttctggccaggcgtctgcgaaatcatatggctgtagcattcgtgctatccctgggggttgcagctttgtataagtttcgtgtggctgatcaaagaaagaaggcatacgcagatttctacagaaactacgatgtcatgaaagattttgaggagatgaggaaggctggtatctttcagagtgtaaagtaatcttggaatataaaggtaatatggttatttgaagttacttaaaaaaaaatttctaattgtggtaaaatgcaaatacaggtgactgtccctcacaatgtttagacttaagattttttgactttacgatggtgtggaagtgatacacatttggtagaaaccatactttgaattttgatctttgtccacatgagcaataagtggcacaatacttttgtgatgtgggggagcaccaatgaccacatcccccagtcagaaacataatcacaagggtaaacagctgatgctgtactctgtagtgttgtgtgagatactcagtgttttattataagctaggctttgtgttagatgattttcttcagctgtaggctaacataagtgttctgagcacatttaaggtagggaaggctaagctatgatgtaagttaggtgtattaaatgcatttt

SEQ ID NO: 7361 - DNA, 513 bp, Homo sapiens
  source 1..513: mol_type = unassigned DNA
gcaggaggggaaggatgggcttcctgcaacctcccttgccccacggcttcccatcctacccccggccgcgttagctgaaggccagcagggacgcaaaagtttttaggccccttaggtctttaggttagcatacgtatcaaggacagtaactaccatggctcccgaagttttgccaaaacctcggatgcgtggccttctggccaggcgtctgcgaaatcatatggctgtagcattcgtgctatccctgggggttgcagctttgtataagtttcgtgtggctgatcaaagaaagaaggcatacgcagatttctacagaaactacgatgtcatgaaagattttgaggagatgaggaaggctggtatctttcagagtgtaaagtaatcttggaatataaagaatttcttcaggttgaattacctagaagtttgtcactgacttgtgttcctgaactatgacacatgaatatgtgggctaagaaatagttcctcttgataaataaacaattaacaaat

SEQ ID NO: 7362 - DNA, 762 bp, Homo sapiens
  source 1..762: mol_type = unassigned DNA
gttacagatacggaaacaggctcggaggtgcaatctctggctgtgtagacagaacagggagttggaacacggccttatgcgtttcctcactctcacataccagcgggcagggagagatccggggaggagttgcacttgcccccggcggaaatctccaaaaatctgcaaaaatgtattccctggtaccgctttgggctccggtgggaccaagcgaaattccgagaccgaaacggatgcgcgctgcggcccagggtgcgggtctggaccgcctcctccgtggtggacgaatccgaggagcaggactccccgcaacccagccccagccccagccccagccccgccgcgtccccagctgtcacgctgcgcgcagcgggtggggcctggggttcctggacagaggaggactacgcgtgtccttgggcggagaagggaggtgactccggcggaagaggacaaggcagaatgcaggcccttcgggtgtcccaggcgctgatccgctccttcagctccaccgcccggaaccgctttcagaaccgagtgcgcgagaaacagaagctcttccaggaggacaatgacatcccgttgtacctgaagggcggcatcgttgacaacatcctgtaccgagtgacaatgacgctgtgtctgggcggcactgtctacagcttgtactcccttggctgggcctccttccccaggaattaagaccaagaagcctggggggcctgagagacttgaacaagtgtcaataaacgctggcctctg

SEQ ID NO: 7363 - DNA, 389 bp, Homo sapiens
  source 1..389: mol_type = unassigned DNA
agtccttctgggtcctctcccttccaggaccctctaggcagcccggtcacccccaggccagactccagggcgagtcccctcccaacccagctggcagttcgcgggtgtcccaggcgctgatccgctccttcagctccaccgcccggaaccgctttcagaaccgagtgcgcgagaaacagaagctcttccaggaggacaatgacatcccgttgtacctgaagggcggcatcgttgacaacatcctgtaccgagtgacaatgacgctgtgtctgggcggcactgtctacagcttgtactcccttggctgggcctccttccccaggaattaagaccaagaagcctggggggcctgagagacttgaacaagtgtcaataaacgctggcctctg

SEQ ID NO: 7364 - DNA, 699 bp, Homo sapiens
  source 1..699: mol_type = unassigned DNA
agagcggatagagccgtactgccgctctagtttttcttttgctctctatggttaggagcgcaagcctctcttcggcccggaaagatttaagttcgtgaatgcatacgcaagactcggaggtagttccggttccggcgtggccattttcgttggtggtgttcagttgtggcggttgctggtcagtaacagccaagatgctgcggaatctgctggctcttcgtcagattgggcagaggacgataagcactgcttcccgcaggcattttaaaaataaagttccggagaagcaaaaactgttccaggaggatgatgaaattccactgtatctaaagggtggggtagctgatgccctcctgtatagagccaccatgattcttacagttggtggaacagcatatgccatatatgagctggctgtggcttcatttcccaagaagcaggagtgacttcagtcatcccagcaatcgcttggttcagtttcattcagctctctatggaccagtaatctgataaataaccgagctcttctttggggatcaatatttattgacttgtagtaactgccaccaataaagcagtctttaccatgctttgtctgattttatcactttatgccaataatttcaacttttggtcagccttgtaaatcttaggtaaggatcaaagaaatgattcttttgccactaaacttgtgaaagc

SEQ ID NO: 7365 - DNA, 914 bp, Homo sapiens
  source 1..914: mol_type = unassigned DNA
aagtaccttattattccattgtcttaacactgactgacttctctatcttttcttgtgccttgacatctgtcttgagctctagatttttcattattaatctcttgagaaatgaaggttaataatgaattaacctaagttagtaaggcccaagcagcaatcattccacacaagcctgggtttaataaggtcaaaacaggaataatctcacaccaacctgagatttcttacattcctcattactgtgaatggtatagccaaccaccttgaggagcgcaagcctctcttcggcccggaaagatttaagttcgtgaatgcatacgcaagactcggaggtagttccggttccggcgtggccattttcgttggtggtgttcagttgtggcggttgctggtcagtaacagccaagatgctgcggaatctgctggctcttcgtcagattgggcagaggacgataagcactgcttcccgcaggcattttaaaaataaagttccggagaagcaaaaactgttccaggaggatgatgaaattccactgtatctaaagggtggggtagctgatgccctcctgtatagagccaccatgattcttacagttggtggaacagcatatgccatatatgagctggctgtggcttcatttcccaagaagcaggagtgacttcagtcatcccagcaatcgcttggttcagtttcattcagctctctatggaccagtaatctgataaataaccgagctcttctttggggatcaatatttattgacttgtagtaactgccaccaataaagcagtctttaccatgctttgtctgattttatcactttatgccaataatttcaacttttggtcagccttgtaaatcttaggtaaggatcaaagaaatgattcttttgccactaaacttgtgaaagcaa

SEQ ID NO: 7366 - DNA, 773 bp, Homo sapiens
  source 1..773: mol_type = unassigned DNA
cagccttagctccagggaccagcctactgaacatcgaaaaggtcaggaacgagatcacgggactgagacggcgagccggctagagcggatagagccgtactgccgctctagtttttcttttgctctctatggttaggagcgcaagcctctcttcggcccggaaagatttaagttcgtgaatgcatacgcaagactcggaggtagttccggttccggcgtggccattttcgttggtggtgttcagttgtggcggttgctggtcagtaacagccaagatgctgcggaatctgctggctcttcgtcagattgggcagaggacgataagcactgcttcccgcaggcattttaaaaataaagttccggagaagcaaaaactgttccaggaggatgatgaaattccactgtatctaaagggtggggtagctgatgccctcctgtatagagccaccatgattcttacagttggtggaacagcatatgccatatatgagctggctgtggcttcatttcccaagaagcaggagtgacttcagtcatcccagcaatcgcttggttcagtttcattcagctctctatggaccagtaatctgataaataaccgagctcttctttggggatcaatatttattgacttgtagtaactgccaccaataaagcagtctttaccatgctttgtctgattttatcactttatgccaataatttcaacttttggtcagccttgtaaatcttaggtaaggatcaaagaaatgattcttttgccactaaacttg

SEQ ID NO: 7367 - DNA, 1112 bp, Homo sapiens
  source 1..1112: mol_type = unassigned DNA
cttctctggggcggtcgcgttggcagcggatgcgggaagccggactctgggcgtcatgtactacaagtttagtggcttcacgcagaagttggcaggagcatgggcttcggaggcctatagcccgcagggattaaagcctgtggtttccacagaagcaccacctatcatatttgccacaccaactaaactgacctccgattccacagtgtatgattatgctgggaaaaacaaagttccagagctacaaaagtttttccagaaagctgatggtgtgcccgtctacctgaaacgaggcctgcctgaccaaatgctttaccggaccaccatggcgctgactgtgggagggaccatctactgcctgatcgccctctacatggcttcgcagcccaaaaacaaatgagttaggctgcagaggactggtttgttttttggcataaaccctttgaagttcctttttcattgttaaattaaaatttttttttttacttggatggcttaacatttttgcaagaaaaataggaagatatgaagatgatgttttggtttgtttatgaaatgcatatggcttgtcagagctcattcgacagttaaagccattgtttaaagaaatggtgctttgctctgtgtttgtgctcctgatttccctggaggttctggatgaaggctgaacacaggcttgttaatgtcagtctgtgctgaggacctcagggacttgaggttgcatttttgagcatggggtgcaggagcctttctggatttggatgtggctatggaaagaacacagaagccaaggtcatgtgcatgaaatgaggagtttgagttagtcacctcggggattttttccattttgcagtaaaatgttaaattaatgtagcctgcctctatttgttgggcaggtaatttcaaagggttatttgcctcatctcctatctttagtgaaatcttatgtgtaattattccaccgtgggaacagagaatacctgtttagtgttgcactttagactggtgtctgttttgttaatgcagctgtgccacaaattctcctttatcttttaaaaatgttatagctttaaattttgatttattttgactgtggaataaatacatgaatg

SEQ ID NO: 7368 - DNA, 3056 bp, Homo sapiens
  source 1..3056: mol_type = unassigned DNA
agaatggtaaacacagcagcagagctaccacacacttcccttctgggagcggtggggaaagcagccagggaggtcgggagatggacggaaactgctggggatgtgagaagcctggggcactaactggagttgttattgacttggttgccaggggaagcttggccgacaagtctatactcctgggcagactgagcaacagcaggtggtggcttctggataagaggtgctctaggtcggaaggaaataaatgagactacgatcagttaaagttcggtaaagcaagagacgccttcaacccgacgaccagacggtggctccgcagcacagactctctcggatggtggaattcccaaccggcttcgatgtagccccgcccctacccagaccacgcccaccaatcaccgccctctcccccccaggccccgcctggagcccgcccctcctaaagcatgctccacctgactccgacactgccgggcttagtccgccgggcttagtccgtggagcgcttgcgcatttcttgagttgtcgtggcactgcccaaatctgaatgggggaaagagggaacttcatatttcctacagactccgccacagcgactttgcgtgctctcttagagctggttttgcctttcgtggtcctgagaaccctggcttttggttccccaatgcggcttaagtgtgcaggttttaagttaggcgatcttcgggcagccctagtcccagcaccgggtccttgcgctgagtctcgggaccacagccggggaggcggggtccttctctggggcggtcgcgttggcagcggatgcgggaagccggactctgggcgtcatgtactacaagtttagtggcttcacgcagaagttggcaggagcatgggcttcggaggcctatagcccgcagggattaaagcctgtggtttccacagaagcaccacctatcatatttgccacaccaactaaactgacctccgattccacagtgtatgattatgctgggaaaaacaaagttccagagctacaaaagtttttccagaaagctgatggtgtgcccgtctacctgaaacgaggcctgcctgaccaaatgctttaccggaccaccatggcgctgactgtgggagggaccatctactgcctgatcgccctctacatggcttcgcagcccaaaaacaaatgagttaggctgcagaggactggtttgttttttggcataaaccctttgaagttcctttttcattgttaaattaaaatttttttttttacttggatggcttaacatttttgcaagaaaaataggaagatatgaagatgatgttttggtttgtttatgaaatgcatatggcttgtcagagctcattcgacagttaaagccattgtttaaagaaatggtgctttgctctgtgtttgtgctcctgatttccctggaggttctggatgaaggctgaacacaggcttgttaatgtcagtctgtgctgaggacctcagggacttgaggttgcatttttgagcatggggtgcaggagcctttctggatttggatgtggctatggaaagaacacagaagccaaggtcatgtgcatgaaatgaggagtttgagttagtcacctcggggattttttccattttgcagtaaaatgttaaattaatgtagcctgcctctatttgttgggcaggtaatttcaaagggttatttgcctcatctcctatctttagtgaaatcttatgtgtaattattccaccgtgggaacagagaatacctgtttagtgttgcactttagactggtgtctgttttgttaatgcagctgtgccacaaattctcctttatcttttaaaaatgttatagctttaaattttgatttattttgactgtggaataaatacatgaatgaaaaattttaagtttgaagttctttgaatgacctttcagagtaatttcagaacaccagcagcatcttaaacctgagtctaatttctttcttgttaattaggcaccagataatctttataaaatggttcttaaaagtctagtaataggagtcttaatggcatattgatgattaccacatggttttttataaaaacctgcctgccccttagtgaaaggtacctgtaactcacagttcatttagacactaatttcctttgctgtcatgattggtagacttcacttaccctatattaattttgaaaaaaggtggaattttattatatatgaaggaatagtttgtatcttaccatagcacagaacagtgacctcttgctcaggataagatgtggtgatttgaaaatactcaatagtagccttgcagtgatatctctctctctctctctctgcaaatctaaattttattctctggtatttcctccaagtttttattttgaaaattttcagactacagaaggactaagcatagtacaatatacacctgtatatccttcacttagatcaccagttatcaatatattggcacctttgctttttcttgttctctcacacaggcacacacaatgcatatatgcacacacacatagatctgttttttgttgagtcatttaagattgttagggaattatgataaatcagccatagtactttagcaggtatcttctgagtaaggacatgtgttcctttataaccataatgcagttgtcagactcaataaagttaacatttataacaatactaccatctaatacatagtttactttcagatttccccaggtgttctaataatgagttcttcatagttgtgtttttaaaaaataacagctttattgggatataatttacatactgtacagttcacctcaagtgtacaattcattggtttttactgtatttggagttgtacagccaccatgagaatcaattttagaacacttatatcaccctaaaaagaaaccccatacccattagcaatcacttgccttccctcccaccatcccaactcccacctcctagcccaaagcaagcactcatctactttcagtctctatggatttgtctttcctggacatttcatataaatataatcatatgatgtgtgatgtacgtga

SEQ ID NO: 7369 - DNA, 489 bp, Homo sapiens
  source 1..489: mol_type = unassigned DNA
gtgatcatcttttctttgacattggaagcagaatctgaaactttctgaggagagcatttgagcttcagatttctaacagcctctttgcaacaaaatagaccagtagctgaaggcaactgcaatccttcatgatgtttcccttggccagaaatgcactaagcagtctcaagattcaaagcattctgcaaagcatggcaagacatagccatgtaaaacactcaccagattttcatgataaatatggtaatgctgtgctagccagtggaactgctttctgtgttgctacatgggtgtttacagccactcagattggaatagaatggaacctatcccctgttggcagagttaccccaaaagagtggaaacatcagtaaccatcacagttgctgtaatgacagaattgtttaaaaaaccaacttgtcatgtaagcactctactgcttattaaaatatagcacaattgaaaaaataaaatgtgttttaaatcttt

SEQ ID NO: 7370 - DNA, 542 bp, Homo sapiens
  source 1..542: mol_type = unassigned DNA
ggctgtaaaacggaaaggttcggaatttgcctctgcgccgtctttttttgcctgttacctgtgacgtccttggaagcagaatctgaaactttctgaggagagcatttgagcttcagatttctaacagcctctttgcaacaaaatagaccagtagctgaaggcaactgcaatccttcatgatgtttcccttggccagaaatgcactaagcagtctcaagattcaaagcattctgcaaagcatggcaagacatagccatgtaaaacactcaccagattttcatgataaatatggtaatgctgtgctagccagtggaactgctttctgtgttgctacatgggtgtttacagccactcagattggaatagaatggaacctatcccctgttggcagagttaccccaaaagagtggaaacatcagtaaccatcacagttgctgtaatgacagaattgtttaaaaaaccaacttgtcatgtaagcactctactgcttattaaaatatagcacaattgaaaaaataaaatgtgttttaaatctttaaaaa

SEQ ID NO: 7371 - DNA, 617 bp, Homo sapiens
  source 1..617: mol_type = unassigned DNA
atttgcctctgcgccgtctttttttgcctgttacctgtgacgtccttgaaaatgaaaagctttcttaagacaataggacgggccgggcgcggtggctcatgcctgtaatcctaacactctgggaggccgaggttggcggatcacgaggaagcagaatctgaaactttctgaggagagcatttgagcttcagatttctaacagcctctttgcaacaaaatagaccagtagctgaaggcaactgcaatccttcatgatgtttcccttggccagaaatgcactaagcagtctcaagattcaaagcattctgcaaagcatggcaagacatagccatgtaaaacactcaccagattttcatgataaatatggtaatgctgtgctagccagtggaactgctttctgtgttgctacatgggtgtttacagccactcagattggaatagaatggaacctatcccctgttggcagagttaccccaaaagagtggaaacatcagtaaccatcacagttgctgtaatgacagaattgtttaaaaaaccaacttgtcatgtaagcactctactgcttattaaaatatagcacaattgaaaaaataaaatgtgttttaaatctttaaaaa

SEQ ID NO: 7372 - DNA, 417 bp, Homo sapiens
  source 1..417: mol_type = unassigned DNA
tccaggctgtaaaacggaaaggttcggaatttgcctctgcgccgtctttttttgcctgttacctgtgacgtccttgatgattattcttttggctctttacaatgtagctaggaaaaatttgtctttgatgtgatataatatctgaatccctggaggaactacagtcatgcatcgctgaacagcaaggatatatgttctgaaaaatgcatcattaggaagcagaatctgaaactttctgaggagagcatttgagcttcagatttctaacagcctctttgcaacaaaatagaccagtagctgaaggcaactgcaatccttcatgatgtttcccttggccagaaatgcactaagcagtctcaagattcaaagcattctgcaaagcatggcaagacatagccatgtaaaacactcaccaga

SEQ ID NO: 7373 - DNA, 587 bp, Homo sapiens
  source 1..587: mol_type = unassigned DNA
ctttttttctattcttgttttagaaaatgaaaagctttcttaagacaataggacgggccgggcgcggtggctcatgcctgtaatcctaacactctgggaggccgaggttggcggatcacgaggaagcagaatctgaaactttctgaggagagcatttgagcttcagatttctaacagcctctttgcaacaaaatagaccagtagctgaaggcaactgcaatccttcatgatgtttcccttggccagaaatgcactaagcagtctcaagattcaaagcattctgcaaagcatggcaagacatagccatgtaaaacactcaccagattttcatgataaatatggtaatgctgtgctagccagtggaactgctttctgtgttgctacatgggtgtttacagccactcagattggaatagaatggaacctatcccctgttggcagagttaccccaaaagagtggaaacatcagtaaccatcacagttgctgtaatgacagaattgtttaaaaaaccaacttgtcatgtaagcactctactgcttattaaaatatagcacaattgaaaaaataaaatgtgttttaaatcttt

SEQ ID NO: 7374 - DNA, 666 bp, Homo sapiens
  source 1..666: mol_type = unassigned DNA
cgcgtttcctcaaggctccgccccatttcccatctttcttttcagtccttgcgcaccggggaacaaggtcgtgaaaaaaaaggtcttggtgaggtgccgccatttcatctgtcctcattctctgcgcctttcgcagagcttccagcagcggtatgttgggccagagcatccggaggttcacaacctctgtggtccgtaggagccactatgaggagggccctgggaagaatttgccattttcagtggaaaacaagtggtcgttactagctaagatgtgtttgtactttggatctgcatttgctacacccttccttgtagtaagacaccaactgcttaaaacataaggatgtttcagttcctccatttaacagatatgaagagcattttaagaggtgcagcctctggaagtggatcaaactagaactcatatgccatactagatatgtttgtcaataaacttatgacgtgaatgcttaatgcctcttttttgaaatagggaatgtaataattggccatttgcctactttattatttgggtaacattccagtattactctctgtgatttagcttatttaatggtgttaaactgaggttatattaaatttttgattcccaggtcaggattttgttggtaatttatataataaaagggaaatacaaatcga

SEQ ID NO: 7375 - DNA, 1584 bp, Homo sapiens
  source 1..1584: mol_type = unassigned DNA
gcaccggggaacaaggtcgtgaaaaaaaaggtcttggtgaggtgccgccatttcatctgtcctcattctctgcgcctttcgcagagcttccagcagcggtatgttgggccagagcatccggaggttcacaacctctgtggtccgtaggagccactatgaggagggccctgggaagaatttgccattttcagtggaaaacaagtggtcgttactagctaagatgtgtttgtactttggatctgcatttgctacacccttccttgtagtaagacaccaactgcttaaaacataaggatgtttcagttcctccatttaacaggtagttagtggatttctaatcatgttaaagcaggcctttttattaagtagcctcttccccatcacccagaacacacacacaaatacattgttgtgtagggctgattcctgaggttatgtgtagatgtggcattggtggagactagttgtaaacctatataaaaatatttcaataatggccagtgtttattgaatactactgcttatcaggtacactttacatcgatatctcatgttctctagcaagcttgtgaggcggatgatagtaaccccatctgagacacagagatgttaagttgttcaacatctcataactagtataatggtggaccaggactcttgcccaggcagtttcttgttgcagaactcacacttttaaccaggtaaaactgataaactgattaatgttactctatcttgaacactgttactagaacagtagctgagaatgtgtcttttaaaacactataaacatttccatttcttttagaaagtggtcactgtgctcctagtttttaaattggcttacaatacttgtttaagttgtgaaaaatccctgaagataaaacccttctagtgctccttgatacataagtcccagataattatgcaattgtaaatctgtgcctcaccaactcagccatgttgggaaactcaaacttttaaatatactttcctcattaaggcagtggttcttaaatgaggatgattttacaacacaatggggcatttggcaatgtgagacatttttgatcgttccaacttgggggcaaaattaccagtggtgctgaggttgagaagccttgtgtcaaggggatatgttaatatatgctcaaaggagtcgttcatattggaaggttagcagatttgctgtgtgtggataaaatatttagcttaattgtcatcagagtttctcagagtaatactatagaacactaggatgattggaaagagtgtcatagtttagagggggaataacttatccaagctactaatgcggaaaggttgcggtgcatgtgatgaagcaaatcagtatgaatgaattcatgatactgtaaacgctttctgatgtactactcaaactgatagaaaatattttcatgaaactacatgatttctgttaaatgaatgggatttttaaaatgccattaatttctgtttttattttgcagatatgaagagcattttaagaggtgcagcctctggaagtggatcaaactagaactcatatgccatactagatatgtttgtcaataaacttatgac

SEQ ID NO: 7376 - DNA, 1240 bp, Homo sapiens
  source 1..1240: mol_type = unassigned DNA
gctttcgcgaggttttgactctcgtggcgccccaggggccgacgggagtggcggccgcgcggaggaggccaagatggcggcagctgcggcttcgcttcgcggggtagtgttgggcccgcggggcgcggggctcccgggcgcgcgtgcccggggtctgctgtgcagcgcgcgtcccgggcagctcccgctacggacacctcaggcagtggccttgtcgtcgaagtctggcctttcccgaggccggaaagtgatgctgtcagcgctgggcatgctggcggcagggggtgcggggctggccatggctctgcattcggctgtgagtgccagtgacctggagctgcacccccccagctatccgtggtctcaccgtggcctcctctcttccttggaccacaccagcatccggaggggtttccaggtatataagcaggtgtgcgcctcctgccacagcatggacttcgtggcctaccgccacctggtgggcgtgtgctacacggaggatgaagctaaggagctggctgcggaggtggaggttcaagacggccccaatgaagatggggagatgttcatgcggccagggaagctgttcgactatttcccaaaaccataccccaacagtgaggctgctcgagctgccaacaacggagcattgccccctgacctcagctacatcgtgcgagctaggcatggtggtgaggactacgtcttctccctgctcacgggctactgcgagccacccaccggggtgtcactgcgggaaggtctctacttcaacccctactttcctggccaggccattgccatggcccctcccatctacacagatgtcttagagtttgacgatggcaccccagctaccatgtcccagatagccaaggatgtgtgcaccttcctgcgctgggcatctgagccagagcacgaccatcgaaaacgcatggggctcaagatgttgatgatgatggctctgctggtgcccctggtctacaccataaagcggcacaagtggtcagtcctgaagagtcggaagctggcatatcggccgcccaagtgaccctgtccagtgtctgcttgccatcctgccagaacaggccctcaagcccaagagccatcccaggcctgttcaggcctcagctaagcctctcttcatctggaagaagaggcaagggggcaggagaccaggctctagctctgggccctccttcagcccccatcatgggaataaattaattttctcaatgta

SEQ ID NO: 7377 - DNA, 1961 bp, Homo sapiens
  source 1..1961: mol_type = unassigned DNA
acatgtcaaagagacacacactaaattagcagggagtgttataaaaactttggagtgcaagctcacagctgtcttaataagaagagaaggcttcaatggaaccttttgtggtcctggtgctgtgtctctcttttatgcttctcttttcactctggagacagagctgtaggagaaggaagctccctcctggccccactcctcttcctattattggaaatatgctacagatagatgttaaggacatctgcaaatctttcaccaatgtaagtctgccttatgttcctccagccaattgcaaaggttctcaaaagtctatggtcctgtgttcaccgtgtattttggcatgaatcccatagtggtgtttcatggatatgaggcagtgaaggaagccctgattgataatggagaggagttttctggaagaggcaattccccaatatctcaaagaattactaaaggacttggaatcatttccagcaatggaaagagatggaaggagatccggcgtttctccctcacaaccttgcggaattttgggatggggaagaggagcattgaggaccgtgttcaagaggaagctcactgccttgtggaggagttgagaaaaaccaaggcttcaccctgtgatcccactttcatcctgggctgtgctccctgcaatgtgatctgctccgttgttttccagaaacgatttgattataaagatcagaattttctcaccctgatgaaaagattcaatgaaaacttcaggattctgaactccccatggatccaggtctgcaataatttccctctactcattgattgtttcccaggaactcacaacaaagtgcttaaaaatgttgctcttacacgaagttacattagggagaaagtaaaagaacaccaagcatcactggatgttaacaatcctcgggactttatcgattgcttcctgatcaaaatggagcaggaaaaggacaaccaaaagtcagaattcaatattgaaaacttggttggcactgtagctgatctatttgttgctggaacagagacaacaagcaccactctgagatatggactcctgctcctgctgaagcacccagaggtcacagctaaagtccaggaagagattgatcatgtaattggcagacacaggagcccctgcatgcaggataggagccacatgccttacactgatgctgtagtgcacgagatccagagatacagtgaccttgtccccaccggtgtgccccatgcagtgaccactgatactaagttcagaaactacctcatccccaagggcacaaccataatggcattactgacttccgtgctacatgatgacaaagaatttcctaatccaaatatctttgaccctggccactttctagataagaatggcaactttaagaaaagtgactacttcatgcctttctcagcaggaaaacgaatttgtgcaggagaaggacttgcccgcatggagctatttttatttctaaccacaattttacagaactttaacctgaaatctgttgatgatttaaagaacctcaatactactgcagttaccaaagggattgtttctctgccaccctcataccagatctgcttcatccctgtctgaagaatgctagcccatctggctgccgatctgctatcacctgcaactctttttttatcaaggacattcccactattatgtcttctctgacctctcatcaaatcttcccattcactcaatatcccataagcatccaaactccattaaggagagttgttcaggtcactgcacaaatatatctgcaattattcatactctgtaacacttgtattaattgctgcatatgctaatacttttctaatgctgactttttaatatgttatcactgtaaaacacagaaaagtgattaatgaatgataatttagatccatttcttttgtgaatgtgctaaataaaaagtgttattaattgctggttc

SEQ ID NO: 7378 - DNA, 2018 bp, Homo sapiens
  source 1..2018: mol_type = unassigned DNA
acatgtcaaagagacacacactaaattagcagggagtgttataaaaactttggagtgcaagctcacagctgtcttaataagaagagaaggcttcaatggaaccttttgtggtcctggtgctgtgtctctcttttatgcttctcttttcactctggagacagagctgtaggagaaggaagctccctcctggccccactcctcttcctattattggaaatatgctacagatagatgttaaggacatctgcaaatctttcaccaatgtaagtctgccttatgttcctccagccaattgcaaaggtgttttgctatgatttttgactgaaggtgaagggaagtgtgtgtgattagaaatttcatccattctcaaaagtctatggtcctgtgttcaccgtgtattttggcatgaatcccatagtggtgtttcatggatatgaggcagtgaaggaagccctgattgataatggagaggagttttctggaagaggcaattccccaatatctcaaagaattactaaaggacttggaatcatttccagcaatggaaagagatggaaggagatccggcgtttctccctcacaaccttgcggaattttgggatggggaagaggagcattgaggaccgtgttcaagaggaagctcactgccttgtggaggagttgagaaaaaccaaggcttcaccctgtgatcccactttcatcctgggctgtgctccctgcaatgtgatctgctccgttgttttccagaaacgatttgattataaagatcagaattttctcaccctgatgaaaagattcaatgaaaacttcaggattctgaactccccatggatccaggtctgcaataatttccctctactcattgattgtttcccaggaactcacaacaaagtgcttaaaaatgttgctcttacacgaagttacattagggagaaagtaaaagaacaccaagcatcactggatgttaacaatcctcgggactttatcgattgcttcctgatcaaaatggagcaggaaaaggacaaccaaaagtcagaattcaatattgaaaacttggttggcactgtagctgatctatttgttgctggaacagagacaacaagcaccactctgagatatggactcctgctcctgctgaagcacccagaggtcacagctaaagtccaggaagagattgatcatgtaattggcagacacaggagcccctgcatgcaggataggagccacatgccttacactgatgctgtagtgcacgagatccagagatacagtgaccttgtccccaccggtgtgccccatgcagtgaccactgatactaagttcagaaactacctcatccccaagggcacaaccataatggcattactgacttccgtgctacatgatgacaaagaatttcctaatccaaatatctttgaccctggccactttctagataagaatggcaactttaagaaaagtgactacttcatgcctttctcagcaggaaaacgaatttgtgcaggagaaggacttgcccgcatggagctatttttatttctaaccacaattttacagaactttaacctgaaatctgttgatgatttaaagaacctcaatactactgcagttaccaaagggattgtttctctgccaccctcataccagatctgcttcatccctgtctgaagaatgctagcccatctggctgccgatctgctatcacctgcaactctttttttatcaaggacattcccactattatgtcttctctgacctctcatcaaatcttcccattcactcaatatcccataagcatccaaactccattaaggagagttgttcaggtcactgcacaaatatatctgcaattattcatactctgtaacacttgtattaattgctgcatatgctaatacttttctaatgctgactttttaatatgttatcactgtaaaacacagaaaagtgattaatgaatgataatttagatccatttcttttgtgaatgtgctaaataaaaagtgttattaattgct

SEQ ID NO: 7379 - DNA, 1075 bp, Homo sapiens
  source 1..1075: mol_type = unassigned DNA
gctgtgcagggcagggaagctccaggcaaacagcccagcaaacagcagcactcagctaaaaggaagactcacagaacacagttgaagaaggaaagtggcgatggacctcatcccaaatttggcggtggaaacctggcttctcctggctgtcagcctggtgctcctctatctatatgggacccgtacacatggactttttaagagactgggaattccagggcccacacctctgcctttgttgggaaatgttttgtcctatcgtcagggtctctggaaatttgacacagagtgctataaaaagtatggaaaaatgtggggaacgtatgaaggtcaactccctgtgctggccatcacagatcccgacgtgatcagaacagtgctagtgaaagaatgttattctgtcttcacaaatcgaaggatttgtgcaacgaccagcaccatcaagatgcagacccattccgtcaccatgtggctccctcctgctgtcctacagtcacaacatggagtttgtctttttctctgacaggttctatatcagagcaaacttttatttatttgaggaggccaatgtattaatatttccttttatggattgttcttttggtgttaagtctgaaaatcctttgcttagccctccttcctacattgctttttctaagagttatatagtttaacactttacaaaatgtaactctattacccattttgtgttaatatttgcataagttatgagatttagatcaaggttcattttctgtggactatggctgtccaaatgttccaacaccattttggaaaggtaggcatattgtcaaaactcagctgagtatattttgtgaatctatttcttattgtttactcctccactaataccacactgtggtgactctagtagctgtacagtaactcttaacatcatatagggcaattctttccactttattgatttatattttcagaatggctttagcttttcttgtcccttgcctttccataaaaattcagaataagcttgtaagtgtctacaaacaaacctgccataattttgataagaattaaagcagaggtgtccaat

SEQ ID NO: 7380 - DNA, 2983 bp, Homo sapiens
  source 1..2983: mol_type = unassigned DNA
agaaggggagaggaggttgtgtgggacaaggtgctcctgacagaaggatgccacagctgagcctgtcctcgctgggcctttggccaatggcagcatccccgtggctgctcctgctgctggttggggcctcctggctcctggcccgcatcctggcctggacctataccttctatgacaactgctgccgcctccggtgtttcccgcaacccccgaaacggaattggttcttgggtcacctgggcctggtcacccccacggagcagggcatgagggtcctgactcagctggtggccacctacccccagggctttaaggtctggatgggccccatcttccccgtcatccgtttttgccaccccaacatcatccggtctgtcatcaacgcctcagctgccattgtaccaaaggacaaggtcttctacagcttcctgaagccctggctgggggatgggctcctgctgagtgctggtgaaaagtggagccgccaccgtcggatgctgacgcctgccttccatttcaacatcctgaagccctatatgaagattttcaatgagagtgtgaacatcatgcatgccaagtggcagctcctggcctcagagggtagtgcccgtctggacatgtttgagcacatcagcctcatgaccttggacagtctgcagaaatgtgtcttcagctttgacagccattgccaggagaagcccagtgaatatattgccgccatcttggagctcagtgcccttgtgacaaaaagacaccagcagatcctcctgtacatagacttcctgtattatctcacccctgatgggcagcgtttccgcagggcctgccgcctggtgcacgacttcacagatgccgtcatccaggagcggcgccgcaccctccctagccagggtgttgatgacttcctccaagccaaggccaaatccaagactttggacttcattgatgtactcctgctgagcaaggatgaagatgggaagaagttgtccgatgaggacataagagcagaagctgacacctttatgtttgagggccatgacaccacagccagtggtctctcctgggtcctgtaccaccttgcaaagcacccggaataccaggagcgctgtcggcaggaggtgcaagagcttctgaaggaccgtgagcctaaagagattgaatgggacgacctggcccagctgcccttcctgaccatgtgcattaaggagagcctgaggctgcatcccccagtccctgccgtctctcgctgctgcacccaagacattgtgctcccagacggccgggtcatccccaaaggcattatctgcctcatcagtgtttttggaacccatcacaacccagccgtgtggccggaccctgaggtctatgacccctttcgctttgacccaaagaacatcaaggagaggtcacctctggcttttattcccttctcagcagggcccaggaactgcatcgggcaggcgttcgcgatggcggagatgaaggtggtcctggggctcacgctgctgcgcttccgcgtcctgcctgaccacaccgagccccgcaggaagccggagctggtcctgcgcgcagagggcggactttggctgcgggtggagcccctgagctgagttctgcagagacccactctgaccccactaaaatgacccctgattcatcaaaagtgaggcctagaattaccctaagaccctgttccacagtcctgtattccatcctagatatctactcaaaataattgagacaagtgttcaaacagaaagacgcttgtgcgtgaatgttcatggcagccctattcacagtagccaaacgatgaaaacaaccccaagctatatattaccagatgaaaggataaacaaaatatggtccatccatacaatggagtattacacagccataaaaaggaatgaagcagtgatccccactacactgtggatgaaccttgaatgcatgatactgaatgaaagacatcagatgcaaaaggtcacatagtgtactgtccttttatatgaaatttccagaacaggccaatctgaagagatgtatagtggattggtggctttcagcagctgtggggaggtgggactgaggagcgactgctaatcaggatggggtttcctcctgggatggtgaaaatgttccggacctagatagtgatgaaggtagcacgacactgtgagtgcactaaatgctattgaattggacactttagaatggttgaaatagtgatttttatgtgaattctacctaaacatgctattacagctcatatatactttttccatctggattcttcacaaaagaatatgttgtgagcatctttccatgatattaaatcatcttaggaaacattattttgtgttcttcaaaatgtgcatgttaagtattcaaatcagtcttaaatttttaaaaatatgtaattttagaaaataatttaaaaggttttgtttcagtttgtaagatttcttttctggcactttaatggcttgaggtatcattatcagttacaaattgagttattcttcatcaaatgacttttggagtagagattttatttttatagcaatagatgcacagatattcctgtaagatacaggtgtggttagacacttttctagaacaggcatgccctgcaaactccacagacactgactgtttttgtcctattaagaagtagaccactgagaagggagaaggtgacattttagctttcccaggtaaaagtggttttcatcctcacaccaattttatggactggacgttaactctcttgctcaaggtcactctgagtggaagagtggggataaatctggttcgtttggcatcagaggccatgacttttcctaccacagaagtaattttcaaagtaagtctctgccctaggcacatcagatcacctggggaccactccagagtgagtagacaagactttgacaggggtgcctaatttttttttttttttgagatggagtctcgctctgttgcc

SEQ ID NO: 7381 - DNA, 1455 bp, Homo sapiens
  source 1..1455: mol_type = unassigned DNA
atgcttttcccaatctccatgtcggccacggagtttcttctggcctctgtcatcttctgtctggtattctgggtaatcagggcctcaagacctcaggtccccaaaggcctgaagaatccaccagggccatggggctggcctctgattgggcacatgctgaccctgggaaagaacccgcacctggcactgtcaaggatgagccagcagtatggggacgtgctgcagatccgaattggctccacacccgtggtggtgctgagcggcctggacaccatccggcaggccctggtgcggcagggcgatgatttcaagggccggcccgacctctacaccttcaccctcatcagtaatggtcagagcatgtccttcagcccagactctggaccagtgtgggctgcccgccggcgcctggcccagaatggcctgaaaagtttctccattgcctctgacccagcctcctcaacctcctgctacctggaagagcatgtgagcaaggaggctgaggtcctgataagcacgttgcaggagctgatggcagggcctgggcactttaacccctacaggtatgtggtggtatcagtgaccaatgtcatctgtgccatttgctttggccggcgctatgaccacaaccaccaagaactgcttagcctagtcaacctgaatgccttcaaggacctgaatgagaagttctacagcttcatgcagaagatggtcaaggagcactacaaaacctttgagaagggccacatccgggacatcacagacagcctgattgagcactgtcaggagaagcagctggatgagaacgccaatgtccagctgtcagatgagaagatcattaacatcgtcttggacctctttggagctgggtttgacacagtcacaactgctatctcctggagcctcatgtatttggtgatgaaccccagggtacagagaaagatccaagaggagctagacacagtgattggcaggtcacggcggccccggctctctgacagatcccatctgccctatatggaggccttcatcctggagaccttccgacactcttccttcgtccccttcaccatcccccacagcacaacaagagacacaagtttgaaaggcttttacatccccaaggggcgttgtgtctttgtaaaccagtggcagatcaaccatgaccagaagctatgggtcaacccatctgagttcctacctgaacggtttctcacccctgatggtgctatcgacaaggtgttaagtgagaaggtgattatctttggcatgggcaagcggaagtgtatcggtgagaccattgcccgctgggaggtctttctcttcctggctatcctgctgcaacgggtggaattcagcgtgccactgggcgtgaaggtggacatgacccccatctatgggctaaccatgaagcatgcctgctgtgagcacttccaaatgcagctgcgctcttag

SEQ ID NO: 7382 - DNA, 2685 bp, Homo sapiens
  source 1..2685: mol_type = unassigned DNA
atctcagctcgctccagggaaggaggcgtggccacacgtacaagcccgcctataaaggtggcagtgccttcaccctcaccctgaaggtgacagttccttggaaccttccctgatccttgtgatcccaggctccaagagtccacccttcccagctcagctcagtacctcagcagccacctccaagatccctacactgatcatgcttttcccaatctccatgtcggccacggagtttcttctggcctctgtcatcttctgtctggtattctgggtaatcagggcctcaagacctcaggtccccaaaggcctgaagaatccaccagggccatggggctggcctctgattgggcacatgctgaccctgggaaagaacccgcacctggcactgtcaaggatgagccagcagtatggggacgtgctgcagatccgaattggctccacacccgtggtggtgctgagcggcctggacaccatccggcaggccctggtgcggcagggcgatgatttcaagggccggcccgacctctacaccttcaccctcatcagtaatggtcagagcatgtccttcagcccagactctggaccagtgtgggctgcccgccggcgcctggcccagaatggcctgaaaagtttctccattgcctctgacccagcctcctcaacctcctgctacctggaagagcatgtgagcaaggaggctgaggtcctgataagcacgttgcaggagctgatggcagggcctgggcactttaacccctacaggtatgtggtggtatcagtgaccaatgtcatctgtgccatttgctttggccggcgctatgaccacaaccaccaagaactgcttagcctagtcaacctgaataataatttcggggaggtggttggctctggaaacccagctgacttcatccctattcttcgctacctacccaacccttccctgaatgccttcaaggacctgaatgagaagttctacagcttcatgcagaagatggtcaaggagcactacaaaacctttgagaagggccacatccgggacatcacagacagcctgattgagcactgtcaggagaagcagctggatgagaacgccaatgtccagctgtcagatgagaagatcattaacatcgtcttggacctctttggagctgggtttgacacagtcacaactgctatctcctggagcctcatgtatttggtgatgaaccccagggtacagagaaagatccaagaggagctagacacagtgattggcaggtcacggcggccccggctctctgacagatcccatctgccctatatggaggccttcatcctggagaccttccgacactcttccttcgtccccttcaccatcccccacagcacaacaagagacacaagtttgaaaggcttttacatccccaaggggcgttgtgtctttgtaaaccagtggcagatcaaccatgaccagaagctatgggtcaacccatctgagttcctacctgaacggtttctcacccctgatggtgctatcgacaaggtgttaagtgagaaggtgattatctttggcatgggcaagcggaagtgtatcggtgagaccattgcccgctgggaggtctttctcttcctggctatcctgctgcaacgggtggaattcagcgtgccactgggcgtgaaggtggacatgacccccatctatgggctaaccatgaagcatgcctgctgtgagcacttccaaatgcagctgcgctcttaggtgcttgagagccctgaggcctagactctgtctacctggtctggttgggcagccagaccagcaggctggcctatgtggtctaaggttcagcctgaaactcatagacactgatctggctgcagttttgctatctgggctgtgggcaagcctaagggatcctgcctgcccctaccctggacttgcctctgcacaccctccagagacaacaggtaaaacagggccacatagatgctgatggagccttcccaagttgtgcttgagccaggaggcctgctagggttaggaggtccttaggcctctgagaagctctgaagaactctctggaagcccctgggcccagtacctagctggctctgtgagggtgctgactggcttcagcaagttagaactagccaaaccaggaccctgtccaatctttgacaattgggagctgccaagagtgaagggaagagacagcccaggatactggcacagaggtagtctcactgcttgaactaggctgagcaatctgaccctatgggtctaggacacagttcctgggaacatcacattcctctgcccttcctgcaggcaggaacaaacagggctgccttctggccttgtaagacccttattgctgtcctggaggggctggggacttgtgtctgcggggatcagagcgcacagggagtgcacatatccaggcaccaggactagggctggagtgaggggggggtatttcaattaccttctattggtctcccttctctacactcttgtaataaaatgtctatttttaatgtttgtacacaacaatccttctattctagcctgcattgagcttgcatgcttgcataagagcttaagaaccattgatttaatgtaatagggaaaattctaacccaggtatccaaaaatgtgtaagaacaactacctgagctaaataaagatattgttcagaaatccta

SEQ ID NO: 7383 - DNA, 2608 bp, Homo sapiens
  source 1..2608: mol_type = unassigned DNA
ctcaccctgaaggtgacagttccttggaaccttccctgatccttgtgatcccaggctccaagagtccacccttcccagctcagctcagtacctcagccacctccaagatccctacactgatcatgcttttcccaatctccatgtcggccacggagtttcttctggcctctgtcatcttctgtctggtattctgggtaatcagggcctcaagacctcaggtccccaaaggcctgaagaatccaccagggccatggggctggcctctgattgggcacatgctgaccctgggaaagaacccgcacctggcactgtcaaggatgagccagcagtatggggacgtgctgcagatccgaattggctccacacccgtggtggtgctgagcggcctggacaccatccggcaggccctggtgcggcagggcgatgatttcaagggccggcccgacctctacaccttcaccctcatcagtaatggtcagagcatgtccttcagcccagactctggaccagtgtgggctgcccgccggcgcctggcccagaatggcctgaaaagtttctccattgcctctgacccagcctcctcaacctcctgctacctggaagagcatgtgagcaaggaggctgaggtcctgataagcacgttgcaggagctgatggcagggcctgggcactttaacccctacaggtatgtggtggtatcagtgaccaatgtcatctgtgccatttgctttggccggcgctatgaccacaaccaccaagaactgcttagcctagtcaacctgaataataatttcggggaggtggttggctctggaaacccagctgacttcatccctattcttcgctacctacccaacccttccctgaatgccttcaaggacctgaatgagaagttctacagcttcatgcagaagatggtcaaggagcactacaaaacctttgagaagggccacatccgggacatcacagacagcctgattgagcactgtcaggagaagcagctggatgagaacgccaatgtccagctgtcagatgagaagatcattaacatcgtcttggacctctttggagctgggtttgacacagtcacaactgctatctcctggagcctcatgtatttggtgatgaaccccagggtacagagaaagatccaagaggagctagacacagtgattggcaggtcacggcggccccggctctctgacagatcccatctgccctatatggaggccttcatcctggagaccttccgacactcttccttcgtccccttcaccatcccccacagcacaacaagagacacaagtttgaaaggcttttacatccccaaggggcgttgtgtctttgtaaaccagtggcagatcaaccatgaccagaagctatgggtcaacccatctgagttcctacctgaacggtttctcacccctgatggtgctatcgacaaggtgttaagtgagaaggtgattatctttggcatgggcaagcggaagtgtatcggtgagaccattgcccgctgggaggtctttctcttcctggctatcctgctgcaacgggtggaattcagcgtgccactgggcgtgaaggtggacatgacccccatctatgggctaaccatgaagcatgcctgctgtgagcacttccaaatgcagctgcgctcttaggtgcttgagagccctgaggcctagactctgtctacctggtctggttgggcagccagaccagcaggctggcctatgtggtctaaggttcagcctgaaactcatagacactgatctggctgcagttttgctatctgggctgtgggcaagcctaagggatcctgcctgcccctaccctggacttgcctctgcacaccctccagagacaacaggtaaaacagggccacatagatgctgatggagccttcccaagttgtgcttgagccaggaggcctgctagggttaggaggtccttaggcctctgagaagctctgaagaactctctggaagcccctgggcccagtacctagctggctctgtgagggtgctgactggcttcagcaagttagaactagccaaaccaggaccctgtccaatctttgacaattgggagctgccaagagtgaagggaagagacagcccaggatactggcacagaggtagtctcactgcttgaactaggctgagcaatctgaccctatgggtctaggacacagttcctgggaacatcacattcctctgcccttcctgcaggcaggaacaaacagggctgccttctggccttgtaagacccttattgctgtcctggaggggctggggacttgtgtctgcggggatcagagcgcacagggagtgcacatatccaggcaccaggactagggctggagtgaggggggggtatttcaattaccttctattggtctcccttctctacactcttgtaataaaatgtctatttttaatgtttgtacacaacaatccttctattctagcctgcattgagcttgcatgcttgcataagagcttaagaaccattgatttaatgtaatagggaaaattctaacccaggtatccaaaaatgtgtaagaacaactacctgagctaaataaagatattgttcagaaatccta

SEQ ID NO: 7384 - DNA, 1594 bp, Homo sapiens
  source 1..1594: mol_type = unassigned DNA
ttgtgatcccaggctccaagagtccacccttcccagctcagctcagtacctcagcagccacctccaagatccctacactgatcatgcttttcccaatctccatgtcggccacggagtttcttctggcctctgtcatcttctgtctggtattctgggtaatcagggcctcaagacctcaggtccccaaaggcctgaagaatccaccagggccatggggctggcctctgattgggcacatgctgaccctgggaaagaacccgcacctggcactgtcaaggatgagccagcagtatggggacgtgctgcagatccgaattggctccacacccgtggtggtgctgagcggcctggacaccatccggcaggccctggtgcggcagggcgatgatttcaagggccggcccgacctctacaccttcaccctcatcagtaatggtcagagcatgtccttcagcccagactctggaccagtgtgggctgcccgccggcgcctggcccagaatggcctgaaaagtttctccattgcctctgacccagcctcctcaacctcctgctacctggaagagcatgtgagcaaggaggctgaggtcctgataagcacgttgcaggagctgatggcagggcctgggcactttaacccctacaggtatgtggtggtatcagtgaccaatgtcatctgtgccatttgctttggccggcgctatgaccacaaccaccaagaactgcttagcctagtcaacctgaataataatttcggggaggtggttggctctggaaacccagctgacttcatccctattcttcgctacctacccaacccttccctgaatgccttcaaggacctgaatgagaagttctacagcttcatgcagaagatggtcaaggagcactacaaaacctttgagaagggccacatccgggacatcacagacagcctgattgagcactgtcaggagaagcagctggatgagaacgccaatgtccagctgtcagatgagaagatcattaacatcgtcttggacctctttggagctgggtttgacacagtcacaactgctatctcctggagcctcatgtatttggtgatgaaccccagggtacagagaaagatccaagaggagctagacacagtgattggcaggtcacggcggccccggctctctgacagatcccatctgccctatatggaggccttcatcctggagaccttccgacactcttccttcgtccccttcaccatcccccacaggaagctatgggtcaacccatctgagttcctacctgaacggtttctcacccctgatggtgctatcgacaaggtgttaagtgagaaggtgattatctttggcatgggcaagcggaagtgtatcggtgagaccattgcccgctgggaggtctttctcttcctggctatcctgctgcaacgggtggaattcagcgtgccactgggcgtgaaggtggacatgacccccatctatgggctaaccatgaagcatgcctgctgtgagcacttccaaatgcagctgcgctcttaggtgcttgagagccctgaggcctagactctgtctacctggtctggttgggcagccagacc

SEQ ID NO: 7385 - DNA, 3127 bp, Homo sapiens
  source 1..3127: mol_type = unassigned DNA
gaagctccacaccagccattacaaccctgccaatctcaagcacctgcctctacagttggtacagatggcattgtcccagtctgttcccttctcggccacagagcttctcctggcctctgccatcttctgcctggtattctgggtgctcaagggtttgaggcctcgggtccccaaaggcctgaaaagtccaccagagccatggggctggcccttgctcgggcatgtgctgaccctggggaagaacccgcacctggcactgtcaaggatgagccagcgctacggggacgtcctgcagatccgcattggctccacgcccgtgctggtgctgagccgcctggacaccatccggcaggccctggtgcggcagggcgacgatttcaagggccggcctgacctctacacctccaccctcatcactgatggccagagcttgaccttcagcacagactctggaccggtgtgggctgcccgccggcgcctggcccagaatgccctcaacaccttctccatcgcctctgacccagcttcctcatcctcctgctacctggaggagcatgtgagcaaggaggctaaggccctgatcagcaggttgcaggagctgatggcagggcctgggcacttcgacccttacaatcaggtggtggtgtcagtggccaacgtcattggtgccatgtgcttcggacagcacttccctgagagtagcgatgagatgctcagcctcgtgaagaacactcatgagttcgtggagactgcctcctccgggaaccccctggacttcttccccatccttcgctacctgcctaaccctgccctgcagaggttcaaggccttcaaccagaggttcctgtggttcctgcagaaaacagtccaggagcactatcaggactttgacaagaacagtgtccgggacatcacgggtgccctgttcaagcacagcaagaaggggcctagagccagcggcaacctcatcccacaggagaagattgtcaaccttgtcaatgacatctttggagcaggatttgacacagtcaccacagccatctcctggagcctcatgtaccttgtgaccaagcctgagatacagaggaagatccagaaggagctggacactgtgattggcagggagcggcggccccggctctctgacagaccccagctgccctacttggaggccttcatcctggagaccttccgacactcctccttcttgcccttcaccatcccccacagcacaacaagggacacaacgctgaatggcttctacatccccaagaaatgctgtgtcttcgtaaaccagtggcaggtcaaccatgacccagagctgtgggaggacccctctgagttccggcctgagcggttcctcaccgccgatggcactgccattaacaagcccttgagtgagaagatgatgctgtttggcatgggcaagcgccggtgtatcggggaagtcctggccaagtgggagatcttcctcttcctggccatcctgctacagcaactggagttcagcgtgccgccgggcgtgaaagtcgacctgacccccatctacgggctgaccatgaagcacgcccgctgtgaacatgtccaggcgcggctgcgcttctccatcaactgaagaagacaccaccattctgaggccagggagcgagtgggggccagccacggggactcagcccttgtttctcttcctttctttttttaaaaaatagcagctttagccaagtgcagggcctgtaatcccagcattttaggaggccaaggttggaggatcatttgagcccaggaattggaaagcagcctggccaacatagtgggaccctgtctctacaaaaaaaaaatttgccaagagcctgagtgacagagcaagaccccatctcaaaaaaaaaaacaaacaaacaaaaaaaaaaccatatatatacatatatatatagcagctttatggagatataattcttatgccatataattcaccttctttttttttttttgtctgagacagaatctcagtctgtcacccaggttggagtgcagtggcgtgatctcagctcactgcaacctccacctcgcaggttcaagcaatcctcccacttcagcctcccaagcacctgggattacaagcatgagtcactacgcctggctgatttttgtagttttagtggagatggggtttcaccatgttggccaggcttgtctcgaactcctgaccccaagttatccacctgccttggcttcccaaagtcctgggattacaggtgtgagccaccacatccagcctaacttacattcttaaagtgtcgaatgacttctagtgtagaattgtgcaaccatcaccagaattaattttattattcttattatttttgagacagagtcttactctgttgccaggctggagtgcagtggcgcgatctcagctcactacaacctccgcctcccatgttcaagcgattctcctgcctcagcctcccgagtagctgggactataggcatgcgccaccatggccagctaatttttgtatttttagtagagacgaggtttcactgtgttggccaggatggtctccatctcttgacctcgtgatccacccgcctcagcctcccaaagtgctgggattaacaggtatgaaccaccgcgcccagcctttttgttttttttttttttgagacagagtcttcctctgtctcctaagctggagtgcagtggcatcatctcagctcactgcaacctctgcctcccaggttcaagtgcttctccagcctcagcctcccaagtagctgagactacaggcacacaccaccacgcctggctaatttttgtatttttagtagagacgggtttcaccatgttggctagactagtctcaaactcctgacctcaagtgatctgcccgcctcgacctctctcaaagtgctggcattacaggtgtgagccacggtgcccggcccacaattaattttagaacattttcatcacccctaaaagaaaccctgcacccattagcagtccctccacatttccccctagcctgcctcccctgcctcaccagccctggcaactgctaatctactttctgtgtctatggatttgccttctctaaacatttcatataaatggaattacacaatg

SEQ ID NO: 7386 - DNA, 2664 bp, Homo sapiens
  source 1..2664: mol_type = unassigned DNA
attgcagctgaacagggtggagggagcattggaatggcactcagggcaaaggcagaggtgtgcatggcagtgccctggctgtccctgcaaagggcacaggcactgggcacgagagccgcccgggtccccaggacagtgctgccctttgaagccatgccccggcgtccaggcaacaggtggctgaggctgctgcagatctggagggagcagggttatgaggacctgcacctggaagtacaccagaccttccaggaactagggcccattttcaggtacgacttgggaggagcaggcatggtgtgtgtgatgctgccggaggacgtggagaagctgcaacaggtggacagcctgcatccccacaggatgagcctggagccctgggtggcctacagacaacatcgtgggcacaaatgtggcgtgttcttgctgaatgggcctgaatggcgcttcaaccgattgcggctgaatccagaagtgctgtcgcccaacgctgtgcagaggttcctcccgatggtggatgcagtggccagggacttctcccaggccctgaagaagaaggtgctgcagaacgcccgggggagcctgaccctggacgtccagcccagcatcttccactacaccatagaagccagcaacttggctctttttggagagcggctgggcctggttggccacagccccagttctgccagcctgaacttcctccatgccctggaggtcatgttcaaatccaccgtccagctcatgttcatgcccaggagcctgtctcgctggaccagccccaaggtgtggaaggagcactttgaggcctgggactgcatcttccagtacggcgacaactgtatccagaaaatctatcaggaactggccttcagccgccctcaacagtacaccagcatcgtggcggagctcctgttgaatgcggaactgtcgccagatgccatcaaggccaactctatggaactcactgcagggagcgtggacacgacggtgtttcccttgctgatgacgctctttgagctggctcggaaccccaacgtgcagcaggccctgcgccaggagagcctggccgccgcagccagcatcagtgaacatccccagaaggcaaccaccgagctgcccttgctgcgtgcggccctcaaggagaccttgcggctctaccctgtgggtctgtttctggagcgagtggcgagctcagacttggtgcttcagaactaccacatcccagctgggacattggtgcgcgtgttcctctactctctgggtcgcaaccccgccttgttcccgaggcctgagcgctataacccccagcgctggctagacatcaggggctccggcaggaacttctaccacgtgccctttggctttggcatgcgccagtgccttgggcggcgcctggcagaggcagagatgctgctgctgctgcaccatgtgctgaaacacctccaggtggagacactaacccaagaggacataaagatggtctacagcttcatattgaggcccagcatgttccccctcctcaccttcagagccatcaactaatcacgtctctgcacccagggtcccagcctggccaccagcctccctttctgcctgaccccaggccacccctcttctctcccacatgcacagcttcctgagtcacccctctgtctaaccagccccagcacaaatggaactcccgagggcctctaggaccagggtttgccaggctaagcagcaatgccagggcacagctggggaagatcttgctgaccttgtccccagccccacctggccctttctccagcaagcactgtcctctgggcagtttgcccccatccctcccagtgctggctccaggctcctcgtgtggccatacaagggtgctgtggttttgtcccttgccttcctgcctagtctcacatgtccctgttcctcttcccctggccagggcccctgcgcagactgtcagagtcattaagcgggatcccagcatctcagagtccagtcaagttccctcctgcagcctgacccctaggcagctcgagcatgccctgagctctctgaaagttgtcaccctggaatagggtcctgcagggtagaataaaaaggcccctgtggtcacttgtcctgacatccccattttcaagtgatacaactgagtctcgagggacgtgtgttccccagctgatcgtgtcagcctcatgccccaggcctcatctttcatggaccaggccttgttccaggagtgggtgttgggtcctctgcttcctgtgctgtcccctggggaaggtcccgaggatgctgtcaggagatggaagagtcatgtggggtgggaacctggggtgtggttccagaaatgtttttggcaacaggagagacaggattgggccaacaaggactcagacgagttttattgactcatttctctggttgatacggagccatgtcatgtgccacgacctggggtgggcacagggaggctgcagtttcctgcgtgaacctgccttgggcctcatctgctcctagcccagcagagagagttgacccctcctgaactggccactccccagtgctcccgtgcagggagaggaagcacccagtttgagagtgtacccagccagactgtctttatctccatggattttcatcagggcaaagatcacagcagccagctcc

SEQ ID NO: 7387 - DNA, 1874 bp, Homo sapiens
  source 1..1874: mol_type = unassigned DNA
ggagcattggaatggcactcagggcaaaggcagaggtgtgcatggcagtgccctggctgtccctgcaaagggcacaggcactgggcacgagagccgcccgggtccccaggacagtgctgccctttgaagccatgccccggcgtccaggcaacaggtggctgaggctgctgcagatctggagggagcagggttatgaggacctgcacctggaagtacaccagaccttccaggaactagggcccattttcaggtacgacttgggaggagcaggcatggtgtgtgtgatgctgccggaggacgtggagaagctgcaacaggtggacagcctgcatccccacaggatgagcctggagccctgggtggcctacagacaacatcgtgggcacaaatgtggcgtgttcttgctgaatgggcctgaatggcgcttcaaccgattgcggctgaatccagaagtgctgtcgcccaacgctgtgcagaggttcctcccgatggtggatgcagtggccagggacttctcccaggccctgaagaagaaggtgctgcagaacgcccgggggagcctgaccctggacgtccagcccagcatcttccactacaccatagaagccagcaacttggctctttttggagagcggctgggcctggttggccacagccccagttctgccagcctgaacttcctccatgccctggaggtcatgttcaaatccaccgtccagctcatgttcatgcccaggagcctgtctcgctggaccagccccaaggtgtggaaggagcactttgaggcctgggactgcatcttccagtacggcgacaactgtatccagaaaatctatcaggaactggccttcagccgccctcaacagtacaccagcatcgtggcggagctcctgttgaatgcggaactgtcgccagatgccatcaaggccaactctatggaactcactgcagggagcgtggacacgacggtgtttcccttgctgatgacgctctttgagctggctcggaaccccaacgtgcagcaggccctgcgccaggagagcctggccgccgcagccagcatcagtgaacatccccagaaggcaaccaccgagctgcccttgctgcgtgcggccctcaaggagaccttgcggctctaccctgtgggtctgtttctggagcgagtggcgagctcagacttggtgcttcagaactaccacatcccagctggggtgctgaaacacctccaggtggagacactaacccaagaggacataaagatggtctacagcttcatattgaggcccagcatgttccccctcctcaccttcagagccatcaactaatcacgtctctgcacccagggtcccagcctggccaccagcctccctttctgcctgaccccaggccacccctcttctctcccacatgcacagcttcctgagtcacccctctgtctaaccagccccagcacaaatggaactcccgagggcctctaggaccagggtttgccaggctaagcagcaatgccagggcacagctggggaagatcttgctgaccttgtccccagccccacctggccctttctccagcaagcactgtcctctgggcagtttgcccccatccctcccagtgctggctccaggctcctcgtgtggccatacaagggtgctgtggttttgtcccttgccttcctgcctagtctcacatgtccctgttcctcttcccctggccagggcccctgcgcagactgtcagagtcattaagcgggatcccagcatctcagagtccagtcaagttccctcctgcagcctgacccctaggcagctcgagcatgccctgagctctctgaaagttgtcaccctggaatagggtcctgcagggtagaataaaa

SEQ ID NO: 7388 - DNA, 2936 bp, Homo sapiens
  source 1..2936: mol_type = unassigned DNA
ggaatggcactcagggcaaaggcagaggtgtgcgtggcagcgccctggctgtccctgcaaagggcacgggcactgggcactagagccgctcgggcccctaggacggtgctgccgtttgaagccatgccccagcatccaggcaacaggtggctgaggctgctgcagatctggagggagcagggttatgagcacctgcacctggagatgcaccagaccttccaggagctggggcccattttcaggtacaacttgggaggaccacgcatggtgtgtgtgatgctgccggaggatgtggagaagctgcaacaggtggacagcctgcatccctgcaggatgatcctggagccctgggtggcctacagacaacatcgtgggcacaaatgtggcgtgttcttgttgaatgggcctgaatggcgcttcaaccgattgcggctgaacccagatgtgctgtcgcccaaggccgtgcagaggttcctcccgatggtggatgcagtggccagggacttctcccaggccctgaagaagaaggtgctgcagaacgcccgggggagcctgaccctggacgtccagcccagcatcttccactacaccatagaagccagcaacttagctctttttggagagcggctgggcctggttggccacagccccagttctgccagcctgaacttcctccatgccctggaggtcatgttcaaatccaccgtccagctcatgttcatgcccaggagcctgtctcgctggatcagccccaaggtgtggaaggagcactttgaggcctgggactgcatcttccagtacggtgacaactgtatccagaaaatctaccaggaactggccttcaaccgccctcaacactacacaggcatcgtggcggagctcctgttgaaggcggaactgtcactagaagccatcaaggccaactctatggaactcactgcagggagcgtggacacgacagcgtttcccttgctgatgacgctctttgagctggctcggaaccccgacgtgcagcagatcctgcgccaggagagcctggccgccgcagccagcatcagtgaacatccccagaaggcaaccaccgagctgcccttgctgcgggcggccctcaaggagaccttgcggctctaccctgtgggtctgtttttggagcgagtggtgagctcagacttggtgcttcagaactaccacatcccagctgggacattggtacaggttttcctctactcgctgggtcgcaatgccgccttgttcccgaggcctgagcggtataatccccagcgctggctagacatcaggggctccggcaggaacttccaccacgtgccctttggctttggcatgcgccagtgcctcgggcggcgcctggcagaggcagagatgctgctgctgctgcaccacgtgctgaagcacttcctggtggagacactaactcaagaggacataaagatggtctacagcttcatattgaggcctggcacgtcccccctcctcactttcagagcgattaactagtcttgcatctgcacccagggtcccagcctggccaccagcttccctctgcctgaccccaggccacctgtcttctctcccacgtgcacagcttcctgagtcacccctctgtccagccagctcctgcacaaatggaactccccagggcctccaggactggggcttgccaggcttgtcaaatagcaaggccagggcacagctggagacgatcttgctggcagggcctggccttgtccccagctccacctggccccttctccagcaagcagtgccctctggacagcttgactctactcccagcgctggctccaggctcctcatgaggccatgcaagggtgctgtgattttgtcccttgccttcctgcctagtctcacatgtccctgtccctctcgccctggccagggcctctgtgcagacagtgtcagagtcattaagcgggatcccagcatctcagagtccagtcaagttccctcctgcagcctgaccccaggcagctcgagcatgccctgagctctctgaaagttgtcaccctggaatacgatcctgcagggtagactaaaaaggcccctgtggtcacttatcctgacacattttcaagtgatacaactgagtctcgaggggcgtgtgttccccagctgatcatgtcagcctcatgccccaggcctcgtctttcatggaccaggtcttgttcaagcagcgagtgttgggtcctctgcttcctgagctgtcccctggagaaggtcccgaggatgctgtcaggagatggaagagtcatgtggggtgggaacctggggtgtggttccagaaatgtttttggcaacaggagagacaggattgggccaacaaggactcagatgagttttattgactcattcctctggttgatacggagccatgtcatgtgccacgacctggggtgggcacagggaggctgcagttccctacgtgaacctgccttgggcctcatctgctcctagcccagcagagagagttgacccctcctgaactggccactccccagtgctcctgtgcagggataggaagtgccccagggtgagaacgtgcccagccacatcatctttatctcctgggattttcattagggcaaagatctcagcagccagctcctggtagctgatgaggatcagagcgtttgttcccccatgaaaggggaaatacttaggtaatcattccaggtgtgttcagtagttccaggactcagggactcaggccagtcaccctgtgaccgcaggttgctttcccaccctgggcaatgcagtgcagcatgggaaaggaataagggggcaacaaggtgcacagacctcagagatggcttccttgtttatggggctctcacagatacccatccaactcctctagtcagcactagatcatgggatcctaaaataaaccttggaaaaat

SEQ ID NO: 7389 - DNA, 1870 bp, Homo sapiens
  source 1..1870: mol_type = unassigned DNA
atatgagctcaggcctggctgggctccaggagaatctttccacaaggcaagagataacacaaagtcaaggtgaagatcagggtagccctttaaaaggcctccttgtgccctagagttgccacagctcttctactccactgctgtctatcttgcctgccggcacccagccaccatgtgggagctcgtggctctcttgctgcttaccctagcttatttgttttggcccaagagaaggtgccctggtgccaagtaccccaagagcctcctgtccctgcccctggtgggcagcctgccattcctccccagacacggccatatgcataacaacttcttcaagctgcagaaaaaatatggccccatctattcggttcgtatgggcaccaagactacagtgattgtcggccaccaccagctggccaaggaggtgcttattaagaagggcaaggacttctctgggcggcctcaaatggcaactctagacatcgcgtccaacaaccgtaagggtatcgccttcgctgactctggcgcacactggcagctgcatcgaaggctggcgatggccacctttgccctgttcaaggatggcgatcagaagctggagaagatcatttgtcaggaaatcagtacattgtgtgatatgctggccacccacaacggacagtccatagacatctcctttcctgtcttcgtggcggtaaccaatgtcatctccttgatctgcttcaatacctcctacaagaatggggaccctgagttgaatgtcatacagaattacaatgaaggcatcatagacaacctgagcaaagacagcctggtggacctagtcccctggttgaagattttccccaacaaaaccctggaaaaattaaagagccatgttaaaatacgaaatgatctgctgaataaaatacttgaaaattacaaggagaaattccggagtgactctatcaccaacatgctggacacactgatgcaagccaagatgaactcagataatggcaatgctggcccagatcaagactcagagctgctttcagataaccacattctcaccaccataggggacatctttggggctggcgtggagaccaccacctctgtggttaaatggaccctggccttcctgctgcacaatcctcaggtgaagaagaagctctacgaggagattgaccagaatgtgggtttcagccgcacaccaactatcagtgaccgtaaccgtctcctcctgctggaggccaccatccgagaggtgcttcgcctcaggcccgtggcccctatgctcatcccccacaaggccaacgttgactccagcatcggtgagtttgctgtggacaagggcacagaagttatcatcaatctgtgggcgctgcatcacaatgagaaggagtggcaccagccggatcagttcatgcctgagcgtttcttgaatccagcggggacccagctcatctcaccgtcagtaagctatttgcccttcggagcaggacctcgctcctgtataggtgagatcctggcccgccaggagctcttcctcatcatggcctggctgctgcagaggttcgacctggaggtgccagatgatgggcagctgccctccctggaaggcatccccaaggtggtctttctgatcgactctttcaaagtgaagatcaaggtgcgccaggcctggagggaagcccaggctgagggtagcacctaaaggctgtaactcacagcccctgtccaccctatgtggccccacaacacagatttagagatacaaccccccacccttctccgccattcttccctactcccaacccactctgccttctttttcagcttgtggcaatgccagtgatgtgcataaacagtttttttttttccataa

SEQ ID NO: 7390 - DNA, 4409 bp, Homo sapiens
  source 1..4409: mol_type = unassigned DNA
gcggtgtcagaaaccctgtggtgaaattcagcctgtggattccagaaatttggagtgttcttggggggaaaaatccgcacacacaaagcaacatttggaaatccctgtggactctaaattgccccctctgaggtcaaggaacacaagatggttttggaaatgctgaacccgatacattataacatcaccagcatcgtgcctgaagccatgcctgctgccaccatgccagtcctgctcctcactggcctttttctcttggtgtggaattatgagggcacatcctcaataccaggtcctggctactgcatgggaattggacccctcatctcccacggcagattcctgtggatggggatcggcagtgcctgcaactactacaaccgggtatatggagaattcatgcgagtctggatctctggagaggaaacactcattatcagcaagtcctcaagtatgttccacataatgaagcacaatcattacagctctcgattcggcagcaaacttgggctgcagtgcatcggtatgcatgagaaaggcatcatatttaacaacaatccagagctctggaaaacaactcgacccttctttatgaaagctctgtcaggccccggccttgttcgtatggtcacagtctgtgctgaatccctcaaaacacatctggacaggttggaggaggtgaccaatgaatcgggctatgtggacgtgttgacccttctgcgtcgtgtcatgctggacacctctaacacgctcttcttgaggatccctttggacgaaagtgctatcgtggttaaaatccaaggttattttgatgcatggcaagctctcctcatcaaaccagacatcttctttaagatttcttggctatacaaaaagtatgagaagtctgtcaaggatttgaaagatgccatagaagttctgatagcagaaaaaagacgcaggatttccacagaagagaaactggaagaatgtatggactttgccactgagttgattttagcagagaaacgtggtgacctgacaagagagaatgtgaaccagtgcatattggaaatgctgatcgcagctcctgacaccatgtctgtctctttgttcttcatgctatttctcattgcaaagcaccctaatgttgaagaggcaataataaaggaaatccagactgttattggtgagagagacataaagattgatgatatacaaaaattaaaagtgatggaaaacttcatttatgagagcatgcggtaccagcctgtcgtggacttggtcatgcgcaaagccttagaagatgatgtaatcgatggctacccagtgaaaaaggggacaaacattatcctgaatattggaaggatgcacagactcgagtttttccccaaacccaatgaatttactcttgaaaattttgcaaagaatgttccttataggtactttcagccatttggctttgggccccgtggctgtgcaggaaagtacatcgccatggtgatgatgaaagccatcctcgttacacttctgagacgattccacgtgaagacattgcaaggacagtgtgttgagagcatacagaagatacacgacttgtccttgcacccagatgagactaaaaacatgctggaaatgatctttaccccaagaaactcagacaggtgtctggaacactagagaaggctggtcagtacccactctggagcatttctcatcagtagttcacatacaaatcatccatccttgccaatagtgtcatcctcacagtgaacactcagtggcccatggcattttataggcatacctcctatgggttgtcaccaagctaggtgctatttgtcatctgctcctgttcacaccagagaaccaggctacaagagaaaaagcagaggccaagagtttgagggagaaatagtcggtgaagaaaccgtatccataaagacccgattccaccaaatgtgctttgagaaggataggccttcattaacaaaatgtatgtctggttccccagtagagctctactgcctcaacccaaggggatttttatgtctggggcagaaacactcaagttgattagaaagaccaggccaatgtcagggtacctggggccaaacccacctgctagtgtgaattaaagtactttaattttgttttctgtggaggtggaaaagcaacattcatagtctttggagaaatgcttagaaattcagcatttgacccttgctgtgaattaagcccaattaattcctgtttgtctacatatgatctgtctgtggcaaaagtttaatcagaggaaattctttcccagtctgtcgatttatgcctcagccacttgcctgtgctacaattcattgtgttacctgtagattcaggtaatacaaactatatataatcatcaagtaatacaaactaatttagtaatagcctgggttaagtattattagggccctgtgtctgctgtagaaaaaaaaattcacatgatgcacttcaaattcaaataaaaatccttttggcatgttcccatttttgcttagctcaattagtgtggctaaccaagagataactgtaaatgtgacattgatttgctcttactacagcttcagtgattgggggaggaaaagtcccaacccaatgggctcaaacttctaaggggtactcctctcatccccttatccttctccctcgacattttctccctctttcttcccatgaccccaaagccaagggcaacagatcagtaaagaacgtggtcagagtagaacccctgaagtattttttaatcctacctcaaaatttaacagttacctgagagatttaacattatctagttcattgaatcattgtatgtggtcatggataaattgcacaccttggaattcgctttctaaaggaaatcaaatgaatggaggaactttccaaacaccactttacttgtgttatatagccaatataactatctctactgaatgtcattgaaaaactaaaaaattaaacttatttacaaataggtaaatatttgtcattgaatccattgccatcccatttgactgttcttttcatcctactgtctagtaataagctgagtataagatgacagtgtaatctccctgaaagcaggagctactttctttcttttgtaatctatttccatccccatttccctgtcctgtctccctgtattcactcccaagctcagttctgaatagacattcctgctcagagatactcccaactgatgcagaaaccaaataaagaggtaggtattccaagaattcaagaatggacattagtaaagaataaaacatttatttgagcttggaattatttggatcatctatatggcctaaaaatatatggactatgcctgtgtacctgaatacgtatgtagtcaggtcaagacaatcatccaaataacttagacccctaaaagcaaggccaggatttgcaatttaatgtgtcccaattaattcacttgaaaattagtaacactctgtttacgttgcctctggctggagctgcatggtggaagaagcccaactttggatccatgtacttcacccatccaatactcttgggacatttatgtgtattttatctgtatatatgaagccaatgtctatgtctacacagtcaaagtgaaatgcatgtttgatatagctgtacatagatatctattttgcaggtacaaaaatatcctgggggaaaactgggagtggaagggtggggggtgggagtgagggacatgggggagggacaggaagaggagaagtgttggtttgaacgatccaagcaaactctcccagaatcaaattacctgggtagttgttcaacttttcactctgcttagcctgtatagacaaaccccatatatttgtagaggcttggccttggaattctggaataccattggcttttcagtaggctgatgaacacattttgaaaattctattatcttcagaattttgccccattgttaagtgcttaaccgtcactcttgaatgtgcaatgtgctgtggattccattttcatcagttctgaaagaactgcaatgtgtaaattatcagtgaaatgcatgcatataagggctctatcattatcaaattgtaaggacaattgtacccttctatatctttgggcatgctagacacccccatgccttcattgagatcccattttccccctctcaagtggaaaataatcacatccagcaagctctctcattattgagaaataccatttggaaattgccactttttattcctaagcagcacctttcactgttcatgatgctaatgttccacaaaagcatgtgccattggcccactgaaggatagagggacccttttcaatctatatcagctgggctctgggactgaatctctcacctattcttgcagaaagacatactaattaaaccttgtcaaagt

SEQ ID NO: 7391 - DNA, 4417 bp, Homo sapiens
  source 1..4417: mol_type = unassigned DNA
ggacagggttcagggagtttctggagggctgaacacgtggaggcaaacaggaaggtgaagaagaacttatcctatcaggacggaaggtcctgtgctcgggatcttccagacgtcgcgactctaaattgccccctctgaggtcaaggaacacaagatggttttggaaatgctgaacccgatacattataacatcaccagcatcgtgcctgaagccatgcctgctgccaccatgccagtcctgctcctcactggcctttttctcttggtgtggaattatgagggcacatcctcaataccaggtcctggctactgcatgggaattggacccctcatctcccacggcagattcctgtggatggggatcggcagtgcctgcaactactacaaccgggtatatggagaattcatgcgagtctggatctctggagaggaaacactcattatcagcaagtcctcaagtatgttccacataatgaagcacaatcattacagctctcgattcggcagcaaacttgggctgcagtgcatcggtatgcatgagaaaggcatcatatttaacaacaatccagagctctggaaaacaactcgacccttctttatgaaagctctgtcaggccccggccttgttcgtatggtcacagtctgtgctgaatccctcaaaacacatctggacaggttggaggaggtgaccaatgaatcgggctatgtggacgtgttgacccttctgcgtcgtgtcatgctggacacctctaacacgctcttcttgaggatccctttggacgaaagtgctatcgtggttaaaatccaaggttattttgatgcatggcaagctctcctcatcaaaccagacatcttctttaagatttcttggctatacaaaaagtatgagaagtctgtcaaggatttgaaagatgccatagaagttctgatagcagaaaaaagacgcaggatttccacagaagagaaactggaagaatgtatggactttgccactgagttgattttagcagagaaacgtggtgacctgacaagagagaatgtgaaccagtgcatattggaaatgctgatcgcagctcctgacaccatgtctgtctctttgttcttcatgctatttctcattgcaaagcaccctaatgttgaagaggcaataataaaggaaatccagactgttattggtgagagagacataaagattgatgatatacaaaaattaaaagtgatggaaaacttcatttatgagagcatgcggtaccagcctgtcgtggacttggtcatgcgcaaagccttagaagatgatgtaatcgatggctacccagtgaaaaaggggacaaacattatcctgaatattggaaggatgcacagactcgagtttttccccaaacccaatgaatttactcttgaaaattttgcaaagaatgttccttataggtactttcagccatttggctttgggccccgtggctgtgcaggaaagtacatcgccatggtgatgatgaaagccatcctcgttacacttctgagacgattccacgtgaagacattgcaaggacagtgtgttgagagcatacagaagatacacgacttgtccttgcacccagatgagactaaaaacatgctggaaatgatctttaccccaagaaactcagacaggtgtctggaacactagagaaggctggtcagtacccactctggagcatttctcatcagtagttcacatacaaatcatccatccttgccaatagtgtcatcctcacagtgaacactcagtggcccatggcattttataggcatacctcctatgggttgtcaccaagctaggtgctatttgtcatctgctcctgttcacaccagagaaccaggctacaagagaaaaagcagaggccaagagtttgagggagaaatagtcggtgaagaaaccgtatccataaagacccgattccaccaaatgtgctttgagaaggataggccttcattaacaaaatgtatgtctggttccccagtagagctctactgcctcaacccaaggggatttttatgtctggggcagaaacactcaagttgattagaaagaccaggccaatgtcagggtacctggggccaaacccacctgctagtgtgaattaaagtactttaattttgttttctgtggaggtggaaaagcaacattcatagtctttggagaaatgcttagaaattcagcatttgacccttgctgtgaattaagcccaattaattcctgtttgtctacatatgatctgtctgtggcaaaagtttaatcagaggaaattctttcccagtctgtcgatttatgcctcagccacttgcctgtgctacaattcattgtgttacctgtagattcaggtaatacaaactatatataatcatcaagtaatacaaactaatttagtaatagcctgggttaagtattattagggccctgtgtctgctgtagaaaaaaaaattcacatgatgcacttcaaattcaaataaaaatccttttggcatgttcccatttttgcttagctcaattagtgtggctaaccaagagataactgtaaatgtgacattgatttgctcttactacagcttcagtgattgggggaggaaaagtcccaacccaatgggctcaaacttctaaggggtactcctctcatccccttatccttctccctcgacattttctccctctttcttcccatgaccccaaagccaagggcaacagatcagtaaagaacgtggtcagagtagaacccctgaagtattttttaatcctacctcaaaatttaacagttacctgagagatttaacattatctagttcattgaatcattgtatgtggtcatggataaattgcacaccttggaattcgctttctaaaggaaatcaaatgaatggaggaactttccaaacaccactttacttgtgttatatagccaatataactatctctactgaatgtcattgaaaaactaaaaaattaaacttatttacaaataggtaaatatttgtcattgaatccattgccatcccatttgactgttcttttcatcctactgtctagtaataagctgagtataagatgacagtgtaatctccctgaaagcaggagctactttctttcttttgtaatctatttccatccccatttccctgtcctgtctccctgtattcactcccaagctcagttctgaatagacattcctgctcagagatactcccaactgatgcagaaaccaaataaagaggtaggtattccaagaattcaagaatggacattagtaaagaataaaacatttatttgagcttggaattatttggatcatctatatggcctaaaaatatatggactatgcctgtgtacctgaatacgtatgtagtcaggtcaagacaatcatccaaataacttagacccctaaaagcaaggccaggatttgcaatttaatgtgtcccaattaattcacttgaaaattagtaacactctgtttacgttgcctctggctggagctgcatggtggaagaagcccaactttggatccatgtacttcacccatccaatactcttgggacatttatgtgtattttatctgtatatatgaagccaatgtctatgtctacacagtcaaagtgaaatgcatgtttgatatagctgtacatagatatctattttgcaggtacaaaaatatcctgggggaaaactgggagtggaagggtggggggtgggagtgagggacatgggggagggacaggaagaggagaagtgttggtttgaacgatccaagcaaactctcccagaatcaaattacctgggtagttgttcaacttttcactctgcttagcctgtatagacaaaccccatatatttgtagaggcttggccttggaattctggaataccattggcttttcagtaggctgatgaacacattttgaaaattctattatcttcagaattttgccccattgttaagtgcttaaccgtcactcttgaatgtgcaatgtgctgtggattccattttcatcagttctgaaagaactgcaatgtgtaaattatcagtgaaatgcatgcatataagggctctatcattatcaaattgtaaggacaattgtacccttctatatctttgggcatgctagacacccccatgccttcattgagatcccattttccccctctcaagtggaaaataatcacatccagcaagctctctcattattgagaaataccatttggaaattgccactttttattcctaagcagcacctttcactgttcatgatgctaatgttccacaaaagcatgtgccattggcccactgaaggatagagggacccttttcaatctatatcagctgggctctgggactgaatctctcacctattcttgcagaaagacatactaattaaaccttgtcaaagta

SEQ ID NO: 7392 - DNA, 2388 bp, Homo sapiens
  source 1..2388: mol_type = unassigned DNA
gagtttctggagggctgaacacgtggaggcaaacaggaaggtgaagaagaacttatcctatcaggacggaaggtcctgtgctcgggatcttccagacgtcgcgcggtgtcagaaaccctgtggtgaaattcagcctgtggattccagaaatttggagtgttcttggggggaaaaatccgcacacacaaagcaacatttggaaatccctgtggactctaaattgccccctctgaggtcaaggaacacaagatggttttggaaatgctgaacccgatacattataacatcaccagcatcgtgcctgaagccatgcctgctgccaccatgccagtcctgctcctcactggcctttttctcttggtgtggaattatgagggcacatcctcaataccaggtcctggctactgcatgggaattggacccctcatctcccacggcagattcctgtggatggggatcggcagtgcctgcaactactacaaccgggtatatggagaattcatgcgagtctggatctctggagaggaaacactcattatcagcaagtcctcaagtatgttccacataatgaagcacaatcattacagctctcgattcggcagcaaacttgggctgcagtgcatcggtatgcatgagaaaggcatcatatttaacaacaatccagagctctggaaaacaactcgacccttctttatgaaagctctgtcaggccccggccttgttcgtatggtcacagtctgtgctgaatccctcaaaacacatctggacaggttggaggaggtgaccaatgaatcgggctatgtggacgtgttgacccttctgcgtcgtgtcatgctggacacctctaacacgctcttcttgaggatccctttggacgaaagtgctatcgtggttaaaatccaaggttattttgatgcatggcaagctctcctcatcaaaccagacatcttctttaagatttcttggctatacaaaaagtatgagaagtctgtcaaggatttgaaagatgccatagaagttctgatagcagaaaaaagacgcaggatttccacagaagagaaactggaagaatgtatggactttgccactgagttgattttagcagagaaacgtggtgacctgacaagagagaatgtgaaccagtgcatattggaaatgctgatcgcagctcctgacaccatgtctgtctctttgttcttcatgctatttctcattgcaaagcaccctaatgttgaagaggcaataataaaggaaatccagactgttattggtgagagagacataaagattgatgatatacaaaaattaaaagtgatggaaaacttcatttatgagagcatgcggtaccagcctgtcgtggacttggtcatgcgcaaagccttagaagatgatgtaatcgatggctacccagtgaaaaaggggacaaacattatcctgaatattggaaggatgcacagactcgagtttttccccaaacccaatgaatttactcttgaaaattttgcaaagaatgttccttataggtactttcagccatttggctttgggccccgtggctgtgcaggaaagtacatcgccatggtgatgatgaaagccatcctcgttacacttctgagacgattccacgtgaagacattgcaaggacagtgtgttgagagcatacagaagatacacgacttgtccttgcacccagatgagactaaaaacatgctggaaatgatctttaccccaagaaactcagacaggtgtctggaacactagagaaggctggtcagtacccactctggagcatttctcatcagtagttcacatacaaatcatccatccttgccaatagtgtcatcctcacagtgaacactcagtggcccatggcattttataggcatacctcctatgggttgtcaccaagctaggtgctatttgtcatctgctcctgttcacaccagagaaccaggctacaagagaaaaagcagaggccaagagtttgagggagaaatagtcggtgaagaaaccgtatccataaagacccgattccaccaaatgtgctttgagaaggataggccttcattaacaaaatgtatgtctggttccccagtagagctctactgcctcaacccaaggggatttttatgtctggggcagaaacactcaagttgattagaaagaccaggccaatgtcagggtacctggggccaaacccacctgctagtgtgaattaaagtactttaattttgttttctgtggaggtggaaaagcaacattcatagtctttggagaaatgcttagaaattcagcatttgacccttgctgtgaattaagcccaattaattcctgtttgtctacatatgatctgtctgtggcaaaagtttaatcagaggaaattctttc

SEQ ID NO: 7393 - DNA, 794 bp, Homo sapiens
  source 1..794: mol_type = unassigned DNA
ggagtttctggagggctgaacacgtggaggcaaacaggaaggtgaagaagaacttatcctatcaggacggaaggtcctgtgctcgggatcttccagacgtcgccaactgatctcttagcaacaagaagcacctttataaaagatggcacacgaagagtgattgccagaaaagccacctggttcttaaacagccgcgcatcattagcaaaactcaccatcttcaagagtccaaaaactagaagtgaccagcagacccaggactctaaattgccccctctgaggtcaaggaacacaagatggttttggaaatgctgaacccgatacattataacatcaccagcatcgtgcctgaagccatgcctgctgccaccatgccagtcctgctcctcactggcctttttctcttggtgtggaattatgagggcacatcctcaataccaggtcctggctactgcatgggaattggacccctcatctcccacggcagattcctgtggatggggatcggcagtgcctgcaactactacaaccgggtatatggagaattcatgcgagtctggatctctggagaggaaacactcattatcagcaagtcctcaagtatgttccacataatgaagcacaatcattacagctctcgattcggcagcaaacttgggctgcagtgcatcggtatgcatgagaaaggcatcatatttaacaacaatccagagctctggaaaacaactcgacccttctttatgaaagctctgtcaggccccggccttgttcgtatggtcacagtctgtgctgaa

SEQ ID NO: 7394 - DNA, 1697 bp, Homo sapiens
  source 1..1697: mol_type = unassigned DNA
ggagctatagatgaaccttttaggggattctgtaatttttctgtccctttgatttccacaggactctaaattgccccctctgaggtcaaggaacacaagatggttttggaaatgctgaacccgatacattataacatcaccagcatcgtgcctgaagccatgcctgctgccaccatgccagtcctgctcctcactggcctttttctcttggtgtggaattatgagggcacatcctcaataccaggtcctggctactgcatgggaattggacccctcatctcccacggcagattcctgtggatggggatcggcagtgcctgcaactactacaaccgggtatatggagaattcatgcgagtctggatctctggagaggaaacactcattatcagcaagtcctcaagtatgttccacataatgaagcacaatcattacagctctcgattcggcagcaaacttgggctgcagtgcatcggtatgcatgagaaaggcatcatatttaacaacaatccagagctctggaaaacaactcgacccttctttatgaaagctctgtcaggccccggccttgttcgtatggtcacagtctgtgctgaatccctcaaaacacatctggacaggttggaggaggtgaccaatgaatcgggctatgtggacgtgttgacccttctgcgtcgtgtcatgctggacacctctaacacgctcttcttgaggatccctttggacggtactgaaattttcactctcacatcttgaccatctgtcctttactgaacaaggagctaggagggataacagaccaaaggaatcacatgccattttctacattgctcttgtttaaacatttctaagtactcctcgtttttttccctagtgtttctgctttgttcacttataaaatataaatttccataaagtaggggccagcatctactagccttttgtatctttcctcattactctaggaaatagaattctacccacagttgaaacttaacaaatgtgattagttcgtttggttattaacatatcctaccaccaatcaactttatatatttaaccatttccagttgttcttttgggcatgatatatacatacatatatacatacatacccacacatatatacacacactcctccctcaaagctactaaacatgaaaacattgtgcctatatgataaaaatgtcaatattgctggtgatactgatgctgatggaaatgacgatattagctgccattaacgtagtatctaatgtgtgccaaacaatattaaaaattgctgtatatacatgtttgccatttattatttataaccttaacaagatgtctcactcataagactactttccgcactatgatacagaaatgaatattaaaacatgtgcatgctcatgtcaaactcatagaacttgattttattttggcaggattaaaccaatttgcaacttgagtacaaatgccaatatttcagctagttcttgaaaagttgtgccattgtgcaaaagtcattgaattatttgataactttttaacctaatgaccaaacacctgacaggaatggaattcactggacttgtatctaattgttttacactgttttctatgggttacattttttattgccattgtgacctttatccacacactaacctggaaagtataggaataaaagaattggcattctttctgataca

SEQ ID NO: 7395 - DNA, 1179 bp, Homo sapiens
  source 1..1179: mol_type = unassigned DNA
ggagctatagatgaaccttttaggggattctgtaatttttctgtccctttgatttccacaggactctaaattgccccctctgaggtcaaggaacacaagatggttttggaaatgctgaacccgatacattataacatcaccagcatcgtgcctgaagccatgcctgctgccaccatgccagtcctgctcctcactggcctttttctcttggtgtggaattatgagggcacatcctcaataccaggtcctggctactgcatgggaattggacccctcatctcccacggcagattcctgtggatggggatcggcagtgcctgcaactactacaaccgggtatatggagaattcatgcgagtctggatctctggagaggaaacactcattatcagcaagtcctcaagtatgttccacataatgaagcacaatcattacagctctcgattcggcagcaaacttgggctgcagtgcatcggtatgcatgagaaaggcatcatatttaacaacaatccagagctctggaaaacaactcgacccttctttatgaaagctctgtcaggccccggccttgttcgtatggtcacagtctgtgctgaatccctcaaaacacatctggacaggttggaggaggtgaccaatgaatcgggctatgtggacgtgttgacccttctgcgtcgtgtcatgctggacacctctaacacgctcttcttgaggatccctttggacgaaagtgctatcgtggttaaaatccaaggttattttgatgcatggcaagctctcctcatcaaaccagacatcttctttaagatttcttggctatacaaaaagtatgagaagtctgtcaaggatttgaaagatgccatagaagttctgatagcagaaaaaagacgcaggatttccacagaagagaaactggaagaatgtatggactttgccactgagttgattttagcagagaaacgtggtgacctgacaagagagaatgtgaaccagtgcatattggaaatgctgatcgcagctcctgacaccatgtctgtctctttgttcttcatgctatttctcattgcaaagcaccctaatgttgaagaggcaataataaaggaaatccagactgttattggtgagagagacataaagattgatgatatacaaaaattaaaaaaacatgatgctaaataa

SEQ ID NO: 7396 - DNA, 1442 bp, Homo sapiens
  source 1..1442: mol_type = unassigned DNA
gggagtttctggagggctgaacacgtggaggcaaacaggaaggtgaagaagaacttatcctatcaggacggaaggtcctgtgctcgggatcttccagacgtcgccatgtggaaaagctccctgagttccccgcctgccccacctgctgatttctcaggaccgctgataacagctttcatgtggaacttgggattaatatcaagcaagccatggattttgtctccactgaacttgggcatcatggacagtttccattccagcagttaagggcttcctgactttcaacagtggtgctgatcccagttctgaagagtggaacatcagagagcctcccctcctcagccacttgactctaaattgccccctctgaggtcaaggaacacaagatggttttggaaatgctgaacccgatacattataacatcaccagcatcgtgcctgaagccatgcctgctgccaccatgccagtcctgctcctcactggcctttttctcttggtgtggaattatgagggcacatcctcaataccaggtcctggctactgcatgggaattggacccctcatctcccacggcagattcctgtggatggggatcggcagtgcctgcaactactacaaccgggtatatggagaattcatgcgagtctggatctctggagaggaaacactcattatcagcaagtcctcaagtatgttccacataatgaagcacaatcattacagctctcgattcggcagcaaacttgggctgcagtgcatcggtatgcatgagaaaggcatcatatttaacaacaatccagagctctggaaaacaactcgacccttctttatgaaagctctgtcaggccccggccttgttcgtatggtcacagtctgtgctgaatccctcaaaacacatctggacaggttggaggaggtgaccaatgaatcgggctatgtggacgtgttgacccttctgcgtcgtgtcatgctggacacctctaacacgctcttcttgaggatccctttggacgaaagtgctatcgtggttaaaatccaaggttattttgatgcatggcaagctctcctcatcaaaccagacatcttctttaagatttcttggctatacaaaaagtatgagaagtctgtcaaggatttgaaagatgccatagaagttctgatagcagaaaaaagacgcaggatttccacagaagagaaactggaagaatgtatggactttgccactgagttgattttagcagagaaacgtggtgacctgacaagagagaatgtgaaccagtgcatattggaaatgctgatcgcagctcctgacaccatgtctgtctctttgttcttcatgctatttctcattgcaaagcaccctaatgttgaagaggcaataataaaggaaatccagactgttattggtgagagagacataaagattgatgatatacaaaaa

SEQ ID NO: 7397 - DNA, 1062 bp, Homo sapiens
  source 1..1062: mol_type = unassigned DNA
tcagggagtttctggagggctgaacacgtggaggcaaacaggaaggtgaagaagaacttatcctatcaggacggaaggtcctgtgctcgggatcttccagacgtcgcgaccgctgataacagctttcatgtggaacttgggattaatatcaagcaagccatggattttgtctccactgaacttgggcatcatggacagtttccattccagcagttaagggcttcctgactttcaacagtggtgctgatcccagttctgaagagtggaacatcagagagcctcccctcctcagccacttgactctaaattgccccctctgaggtcaaggaacacaagatggttttggaaatgctgaacccgatacattataacatcaccagcatcgtgcctgaagccatgcctgctgccaccatgccagtcctgctcctcactggcctttttctcttggtgtggaattatgagggcacatcctcaataccaggtcctggctactgcatgggaattggacccctcatctcccacggcagattcctgtggatggggatcggcagtgcctgcaactactacaaccgggtatatggagaattcatgcgagtctggatctctggagaggaaacactcattatcagcaagtcctcaagtatgttccacataatgaagcacaatcattacagctctcgattcggcagcaaacttgggctgcagtgcatcggtatgcatgagaaaggcatcatatttaacaacaatccagagctctggaaaacaactcgacccttctttatgaaagctctgtcaggccccggccttgttcgtatggtcacagtctgtgctgaatccctcaaaacacatctggacaggttggaggaggtgaccaatgaatcgggctatgtggacgtgttgacccttctgcgtcgtgtcatgctggacacctctaacacgctcttcttgaggatccctttggacgaaagtgctatcgtggttaaaatccaaggttattttgatgcatggcaagctctcctcatcaaaccagacatcttctttaagatttcttggctatacaaa

SEQ ID NO: 7398 - DNA, 1793 bp, Homo sapiens
  source 1..1793: mol_type = unassigned DNA
actccactgtcagatccctctccaactcttcctgtgtgggatgatggcatttttcacagaagaagggggacatgttgatatggcctacaagcatgtggaaaagctccctgagttccccgcctgccccacctgctgatttctcaggaccgctgataacagctttcatgtggaacttgggattaatatcaagcaagccatggattttgtctccactgaacttgggcatcatggacagtttccattccagcagttaagggcttcctgactttcaacagtggtgctgatcccagttctgaagagtggaacatcagagagcctcccctcctcagccacttgactctaaattgccccctctgaggtcaaggaacacaagatggttttggaaatgctgaacccgatacattataacatcaccagcatcgtgcctgaagccatgcctgctgccaccatgccagtcctgctcctcactggcctttttctcttggtgtggaattatgagggcacatcctcaataccaggtcctggctactgcatgggaattggacccctcatctcccacggcagattcctgtggatggggatcggcagtgcctgcaactactacaaccgggtatatggagaattcatgcgagtctggatctctggagaggaaacactcattatcagcaagtcctcaagtatgttccacataatgaagcacaatcattacagctctcgattcggcagcaaacttgggctgcagtgcatcggtatgcatgagaaaggcatcatatttaacaacaatccagagctctggaaaacaactcgacccttctttatgaaagctctgtcaggccccggccttgttcgtatggtcacagtctgtgctgaatccctcaaaacacatctgctcctgttcacacctgctagtgtgaattaaagtactttaattttgttttctgtggaggtggaaaagcaacattcatagtctttggagaaatgcttagaaattcagcatttgacccttgctgtgaattaagcccaattaattcctgtttgtctacatatgatctgtctgtggcaaaagtttaatcagaggaaattctttcccagtctgtcgatttatgcctcagccacttgcctgtgctacaattcattgtgttacctgtagattcaggtaatacaaactatatataatcatcaagtaatacaaactaatttagtaatagcctgggttaagtattattagggccctgtgtctgctgtagaaaaaaaaattcacatgatgcacttcaaattcaaataaaaatccttttggcatgttcccatttttgcttagctcaattagtgtggctaaccaagagataactgtaaatgtgacattgatttgctcttactacagcttcagtgattgggggaggaaaagtcccaacccaatgggctcaaacttctaaggggtactcctctcatccccttatccttctccctcgacattttctccctctttcttcccatgaccccaaagccaagggcaacagatcagtaaagaacgtggtcagagtagaacccctgaagtattttttaatcctacctcaaaatttaacagttacctgagagatttaacattatctagttcattgaatcattgtatgtggtcatggataaattgcacaccttggaattcgctttctaaaggaaatcaaatgaatggaggaactttccaaacaccactttacttgtgttatatagccaatataactatctctactgaatgtcattgaaaaactaaaaaattaaacttatttacaaatagg

SEQ ID NO: 7399 - DNA, 832 bp, Homo sapiens
  source 1..832: mol_type = unassigned DNA
cgtggaggcaaacaggaaggtgaagaagaacttatcctatcaggacggaaggtcctgtgctcgggatcttccagacgtcgcgactctaaattgccccctctgaggtcaaggaacacaagatggttttggaaatgctgaacccgatacattataacatcaccagcatcgtgcctgaagccatgcctgctgccaccatgccagtcctgctcctcactggcctttttctcttggtgtggaattatgagggcacatcctcaataccaggtcctggctactgcatgggaattggacccctcatctcccacggcagattcctgtggatggggatcggcagtgcctgcaactactacaaccgggtatatggagaattcatgcgagtctggatctctggagaggaaacactcattatcagcaagtcctcaagtatgttccacataatgaagcacaatcattacagctctcgattcggcagcaaacttgggctgcagtgcatcggtatgcatgagaaaggcatcatatttaacaacaatccagagctctggaaaacaactcgacccttctttatgaaagctctgtcaggccccggccttgttcgtatggtcacagtctgtgctgaatccctcaaaacacatctggacaggttggaggaggtgaccaatgaatcgggctatgtggacgtgttgacccttctgcgtcgtgtcatgctggacacctctaacacgctcttcttgaggatccctttggacggtactgaaattttcactctcacatcttgaccatctgtcctttactgaacaaggagctaggagggataacagaccaaaggaatcac

SEQ ID NO: 7400 - DNA, 1196 bp, Homo sapiens
  source 1..1196: mol_type = unassigned DNA
gagtttctggagggctgaacacgtggaggcaaacaggaaggtgaagaagaacttatcctatcaggacggaaggtcctgtgctcgggatcttccagacgtcgcgactctaaattgccccctctgaggtcaaggaacacaagatggttttggaaatgctgaacccgatacattataacatcaccagcatcgtgcctgaagccatgcctgctgccaccatgccagtcctgctcctcactggcctttttctcttggtgtggaattatgagggcacatcctcaataccaggtcctggctactgcatgggaattggacccctcatctcccacggcagattcctgtggatggggatcggcagtgcctgcaactactacaaccgggtatatggagaattcatgcgagtctggatctctggagaggaaacactcattatcagcaagtcctcaagtatgttccacataatgaagcacaatcattacagctctcgattcggcagcaaacttgggctgcagtgcatcggtatgcatgagaaaggcatcatatttaacaacaatccagagctctggaaaacaactcgacccttctttatgaaagctctgtcaggccccggccttgttcgtatggtcacagtctgtgctgaatccctcaaaacacatctggacaggttggaggaggtgaccaatgaatcgggctatgtggacgtgttgacccttctgcgtcgtgtcatgctggacacctctaacacgctcttcttgaggatccctttggacgaaagtgctatcgtggttaaaatccaaggttattttgatgcatggcaagctctcctcatcaaaccagacatcttctttaagatttcttggctatacaaaaagtatgagaagtctgtcaaggatttgaaagatgccatagaagttctgatagcagaaaaaagacgcaggatttccacagaagagaaactggaagaatgtatggactttgccactgagttgattttagcagagaaacgtggtgacctgacaagagagaatgtgaaccagtgcatattggaaatgctgatcgcagctcctgacaccatgtctgtctctttgttcttcatgctatttctcattgcaaagcaccctaatgttgaagaggcaataataaaggaaatccagactgttattggtgagagagacataaagattgatgatatacaaaaa

SEQ ID NO: 7401 - DNA, 1032 bp, Homo sapiens
  source 1..1032: mol_type = unassigned DNA
gaacacgtggaggcaaacaggaaggtgaagaagaacttatcctatcaggacggaaggtcctgtgctcgggatcttccagacgtcgcgtatgtatctcttaatctgactgagccctcaacctgtgggatcagacactctttccaggactctaaattgccccctctgaggtcaaggaacacaagatggttttggaaatgctgaacccgatacattataacatcaccagcatcgtgcctgaagccatgcctgctgccaccatgccagtcctgctcctcactggcctttttctcttggtgtggaattatgagggcacatcctcaataccaggtcctggctactgcatgggaattggacccctcatctcccacggcagattcctgtggatggggatcggcagtgcctgcaactactacaaccgggtatatggagaattcatgcgagtctggatctctggagaggaaacactcattatcagcaagtcctcaagtatgttccacataatgaagcacaatcattacagctctcgattcggcagcaaacttgggctgcagtgcatcggtatgcatgagaaaggcatcatatttaacaacaatccagagctctggaaaacaactcgacccttctttatgaaagctctgtcaggccccggccttgttcgtatggtcacagtctgtgctgaatccctcaaaacacatctggacaggttggaggaggtgaccaatgaatcgggctatgtggacgtgttgacccttctgcgtcgtgtcatgctggacacctctaacacgctcttcttgaggatccctttggacgaaagtgctatcgtggttaaaatccaaggttattttgatgcatggcaagctctcctcatcaaaccagacatcttctttaagatttcttggctatacaaaaagtatgagaagtctgtcaaggatttgaaagatgccatagaagttctgatagcagaaaaaagacgcaggatttccacagaagagaaactggaagaatgtatggactttgccactgagttgattt

SEQ ID NO: 7402 - DNA, 592 bp, Homo sapiens
  source 1..592: mol_type = unassigned DNA
gaacgtgaccaactggagcctgacaggaggtccctggcactggtcagcccatcaaaccaggactctaaattgccccctctgaggtcaaggaacacaagatggttttggaaatgctgaacccgatacattataacatcaccagcatcgtgcctgaagccatgcctgctgccaccatgccagtcctgctcctcactggcctttttctcttggtgtggaattatgagggcacatcctcaataccaggtcctggctactgcatgggaattggacccctcatctcccacggcagattcctgtggatggggatcggcagtgcctgcaactactacaaccgggtatatggagaattcatgcgagtctggatctctggagaggaaacactcattatcagcaagtcctcaagtatgttccacataatgaagcacaatcattacagctctcgattcggcagcaaacttgggctgcagtgcatcggtatgcatgagaaaggcatcatatttaacaacaatccagagctctggaaaacaactcgacccttctttatgaaagctctgtcaggccccggccttgttcgtatggtcacagtctgtgc

SEQ ID NO: 7403 - DNA, 1958 bp, Homo sapiens
  source 1..1958: mol_type = unassigned DNA
acattataaaacagtaagtgaatctgtactgtacagcaccctctgaagcaacaggagctatagatgaaccttttaggggattctgtaatttttctgtccctttgatttccacaggactctaaattgccccctctgaggtcaaggaacacaagatggttttggaaatgctgaacccgatacattataacatcaccagcatcgtgcctgaagccatgcctgctgccaccatgccagtcctgctcctcactggcctttttctcttggtgtggaattatgagggcacatcctcaataccaggtcctggctactgcatgggaattggacccctcatctcccacggcagattcctgtggatggggatcggcagtgcctgcaactactacaaccgggtatatggagaattcatgcgagtctggatctctggagaggaaacactcattatcagcaagtcctcaagtatgttccacataatgaagcacaatcattacagctctcgattcggcagcaaacttgggctgcagtgcatcggtatgcatgagaaaggcatcatatttaacaacaatccagagctctggaaaacaactcgacccttctttatgaaagctctgtcaggccccggccttgttcgtatggtcacagtctgtgctgaatccctcaaaacacatctggacaggttggaggaggtgaccaatgaatcgggctatgtggacgtgttgacccttctgcgtcgtgtcatgctggacacctctaacacgctcttcttgaggatccctttggacgaaagtgctatcgtggttaaaatccaaggttattttgatgcatggcaagctctcctcatcaaaccagacatcttctttaagatttcttggctatacaaaaagtatgagaagtctgtcaaggatttgaaagatgccatagaagttctgatagcagaaaaaagacgcaggatttccacagaagagaaactggaagaatgtatggactttgccactgagttgattttagcagagaaacgtggtgacctgacaagagagaatgtgaaccagtgcatattggaaatgctgatcgcagctcctgacaccatgtctgtctctttgttcttcatgctatttctcattgcaaagcaccctaatgttgaagaggcaataataaaggaaatccagactgttattggtgagagagacataaagattgatgatatacaaaaattaaaagtgatggaaaacttcatttatgagagcatgcggtaccagcctgtcgtggacttggtcatgcgcaaagccttagaagatgatgtaatcgatggctacccagtgaaaaaggggacaaacattatcctgaatattggaaggatgcacagactcgagtttttccccaaacccaatgaatttactcttgaaaattttgcaaagaatgttccttataggtactttcagccatttggctttgggccccgtggctgtgcaggaaagtacatcgccatggtgatgatgaaagccatcctcgttacacttctgagacgattccacgtgaagacattgcaaggacagtgtgttgagagcatacagaagatacacgacttgtccttgcacccagatgagactaaaaacatgctggaaatgatctttaccccaagaaactcagacaggtgtctggaacactagagaaggctggtcagtacccactctggagcatttctcatcagtagttcacatacaaatcatccatccttgccaatagtgtcatcctcacagtgaacactcagtggcccatggcattttataggcatacctcctatgggttgtcaccaagctaggtgctatttgtcatctgctcctgttcacaccagagaaccaggctacaagagaaaaagcagaggccaagagtttgagggagaaatagtcggtgaagaaaccgtatccataaagacccgattccaccaaatgtgctttgagaag

SEQ ID NO: 7404 - DNA, 993 bp, Homo sapiens
  source 1..993: mol_type = unassigned DNA
gggagtttctggagggctgaacacgtggaggcaaacaggaaggtgaagaagaacttatcctatcaggacggaaggtcctgtgctcgggatcttccagacgtcgcactccactgtcagatccctctccaactcttcctgtgtgggatgatggcatttttcacagaagaagggggacatgttgatatggcctacaagcatgtggaaaagctccctgagttccccgcctgccccacctgctgatttctcaggaccgctgataacagctttcatgtggaacttgggattaatatcaagcaagccatggattttgtctccactgaacttgggcatcatggacagtttccattccagcagttaagggcttcctgactttcaacagtggtgctgatcccagttctgaagagtggaacatcagagagcctcccctcctcagccacttgactctaaattgccccctctgaggtcaaggaacacaagatggttttggaaatgctgaacccgatacattataacatcaccagcatcgtgcctgaagccatgcctgctgccaccatgccagtcctgctcctcactggcctttttctcttggtgtggaattatgagggcacatcctcaataccaggtcctggctactgcatgggaattggacccctcatctcccacggcagattcctgtggatggggatcggcagtgcctgcaactactacaaccgggtatatggagaattcatgcgagtctggatctctggagaggaaacactcattatcagcaagtcctcaagtatgttccacataatgaagcacaatcattacagctctcgattcggcagcaaacttgggctgcagtgcatcggtatgcatgagaaaggcatcatatttaacaacaatccagagctctggaaaacaactcgacccttctttatgaaagctctgtcaggccccggccttgttcgtatggtcacagtctgtgctgaatccctcaaaacacatctg

SEQ ID NO: 7405 - DNA, 872 bp, Homo sapiens
  source 1..872: mol_type = unassigned DNA
gagtttctggagggctgaacacgtggaggcaaacaggaaggtgaagaagaacttatcctatcaggacggaaggtcctgtgctcgggatcttccagacgtcgcgactctaaattgccccctctgaggtcaaggaacacaagatggttttggaaatgctgaacccgatacattataacatcaccagcatcgtgcctgaagccatgcctgctgccaccatgccagtcctgctcctcactggcctttttctcttggtgtggaattatgagggcacatcctcaataccaggtcctggctactgcatgggaattggacccctcatctcccacggcagattcctgtggatggggatcggcagtgcctgcaactactacaaccgggtatatggagaattcatgcgagtctggatctctggagaggaaacactcattatcagcaagtcctcaagtatgttccacataatgaagcacaatcattacagctctcgattcggcagcaaacttgggctgcagtgcatcggtatgcatgagaaaggcatcatatttaacaacaatccagagctctggaaaacaactcgacccttctttatgaaagaaagtgctatcgtggttaaaatccaaggttattttgatgcatggcaagctctcctcatcaaaccagacatcttctttaagatttcttggctatacaaaaagtatgagaagtctgtcaaggatttgaaagatgccatagaagttctgatagcagaaaaaagacgcaggatttccacagaagagaaactggaagaatgtatggactttgccactgagttgattttagcagagaaacgtggtgacctgacaagagagaatgtgaaccagtgcatattggaaatg

SEQ ID NO: 7406 - DNA, 1747 bp, Homo sapiens
  source 1..1747: mol_type = unassigned DNA
actgccaccatgctggcctcagggctgcttctggtgaccttgctggcctgcctgactgtgatggtcttgatgtcagtctggcggcagaggaagagcagggggaagctgcctccgggacccaccccattgcccttcattggaaactacctgcagctgaacacagagcagatgtacaactccctcatgaagatcagtgagcgctatggccctgtgttcaccattcacttggggccccggcgggtcgtggtgctgtgcggacatgatgccgtcaaggaggctctggtggaccaggctgaggagttcagcgggcgaggcgagcaggccaccttcgactggctcttcaaaggctatggcgtggcgttcagcaacggggagcgcgccaagcagctccggcgcttctccatcgccaccctaaggggttttggcgtgggcaagcgcggcatcgaggaacgcatccaggaggaggcgggcttcctcatcgacgccctccggggcacgcacggcgccaatatcgatcccaccttcttcctgagccgcacagtctccaatgtcatcagctccattgtctttggggaccgctttgactatgaggacaaagagttcctgtcactgttgcgcatgatgctgggaagcttccagttcacggcaacctccacggggcagctctatgagatgttctcttcggtgatgaaacacctgccaggaccacagcaacaggcctttaaggagctgcaagggctggaggacttcatcgccaagaaggtggagcacaaccagcgcacgctggatcccaattccccacgggacttcatcgactcctttctcatccgcatgcaggaggaggagaagaaccccaacacagagttctacttgaagaacctggtgatgaccaccctgaacctcttctttgcgggcactgagaccgtgagcaccaccctgcgctacggtttcctgctgctcatgaagcacccagaggtggaggccaaggtccatgaggagattgacagagtgatcggcaagaaccggcagcccaagtttgaggaccgggccaagatgccctacacagaggcagtgatccacgagatccaaagatttggagacatgctccccatgggtttggcccacagggtcaacaaggacaccaagtttcgggatttcttcctccctaagggcactgaagtgttccctatgctgggctccgtgctgagagaccccaggttcttctccaacccccgggacttcaatccccagcacttcctggataagaaggggcagtttaagaagagtgatgcttttgtgcccttttccatcggaaagcggtactgttttggagaaggcctggccagaatggagctctttctcttcttcaccaccatcatgcagaactttcgcttcaagtcccctcagtcgcctaaggatatcgacgtgtcccccaaacacgtgggctttgccacgatcccacgaaactacaccatgagcttcctgccccgctgagcgagggctgtgctggtgcagggctggtgggcggggccagggaaacggccggggcaggggcggggcttgtgggaggggcggggctaagaatgggggcagtgggggaaggaaggggagaggtggttagagggaacagaagaaacagaaggggctcagttcaccttgatgatgtccttcagagctgtgatgagaggaagggaaaccttacagtatgctacaaagagtagtaataatagcagctcttatttcctga

SEQ ID NO: 7407 - DNA, 1763 bp, Homo sapiens
  source 1..1763: mol_type = unassigned DNA
atctatcatcccactaccaccatgctggcctcagggatgcttctggtggccttgctggtctgcctgactgtaatggtcttgatgtctgtttggcagcagaggaagagcaaggggaagctgcctccgggacccaccccattgcccttcattggaaactacctgcagctgaacacagagcagatgtacaactccctcatgaagatcagtgagcgctatggccccgtgttcaccattcacttggggccccggcgggtcgtggtgctgtgtggacatgatgccgtcagggaggctctggtggaccaggctgaggagttcagcgggcgaggcgagcaagccaccttcgactgggtcttcaaaggctatggcgtggtattcagcaacggggagcgcgccaagcagctccggcgcttctccatcgccaccctgcgggacttcggggtgggcaagcgaggcatcgaggagcgcatccaggaggaggcgggcttcctcatcgacgccctccggggcactggcggcgccaatatcgatcccaccttcttcctgagccgcacagtctccaatgtcatcagctccattgtctttggggaccgctttgactataaggacaaagagttcctgtcactgttgcgcatgatgctaggaatcttccagttcacgtcaacctccacggggcagctctatgagatgttctcttcggtgatgaaacacctgccaggaccacagcaacaggcctttcagttgctgcaagggctggaggacttcatagccaagaaggtggagcacaaccagcgcacgctggatcccaattccccacgggacttcattgactcctttctcatccgcatgcaggaggaggagaagaaccccaacacggagttctacttgaaaaacctggtgatgaccacgttgaacctcttcattgggggcaccgagaccgtcagcaccaccctgcgctatggcttcttgctgctcatgaagcacccagaggtggaggccaaggtccatgaggagattgacagagtgatcggcaagaaccggcagcccaagtttgaggaccgggccaagatgccctacatggaggcagtgatccacgagatccaaagatttggagacgtgatccccatgagtttggcccgcagagtcaaaaaggacaccaagtttcgggatttcttcctccctaagggcaccgaagtgttccctatgctgggctctgtgctgagagaccccagtttcttctccaacccccaggacttcaatccccagcacttcctgaatgagaaggggcagtttaagaagagtgatgcttttgtgcccttttccatcggaaagcggaactgtttcggagaaggcctggccagaatggagctctttctcttcttcaccaccgtcatgcagaacttccgcctcaagtcctcccagtcacctaaggacattgacgtgtcccccaaacacgtgggctttgccacgatcccacgaaactacaccatgagcttcctgccccgctgagcgagggctgtgccggtgcaggtctggtgggcggggccagggaaagggcagggccaagaccgggcttgggagaggggcgcagctaagactgggggcaggatggcggaaaggaaggggcgtggtggctagagggaagagaagaaacagaagcggctcagttcaccttgataaggtgcttccgagctgggatgagaggaaggaaacccttacattatgctatgaagagtagtaataatagcagctcttatttcctgagc

SEQ ID NO: 7408 - DNA, 2128 bp, Homo sapiens
  source 1..2128: mol_type = unassigned DNA
ccctgggtcttcctagccccgagactttcaagtccatatgcctggagtcccccctcctgagacccttaaccctgcatcctccgcaacagaagacctccagatgcacagccacacttccatctcaccctaataaaacccagacctttggattcctctcccttggaatgcccaaatccacaactttggggtgcattctcactctcagaccccaaatccaaagcccaagtgctcccctatgcaaatattccaaactcttcagttctacagtttatcggttgccccctcctaaatccacagccctgcggcacccctcctgaagtaccacagatttagtctggaggccccctctctgttcagctgccctggggtccccttatcctcccttgctggctgtgtcccaagctaggtggcattcatggtggggcgtgtagttgggaggtgaaataaggtgattatgtaattagccaaagtccatccctctttttcaggcagtataaaggcaaaccaccccacccatcaccatctgtcatctcactaccaccatgctggcctcagggctgcttctggtggccttgctggcctgcctgactgtgatggtcttgatgtctgtctggcagcagaggaagagcagggggaagctgcctccgggacccaccccactgcccttcattggaaactacctccagctgaacacagagcacatatgtgactccatcatgaaggtgtcccaaggcgtggcgttcagcaacggggagcgcgccaagcagctcctgcgctttgccatcgccaccctgagggacttcggggtgggcaagcgaggcatcgaggagcgcatccaggaggagtcgggcttcctcatcgaggccatccggagcacgcacggcgccaatatcgatcccaccttcttcctgagccgcacagtctccaatgtcatcagctccattgtctttggggaccgctttgactatgaggacaaagagttcctgtcactgctgagcatgatgctaggaatcttccagttcacgtcaacctccacggggcagctctatgagatgttctcttcggtgatgaaacacctgccaggaccacagcaacaggcctttaagttgctgcaagggctggaggacttcatagccaagaaggtggagcacaaccagcgcacgctggatcccaattccccacaggacttcatcgactcctttctcatccacatgcaggaggaggagaagaaccccaacacggagttctacttgaagaacctgatgatgagcacgttgaacctcttcattgcaggcaccgagacggtcagcaccaccctgcgctatggcttcttgctgctcatgaagcacccagaggtggaggccaaggtccatgaggagattgacagagtgatcggcaagaaccggcagcccaagtttgaggaccggaccaagatgccctacatggaggcagtgatccacgagatccaaagatttggagacgtgatccccatgagtttggcccgcagggttaaaaaggacaccaagtttcgggattttttcctccctaagggcaccgaagtgttccctatgctgggctccgtgctgagagaccccagcttcttctccaaccctcaggacttcaatccccagcatttcctggatgacaaggggcagtttaagaagagtgatgcttttgtgcccttttccatcggaaagcggaactgtttcggagaaggcctggccagaatggagctctttctcttcttcaccaccgtcatgcagaacttccgcctcaagtcctcccagtcacctaaggacattgacgtgtcccccaaacacgtggtctttgccacgatcccacgaaactacaccatgagcttcctgccccgctgagcgagggctgtgccggtgcaggtctggtgggcggggccagggaaaggcggggtcagggcggggttcgcggaagaggcgggtataagaatggggggaagatgcgggaaaggaaggggcgtggtggctagagggaagagaagaaacagaagcggctcagttcaccttgataaggtgcttccgagctgggatgagaggaagggaaaccttacattatgctatgaagagtagtaataatagcagctcttatttcctga

SEQ ID NO: 7409 - DNA, 2281 bp, Homo sapiens
  source 1..2281: mol_type = unassigned DNA
ccctgggtcttcctagccccgagactttcaagtccatatgcctggagtcccccctcctgagacccttaaccctgcatcctccgcaacagaagacctccagatgcacagccacacttccatctcaccctaataaaacccagacctttggattcctctcccttggaatgcccaaatccacaactttggggtgcattctcactctcagaccccaaatccaaagcccaagtgctcccctatgcaaatattccaaactcttcagttctacagtttatcggttgccccctcctaaatccacagccctgcggcacccctcctgaagtaccacagatttagtctggaggccccctctctgttcagctgccctggggtccccttatcctcccttgctggctgtgtcccaagctaggtggcattcatggtggggcgtgtagttgggaggtgaaataaggtgattatgtaattagccaaagtccatccctctttttcaggcagtataaaggcaaaccaccccacccatcaccatctgtcatctcactaccaccatgctggcctcagggctgcttctggtggccttgctggcctgcctgactgtgatggtcttgatgtctgtctggcagcagaggaagagcagggggaagctgcctccgggacccaccccactgcccttcattggaaactacctccagctgaacacagagcacatatgtgactccatcatgaagttcagtgagtgctatggccccgtgttcaccattcacttggggccccggcgggtcgtggtgctgtgtggacatgatgccgtcagggaggctctggtggaccaggctgaggagttcagcgggcgaggcgagcaagccaccttcgactgggtcttcaaaggctatggcgtggcgttcagcaacggggagcgcgccaagcagctcctgcgctttgccatcgccaccctgagggacttcggggtgggcaagcgaggcatcgaggagcgcatccaggaggagtcgggcttcctcatcgaggccatccggagcacgcacggcgccaatatcgatcccaccttcttcctgagccgcacagtctccaatgtcatcagctccattgtctttggggaccgctttgactatgaggacaaagagttcctgtcactgctgagcatgatgctaggaatcttccagttcacgtcaacctccacggggcagctctatgagatgttctcttcggtgatgaaacacctgccaggaccacagcaacaggcctttaagttgctgcaagggctggaggacttcatagccaagaaggtggagcacaaccagcgcacgctggatcccaattccccacaggacttcatcgactcctttctcatccacatgcaggaggaggagaagaaccccaacacggagttctacttgaagaacctgatgatgagcacgttgaacctcttcattgcaggcaccgagacggtcagcaccaccctgcgctatggcttcttgctgctcatgaagcacccagaggtggaggccaaggtccatgaggagattgacagagtgatcggcaagaaccggcagcccaagtttgaggaccggaccaagatgccctacatggaggcagtgatccacgagatccaaagatttggagacgtgatccccatgagtttggcccgcagggttaaaaaggacaccaagtttcgggattttttcctccctaagggcaccgaagtgttccctatgctgggctccgtgctgagagaccccagcttcttctccaaccctcaggacttcaatccccagcatttcctggatgacaaggggcagtttaagaagagtgatgcttttgtgcccttttccatcggaaagcggaactgtttcggagaaggcctggccagaatggagctctttctcttcttcaccaccgtcatgcagaacttccgcctcaagtcctcccagtcacctaaggacattgacgtgtcccccaaacacgtggtctttgccacgatcccacgaaactacaccatgagcttcctgccccgctgagcgagggctgtgccggtgcaggtctggtgggcggggccagggaaaggcggggtcagggcggggttcgcggaagaggcgggtataagaatggggggaagatgcgggaaaggaaggggcgtggtggctagagggaagagaagaaacagaagcggctcagttcaccttgataaggtgcttccgagctgggatgagaggaagggaaaccttacattatgctatgaagagtagtaataatagcagctcttatttcctga

SEQ ID NO: 7410 - DNA, 3052 bp, Homo sapiens
  source 1..3052: mol_type = unassigned DNA
caggaccatggaactcagcgtcctcctcttccttgcactcctcacaggactcttgctactcctggttcagcgccaccctaacacccatgaccgcctcccaccagggccccgccctctgccccttttgggaaaccttctgcagatggatagaagaggcctactcaaatcctttctgaggttccgagagaaatatggggacgtcttcacggtacacctgggaccgaggcccgtggtcatgctgtgtggagtagaggccatacgggaggcccttgtggacaaggctgaggccttctctggccggggaaaaatcgccatggtcgacccattcttccggggatatggtgtgatctttgccaatggaaaccgctggaaggtgcttcggcgattctctgtgaccactatgagggacttcgggatgggaaagcggagtgtggaggagcggattcaggaggaggctcagtgtctgatagaggagcttcggaaatccaagggggccctcatggaccccaccttcctcttccagtccattaccgccaacatcatctgctccatcgtctttggaaaacgattccactaccaagatcaagagttcctgaagatgctgaacttgttctaccagactttttcactcatcagctctgtattcggccagctgtttgagctcttctctggcttcttgaaatactttcctggggcacacaggcaagtttacaaaaacctgcaggaaatcaatgcttacattggccacagtgtggagaagcaccgtgaaaccctggaccccagcgcccccaaggacctcatcgacacctacctgctccacatggaaaaagagaaatccaacgcacacagtgaattcagccaccagaacctcaacctcaacacgctctcgctcttctttgctggcactgagaccaccagcaccactctccgctacggcttcctgctcatgctcaaataccctcatgttgcagagagagtctacagggagattgaacaggtgattggcccacatcgccctccagagcttcatgaccgagccaaaatgccatacacagaggcagtcatctatgagattcagagattttccgaccttctccccatgggtgtgccccacattgtcacccaacacaccagcttccgagggtacatcatccccaaggacacagaagtatttctcatcctgagcactgctctccatgacccacactactttgaaaaaccagacgccttcaatcctgaccactttctggatgccaatggggcactgaaaaagactgaagcttttatccccttctccttagggaagcggatttgtcttggtgaaggcatcgcccgtgcggaattgttcctcttcttcaccaccatcctccagaacttctccatggccagccccgtggccccagaagacatcgatctgacaccccaggagtgtggtgtgggcaaaatacccccaacataccagatccgcttcctgccccgctgaaggggctgagggaagggggtcaaaggattccagggtcattcagtgtccccgcctctgtagacaatggctctgactccccgcaacttcctgcctctgagagacctgctacaagccagcttccttcccctccatggcaccagttgtctgaggtcacattgcaagtgagtgcaggagtgagattatcgaaaattataatatacaaaatcatatatatatatatgttcttgttttttgagacagagtctcacactgttgcccaggctggagtgcagtggcgtgatctcggctcactgcaacctccacccccggggatcaagcaactctcctgcctcagcctccctagtagctgggattacaggcatgcactaccacgcttggctaatttttgtatttttagtagagatggggtttcactgtgtaggccaggctggtctcgaactcctgaactcaagtgattcacccaccttagcctcccaaagtgctgggattacaggcgtgagtcaccgtgcccagccatgtatatatataattttaaaaattaagctgaaattcacataacataaaattagctgttttaaagtgtaaaatttagtggcgtgtggttcattcacaaagctgtacaaccaccaccatctagttccaaacattttctttttttctgagatggagtctcactctgtcacccaggttcgagttcagtggtgccatctctgtccactgcaacctccacatcctgggttcaagtgattctcctgcctcagcctctggaggagctggtatcacaggcgtcccccaccacgcctggctaaattttgtatttttaggtggtcttgaactcctgatgtcaggtgattctcctagctccaaatgttttcattatctctcccccaacaaaacccatacctatcaagctgtcactccccataccccattctctttttcatctcggcccctgtcaatctggtttttgtcactatggacttaccaattctgaatatttcccataaacagaatcatacaatatttgattttttttttttttttgaaactaagccttgctctgtctcccaggctggagtgctatggtgcaatttttgttcactgcaacctctgccttccaagatcaagagattctccagtctcagctcccaagtagctgggattacaggcatgtactaccatgcctggctaattttcttgtagttttagtagggacatgttggccaggctggtggtgagctcctggcctcaggtgatccacccacctcagtgttccaaagtgctgatattacaggcataatatgtgatcttttgtgtctggttgctttcatgttgaatgctatttttgaggttcatgcctgttgtagaccacagtcacacactgctgtagtcttccccagtcctcattcccagctgcctcttcctactgcttccgtctatcaaaaagcccccttggcccaggttccctgagctgtgggattctgcactggtgctttggattccctgatatgttccttcaaatctgctgagaattaaataaacatctctaaagcctgacctccccacgtc

SEQ ID NO: 7411 - DNA, 1426 bp, Homo sapiens
  source 1..1426: mol_type = unassigned DNA
acaaatgaggtgtatgctgactaacagccacccctggtgtggatgtgattggcagttccgagagaaatatggggacgtcttcacggtacacctgggaccgaggcccgtggtcatgctgtgtggagtagaggccatacgggaggcccttgtggacaaggctgaggccttctctggccggggaaaaatcgccatggtcgacccattcttccggggatatggtgtgatctttgccaatggaaaccgctggaaggtgcttcggcgattctctgtgaccactatgagggacttcgggatgggaaagcggagtgtggaggagcggattcaggaggaggctcagtgtctgatagaggagcttcggaaatccaaggagagagtctacagggagattgaacaggtgattggcccacatcgccctccagagcttcatgaccgagccaaaatgccatacacagaggcagtcatctatgagattcagagattttccgaccttctccccatgggtgtgccccacattgtcacccaacacaccagcttccgagggtacatcatccccaaggacacagaagtatttctcatcctgagcactgctctccatgacccacactactttgaaaaaccagacgccttcaatcctgaccactttctggatgccaatggggcactgaaaaagactgaagcttttatccccttctccttagggaagcggatttgtcttggtgaaggcatcgcccgtgcggaattgttcctcttcttcaccaccatcctccagaacttctccatggccagccccgtggccccagaagacatcgatctgacaccccaggagtgtggtgtgggcaaaatacccccaacataccagatccgcttcctgccccgctgaaggggctgagggaagggggtcaaaggattccagggtcattcagtgtccccgcctctgtagacaatggctctgactccccgcaacttcctgcctctgagagacctgctacaagccagcttccttcccctccatggcaccagttgtctgaggtcacattgcaagtgagtgcaggagtgagattatcgaaaattataatatacaaaatcatatatatatatatgttcttgttttttgagacagagtctcacactgttgcccaggctggagtgcagtggcgtgatctcggctcactgcaacctccacccccggggatcaagcaactctcctgcctcagcctccctagtagctgggattacaggcatgcactaccacgcttggctaatttttgtatttttagtagagatggggtttcactgtgtaggccaggctggtctcgaactcctgaactcaagtgattcacccaccttagcctcccaaagtgctgggattacaggcgtgagtcaccgtgcccagccatgtatatatataattttaaaaattaagctg

SEQ ID NO: 7412 - DNA, 1901 bp, Homo sapiens
  source 1..1901: mol_type = unassigned DNA
acacacacttaattagcatggagtgttataaaaagcttggagtgcaagctcacggttgtcttaacaagaggagaaggcttcaatggatccttttgtggtccttgtgctctgtctctcatgtttgcttctcctttcaatctggagacagagctctgggagaggaaaactccctcctggccctactcctctcccagtgattggaaatatcctacagatagatattaaggatgtcagcaaatccttaaccaatctctcaaaaatctatggccctgtgttcactctgtattttggcctggaacgcatggtggtgctgcatggatatgaagtggtgaaggaagccctgattgatcttggagaggagttttctggaagaggccatttcccactggctgaaagagctaacagaggatttggaatcgttttcagcaatggaaagagatggaaggagatccggcgtttctccctcatgacgctgcggaattttgggatggggaagaggagcattgaggaccgtgttcaagaggaagcccgctgccttgtggaggagttgagaaaaaccaaggcttcaccctgtgatcccactttcatcctgggctgtgctccctgcaatgtgatctgctccattattttccagaaacgtttcgattataaagatcagcaatttcttaacttgatggaaaaattgaatgaaaacatcaggattgtaagcaccccctggatccagatatgcaataattttcccactatcattgattatttcccgggaacccataacaaattacttaaaaaccttgcttttatggaaagtgatattttggagaaagtaaaagaacaccaagaatcgatggacatcaacaaccctcgggactttattgattgcttcctgatcaaaatggagaaggaaaagcaaaaccaacagtctgaattcactattgaaaacttggtaatcactgcagctgacttacttggagctgggacagagacaacaagcacaaccctgagatatgctctccttctcctgctgaagcacccagaggtcacagctaaagtccaggaagagattgaacgtgtcgttggcagaaaccggagcccctgcatgcaggacaggggccacatgccctacacagatgctgtggtgcacgaggtccagagatacatcgacctcatccccaccagcctgccccatgcagtgacctgtgacgttaaattcagaaactacctcattcccaagggcacaaccatattaacttccctcacttctgtgctacatgacaacaaagaatttcccaacccagagatgtttgaccctcgtcactttctggatgaaggtggaaattttaagaaaagtaactacttcatgcctttctcagcaggaaaacggatttgtgtgggagagggcctggcccgcatggagctgtttttattcctgaccttcattttacagaactttaacctgaaatctctgattgacccaaaggaccttgacacaactcctgttgtcaatggatttgcttctgtcccgcccttctatcagctgtgcttcattcctgtctgaagaagcacagatggtctggctgctcctgtgctgtccctgcagctctctttcctctggtccaaatttcactatctgtgatgcttcttctgacccgtcatctcacattttcccttcccccaagatctagtgaacattcagcctccattaaaaaagtttcactgtgcaaatatatctgctattccccatactctataatagttacattgagtgccacataatgctgatacttgtctaatgttgagttattaacatattattattaaatagagaaagatgatttgtgtattataattcaaaggcatttcttctctgcatgttctaaacaaaaagcattattatttgctga

SEQ ID NO: 7413 - DNA, 1923 bp, Homo sapiens
  source 1..1923: mol_type = unassigned DNA
acatgtcaaagagacacacactaaattagcagggagtgttataaaaactttggagtgcaagctcacagctgtcttaataagaagagaaggcttcaatggaaccttttgtggtcctggtgctgtgtctctcttttatgcttctcttttcactctggagacagagctgtaggagaaggaagctccctcctggccccactcctcttcctattattggaaatatgctacagatagatgttaaggacatctgcaaatctttcaccaatttctcaaaagtctatggtcctgtgttcaccgtgtattttggcatgaatcccatagtggtgtttcatggatatgaggcagtgaaggaagccctgattgataatggagaggagttttctggaagaggcaattccccaatatctcaaagaattactaaaggacttggaatcatttccagcaatggaaagagatggaaggagatccggcgtttctccctcacaaccttgcggaattttgggatggggaagaggagcattgaggaccgtgttcaagaggaagctcactgccttgtggaggagttgagaaaaaccaaggcttcaccctgtgatcccactttcatcctgggctgtgctccctgcaatgtgatctgctccgttgttttccagaaacgatttgattataaagatcagaattttctcaccctgatgaaaagattcaatgaaaacttcaggattctgaactccccatggatccaggtctgcaataatttccctctactcattgattgtttcccaggaactcacaacaaagtgcttaaaaatgttgctcttacacgaagttacattagggagaaagtaaaagaacaccaagcatcactggatgttaacaatcctcgggactttatcgattgcttcctgatcaaaatggagcaggaaaaggacaaccaaaagtcagaattcaatattgaaaacttggttggcactgtagctgatctatttgttgctggaacagagacaacaagcaccactctgagatatggactcctgctcctgctgaagcacccagaggtcacagctaaagtccaggaagagattgatcatgtaattggcagacacaggagcccctgcatgcaggataggagccacatgccttacactgatgctgtagtgcacgagatccagagatacagtgaccttgtccccaccggtgtgccccatgcagtgaccactgatactaagttcagaaactacctcatccccaagggcacaaccataatggcattactgacttccgtgctacatgatgacaaagaatttcctaatccaaatatctttgaccctggccactttctagataagaatggcaactttaagaaaagtgactacttcatgcctttctcagcaggaaaacgaatttgtgcaggagaaggacttgcccgcatggagctatttttatttctaaccacaattttacagaactttaacctgaaatctgttgatgatttaaagaacctcaatactactgcagttaccaaagggattgtttctctgccaccctcataccagatctgcttcatccctgtctgaagaatgctagcccatctggctgccgatctgctatcacctgcaactctttttttatcaaggacattcccactattatgtcttctctgacctctcatcaaatcttcccattcactcaatatcccataagcatccaaactccattaaggagagttgttcaggtcactgcacaaatatatctgcaattattcatactctgtaacacttgtattaattgctgcatatgctaatacttttctaatgctgactttttaatatgttatcactgtaaaacacagaaaagtgattaatgaatgataatttagatccatttcttttgtgaatgtgctaaataaaaagtgttattaattgctggttc

SEQ ID NO: 7414 - DNA, 2031 bp, Homo sapiens
  source 1..2031: mol_type = unassigned DNA
gtcttaataagaagagaaggcttcaatggaaccttttgtggtcctggtgctgtgtctctcttttatgcttctcttttcactctggagacagagctgtaggagaaggaagctccctcctggccccactcctcttcctattattggaaatatgctacagatagatgttaaggacatctgcaaatctttcaccaatgtaagtctgccttatgttcctccagccaattgcaaaggttctcaaaagtctatggtcctgtgttcaccgtgtattttggcatgaatcccatagtggtgtttcatggatatgaggcagtgaaggaagccctgattgataatggagaggagttttctggaagaggcaattccccaatatctcaaagaattactaaaggacttggtaggtgcacatatttctgtgtcagctttggtaactggggtgagggggatggaaaacagagccctaaaaagcttctcagcagagcttagcctatctgcatggctgccaagtgttgcagcactttcttccttggctgtgaattctcccagtttctgccccttttttttaggaatcatttccagcaatggaaagagatggaaggagatccggcgtttctccctcacaaccttgcggaattttgggatggggaagaggagcattgaggaccgtgttcaagaggaagctcactgccttgtggaggagttgagaaaaaccaaggcttcaccctgtgatcccactttcatcctgggctgtgctccctgcaatgtgatctgctccgttgttttccagaaacgatttgattataaagatcagaattttctcaccctgatgaaaagattcaatgaaaacttcaggattctgaactccccatggatccaggtctgcaataatttccctctactcattgattgtttcccaggaactcacaacaaagtgcttaaaaatgttgctcttacacgaagttacattagggagaaagtaaaagaacaccaagcatcactggatgttaacaatcctcgggactttatcgattgcttcctgatcaaaatggagcaggaaaaggacaaccaaaagtcagaattcaatattgaaaacttggttggcactgtagctgatctatttgttgctggaacagagacaacaagcaccactctgagatatggactcctgctcctgctgaagcacccagaggtcacagctaaagtccaggaagagattgatcatgtaattggcagacacaggagcccctgcatgcaggataggagccacatgccttacactgatgctgtagtgcacgagatccagagatacagtgaccttgtccccaccggtgtgccccatgcagtgaccactgatactaagttcagaaactacctcatccccaagggcacaaccataatggcattactgacttccgtgctacatgatgacaaagaatttcctaatccaaatatctttgaccctggccactttctagataagaatggcaactttaagaaaagtgactacttcatgcctttctcagcaggaaaacgaatttgtgcaggagaaggacttgcccgcatggagctatttttatttctaaccacaattttacagaactttaacctgaaatctgttgatgatttaaagaacctcaatactactgcagttaccaaagggattgtttctctgccaccctcataccagatctgcttcatccctgtctgaagaatgctagcccatctggctgccgatctgctatcacctgcaactctttttttatcaaggacattcccactattatgtcttctctgacctctcatcaaatcttcccattcactcaatatcccataagcatccaaactccattaaggagagttgttcaggtcactgcacaaatatatctgcaattattcatactctgtaacacttgtattaattgctgcatatgctaatacttttctaatgctgactttttaatatgttatcactgtaaaacacagaaaagtgattaatgaatgataatttagatccatttcttttgtgaatgtgct

SEQ ID NO: 7415 - DNA, 1587 bp, Homo sapiens
  source 1..1587: mol_type = unassigned DNA
acatgtcaaagagacacacactaaattagcagggagtgttataaaaactttggagtgcaagctcacagctgtcttaataagaagagaaggcttcaatggaaccttttgtggtcctggtgctgtgtctctcttttatgcttctcttttcactctggagacagagctgtaggagaaggaagctccctcctggccccactcctcttcctattattggaaatatgctacagatagatgttaaggacatctgcaaatctttcaccaatgtaagtctgccttatgttcctccagccaattgcaaagggaatcatttccagcaatggaaagagatggaaggagatccggcgtttctccctcacaaccttgcggaattttgggatggggaagaggagcattgaggaccgtgttcaagaggaagctcactgccttgtggaggagttgagaaaaaccaaggcttcaccctgtgatcccactttcatcctgggctgtgctccctgcaatgtgatctgctccgttgttttccagaaacgatttgattataaagatcagaattttctcaccctgatgaaaagattcaatgaaaacttcaggattctgaactccccatggatccaggtctgcaataatttccctctactcattgattgtttcccaggaactcacaacaaagtgcttaaaaatgttgctcttacacgaagttacattagggagaaagtaaaagaacaccaagcatcactggatgttaacaatcctcgggactttatcgattgcttcctgatcaaaatggagcaggaaaaggacaaccaaaagtcagaattcaatattgaaaacttggttggcactgtagctgatctatttgttgctggaacagagacaacaagcaccactctgagatatggactcctgctcctgctgaagcacccagaggtcacagctaaagtccaggaagagattgatcatgtaattggcagacacaggagcccctgcatgcaggataggagccacatgccttacactgatgctgtagtgcacgagatccagagatacagtgaccttgtccccaccggtgtgccccatgcagtgaccactgatactaagttcagaaactacctcatccccaagggcacaaccataatggcattactgacttccgtgctacatgatgacaaagaatttcctaatccaaatatctttgaccctggccactttctagataagaatggcaactttaagaaaagtgactacttcatgcctttctcagcaggaaaacgaatttgtgcaggagaaggacttgcccgcatggagctatttttatttctaaccacaattttacagaactttaacctgaaatctgttgatgatttaaagaacctcaatactactgcagttaccaaagggattgtttctctgccaccctcataccagatctgcttcatccctgtctgaagaatgctagcccatctggctgccgatctgctatcacctgcaactctttttttatcaaggacattcccactattatgtcttctctgacctctcatcaaatcttcccattcactcaatatcccataagcatccaaactccattaa

SEQ ID NO: 7416 - DNA, 1493 bp, Homo sapiens
  source 1..1493: mol_type = unassigned DNA
acatgtcaaagagacacacactaaattagcagggagtgttataaaaactttggagtgcaagctcacagctgtcttaataagaagagaaggcttcaatggaaccttttgtggtcctggtgctgtgtctctcttttatgcttctcttttcactctggagacagagctgtaggagaaggaagctccctcctggccccactcctcttcctattattggaaatatgctacagatagatgttaaggacatctgcaaatctttcaccaatgtaagtctgccttatgttcctccagccaattgcaaaggttctcaaaagtctatggtcctgtgttcaccgtgtattttggcatgaatcccatagtggtgtttcatggatatgaggcagtgaaggaagccctgattgataatggagaggagttttctggaagaggcaattccccaatatctcaaagaattactaaaggacttggtaggtgcacatatttctgtgtcagctttggtaactggggtgagggggatggaaaacagagccctaaaaagcttctcagcagagcttagcctatctgcatggctgccaagtgttgcagcactttcttccttggctgtgaattctcccagtttctgcccctttttttattaggaatcatttccagcaatggaaagagatggaaggagatccggcgtttctccctcacaaccttgcggaattttgggatggggaagaggagcattgaggaccgtgttcaagaggaagctcactgccttgtggaggagttgagaaaaaccaaggcttcaccctgtgatcccactttcatcctgggctgtgctccctgcaatgtgatctgctccgttgttttccagaaacgatttgattataaagatcagaattttctcaccctgatgaaaagattcaatgaaaacttcaggattctgaactccccatggatccaggtctgcaataatttccctctactcattgattgtttcccaggaactcacaacaaagtgcttaaaaatgttgctcttacacgaagttacattagggagaaagtaaaagaacaccaagcatcactggatgttaacaatcctcgggactttatcgattgcttcctgatcaaaatggagcaggaaaaggacaaccaaaagtcagaattcaatattgaaaacttggttggcactgtagctgatctatttgttgctggaacagagacaacaagcaccactctgagatatggactcctgctcctgctgaagcacccagaggtcacagctaaagtccaggaagagattgatcatgtaattggcagacacaggagcccctgcatgcaggataggagccacatgccttacactgatgctgtagtgcacgagatccagagatacagtgaccttgtccccaccggtgtgccccatgcagtgaccactgatactaagttcagaaactacctcatccccaagagctttgataacaagataatgctggctgcataaaactagg

SEQ ID NO: 7417 - DNA, 1847 bp, Homo sapiens
  source 1..1847: mol_type = unassigned DNA
gagaaggcttcaatggattctcttgtggtccttgtgctctgtctctcatgtttgcttctcctttcactctggagacagagctctgggagaggaaaactccctcctggccccactcctctcccagtgattggaaatatcctacagataggtattaaggacatcagcaaatccttaaccaatctctcaaaggtctatggccctgtgttcactctgtattttggcctgaaacccatagtggtgctgcatggatatgaagcagtgaaggaagccctgattgatcttggagaggagttttctggaagaggcattttcccactggctgaaagagctaacagaggatttggaattgttttcagcaatggaaagaaatggaaggagatccggcgtttctccctcatgacgctgcggaattttgggatggggaagaggagcattgaggaccgtgttcaagaggaagcccgctgccttgtggaggagttgagaaaaaccaaggcctcaccctgtgatcccactttcatcctgggctgtgctccctgcaatgtgatctgctccattattttccataaacgttttgattataaagatcagcaatttcttaacttaatggaaaagttgaatgaaaacatcaagattttgagcagcccctggatccagatctgcaataatttttctcctatcattgattacttcccgggaactcacaacaaattacttaaaaacgttgcttttatgaaaagttatattttggaaaaagtaaaagaacaccaagaatcaatggacatgaacaaccctcaggactttattgattgcttcctgatgaaaatggagaaggaaaagcacaaccaaccatctgaatttactattgaaagcttggaaaacactgcagttgacttgtttggagctgggacagagacgacaagcacaaccctgagatatgctctccttctcctgctgaagcacccagaggtcacagctaaagtccaggaagagattgaacgtgtgattggcagaaaccggagcccctgcatgcaagacaggagccacatgccctacacagatgctgtggtgcacgaggtccagagatacattgaccttctccccaccagcctgccccatgcagtgacctgtgacattaaattcagaaactatctcattcccaagggcacaaccatattaatttccctgacttctgtgctacatgacaacaaagaatttcccaacccagagatgtttgaccctcatcactttctggatgaaggtggcaattttaagaaaagtaaatacttcatgcctttctcagcaggaaaacggatttgtgtgggagaagccctggccggcatggagctgtttttattcctgacctccattttacagaactttaacctgaaatctctggttgacccaaagaaccttgacaccactccagttgtcaatggatttgcctctgtgccgcccttctaccagctgtgcttcattcctgtctgaagaagagcagatggcctggctgctgctgtgcagtccctgcagctctctttcctctggggcattatccatctttcactatctgtaatgccttttctcacctgtcatctcacattttcccttccctgaagatctagtgaacattcgacctccattacggagagtttcctatgtttcactgtgcaaatatatctgctattctccatactctgtaacagttgcattgactgtcacataatgctcatacttatctaatgttgagttattaatatgttattattaaatagagaaatatgatttgtgtattataattcaaaggcatttcttttctgcatgttctaaataaaaagcattattatttgctg

SEQ ID NO: 7418 - DNA, 1524 bp, Homo sapiens
  source 1..1524: mol_type = unassigned DNA
gtcttaacaagaagagaaggcttcaatggattctcttgtggtccttgtgctctgtctctcatgtttgcttctcctttcactctggagacagagctctgggagaggaaaactccctcctggccccactcctctcccagtgattggaaatatcctacagataggtattaaggacatcagcaaatccttaaccaatctctcaaaggtctatggccctgtgttcactctgtattttggcctgaaacccatagtggtgctgcatggatatgaagcagtgaaggaagccctgattgatcttggagaggagttttctggaagaggcattttcccactggctgaaagagctaacagaggatttggaattgttttcagcaatggaaagaaatggaaggagatccggcgtttctccctcatgacgctgcggaattttgggatggggaagaggagcattgaggaccgtgttcaagaggaagcccgctgccttgtggaggagttgagaaaaaccaaggcctcaccctgtgatcccactttcatcctgggctgtgctccctgcaatgtgatctgctccattattttccataaacgttttgattataaagatcagcaatttcttaacttaatggaaaagttgaatgaaaacatcaagattttgagcagcccctggatccagatctgcaataatttttctcctatcattgattacttcccgggaactcacaacaaattacttaaaaacgttgcttttatgaaaagttatattttggaaaaagtaaaagaacaccaagaatcaatggacatgaacaaccctcaggactttattgattgcttcctgatgaaaatggagaaggaaaagcacaaccaaccatctgaatttactattgaaagcttggaaaacactgcagttgacttgtttggagctgggacagagacgacaagcacaaccctgagatatgctctccttctcctgctgaagcacccagaggtcacagctaaagtccaggaagagattgaacgtgtgattggcagaaaccggagcccctgcatgcaagacaggagccacatgccctacacagatgctgtggtgcacgaggtccagagatacattgaccttctccccaccagcctgccccatgcagtgacctgtgacattaaattcagaaactatctcattcccaagggcacaaccatattaatttccctgacttctgtgctacatgacaacaaagaatttcccaacccagagatgtttgaccctcatcactttctggatgaaggtggcaattttaagaaaagtaaatacttcatgctggttctcaaaatgataaggacagaaaggacaaagaggaagagggtagggaagctattttgggtgagtgttagagttacttgaggattggatttgaaagtgagaaactgtgtccaggggcagctctaacctctagggaaatattcagaggatcagtcaaagggtggaatggacattaaatgctagaattcttatatccacattggtgttccttttttttt

SEQ ID NO: 7419 - DNA, 1433 bp, Homo sapiens
  source 1..1433: mol_type = unassigned DNA
gcctggtcctctgtgcctggtggggtgggggtgccaggtgtgtccagaggagcccatttggtagtgaggcaggtatggggctagaagcactggtgcccctggccgtgatagtggccatcttcctgctcctggtggacctgatgcaccggcgccaacgctgggctgcacgctacccaccaggccccctgccactgcccgggctgggcaacctgctgcatgtggacttccagaacacaccatactgcttcgaccagttgcggcgccgcttcggggacgtgttcagcctgcagctggcctggacgccggtggtcgtgctcaatgggctggcggccgtgcgcgaggcgctggtgacccacggcgaggacaccgccgaccgcccgcctgtgcccatcacccagatcctgggtttcgggccgcgttcccaaggacgcccctttcgccccaacggtctcttggacaaagccgtgagcaacgtgatcgcctccctcacctgcgggcgccgcttcgagtacgacgaccctcgcttcctcaggctgctggacctagctcaggagggactgaaggaggagtcgggctttctgcgcgaggtgctgaatgctgtccccgtcctcctgcatatcccagcgctggctggcaaggtcctacgcttccaaaaggctttcctgacccagctggatgagctgctaactgagcacaggatgacctgggacccagcccagcccccccgagacctgactgaggccttcctggcagagatggagaaggccaaggggaaccctgagagcagcttcaatgatgagaacctgtgcatagtggtggctgacctgttctctgccgggatggtgaccacctcgaccacgctggcctggggcctcctgctcatgatcctacatccggatgtgcagcgccgtgtccaacaggagatcgacgacgtgatagggcaggtgcggcgaccagagatgggtgaccaggctcacatgccctacaccactgccgtgattcatgaggtgcagcgctttggggacatcgtccccctgggtgtgacccatatgacatcccgtgacatcgaagtacagggcttccgcatccctaagggaacgacactcatcaccaacctgtcatcggtgctgaaggatgaggccgtctgggagaagcccttccgcttccaccccgaacacttcctggatgcccagggccactttgtgaagccggaggccttcctgcctttctcagcaggccgccgtgcatgcctcggggagcccctggcccgcatggagctcttcctcttcttcacctccctgctgcagcacttcagcttctcggtgcccactggacagccccggcccagccaccatggtgtctttgctttcctggtgaccccatccccctatgagctttgtgctgtgccccgctagaatggggtacctagtccc

SEQ ID NO: 7420 - DNA, 1684 bp, Homo sapiens
  source 1..1684: mol_type = unassigned DNA
ataagggaagggtcacgcgctcggtgtgctgagagtgtcctgcctggtcctctgtgcctggtggggtgggggtgccaggtgtgtccagaggagcccatttggtagtgaggcaggtatggggctagaagcactggtgcccctggccgtgatagtggccatcttcctgctcctggtggacctgatgcaccggcgccaacgctgggctgcacgctacccaccaggccccctgccactgcccgggctgggcaacctgctgcatgtggacttccagaacacaccatactgcttcgaccagttgcggcgccgcttcggggacgtgttcagcctgcagctggcctggacgccggtggtcgtgctcaatgggctggcggccgtgcgcgaggcgctggtgacccacggcgaggacaccgccgaccgcccgcctgtgcccatcacccagatcctgggtttcgggccgcgttcccaaggggtgttcctggcgcgctatgggcccgcgtggcgcgagcagaggcgcttctccgtctccaccttgcgcaacttgggcctgggcaagaagtcgctggagcagtgggtgaccgaggaggccgcctgcctttgtgccgccttcgccaaccactccggacgcccctttcgccccaacggtctcttggacaaagccgtgagcaacgtgatcgcctccctcacctgcgggcgccgcttcgagtacgacgaccctcgcttcctcaggctgctggacctagctcaggagggactgaaggaggagtcgggctttctgcgcgaggtgctgaatgctgtccccgtcctcctgcatatcccagcgctggctggcaaggtcctacgcttccaaaaggctttcctgacccagctggatgagctgctaactgagcacaggatgacctgggacccagcccagcccccccgagacctgactgaggccttcctggcagagatggagaaggccaaggggaaccctgagagcagcttcaatgatgagaacctgtgcatagtggtggctgacctgttctctgccgggatggtgaccacctcgaccacgctggcctggggcctcctgctcatgatcctacatccggatgtgcagcgccgtgtccaacaggagatcgacgacgtgatagggcaggtgcggcgaccagagatgggtgaccaggctcacatgccctacaccactgccgtgattcatgaggtgcagcgctttggggacatcgtccccctgggtgtgacccatatgacatcccgtgacatcgaagtacagggcttccgcatccctaagggaacgacactcatcaccaacctgtcatcggtgctgaaggatgaggccgtctgggagaagcccttccgcttccaccccgaacacttcctggatgcccagggccactttgtgaagccggaggccttcctgcctttctcagcaggccgccgtgcatgcctcggggagcccctggcccgcatggagctcttcctcttcttcacctccctgctgcagcacttcagcttctcggtgcccactggacagccccggcccagccaccatggtgtctttgctttcctggtgaccccatccccctatgagctttgtgctgtgccccgctagaatggggtacctagtccccagcctgctccctagccagaggctctaatgtacaataaagcaatgtggtagttccaa

SEQ ID NO: 7421 - DNA, 1657 bp, Homo sapiens
  source 1..1657: mol_type = unassigned DNA
gtgctgagagtgtcctgcctggtcctctgtgcctggtggggtgggggtgccaggtgtgtccagaggagcccatttggtagtgaggcaggtatggggctagaagcactggtgcccctggccgtgatagtggccatcttcctgctcctggtggacctgatgcaccggcgccaacgctgggctgcacgctacccaccaggccccctgccactgcccgggctgggcaacctgctgcatgtggacttccagaacacaccatactgcttcgaccagttgcggcgccgcttcggggacgtgttcagcctgcagctggcctggacgccggtggtcgtgctcaatgggctggcggccgtgcgcgaggcgctggtgacccacggcgaggacaccgccgaccgcccgcctgtgcccatcacccagatcctgggtttcgggccgcgcggtcagggggtgttcctggcgcgctatgggcccgcgtggcgcgagcagaggcgcttctccgtctccaccttgcgcaacttgggcctgggcaagaagtcgctggagcagtgggtgaccgaggaggccgcctgcctttgtgccgccttcgccaaccactccggacgcccctttcgccccaacggtctcttggacaaagccgtgagcaacgtgatcgcctccctcacctgcgggcgccgcttcgagtacgacgaccctcgcttcctcaggctgctggacctagctcaggagggactgaaggaggagtcgggctttctgcgcgaggtgctgaatgctgtccccgtcctcctgcatatcccagcgctggctggcaaggtcctacgcttccaaaaggctttcctgacccagctggatgagctgctaactgagcacaggatgacctgggacccagcccagcccccccgagacctgactgaggccttcctggcagagatggagaaggccaaggggaaccctgagagcagcttcaatgatgagaacctgtgcatagtggtggctgacctgttctctgccgggatggtgaccacctcgaccacgctggcctggggcctcctgctcatgatcctacatccggatgtgcagcgccgtgtccaacaggagatcgacgacgtgatagggcaggtgcggcgaccagagatgggtgaccaggctcacatgccctacaccactgccgtgattcatgaggtgcagcgctttggggacatcgtccccctgggtgtgacccatatgacatcccgtgacatcgaagtacagggcttccgcatccctaagggaacgacactcatcaccaacctgtcatcggtgctgaaggatgaggccgtctgggagaagcccttccgcttccaccccgaacacttcctggatgcccagggccactttgtgaagccggaggccttcctgcctttctcagcaggccgccgtgcatgcctcggggagcccctggcccgcatggagctcttcctcttcttcacctccctgctgcagcacttcagcttctcggtgcccactggacagccccggcccagccaccatggtgtctttgctttcctggtgaccccatccccctatgagctttgtgctgtgccccgctagaatggggtacctagtccccagcctgctccctagccagaggctctaatgtacaataaagcaatgtggtagttcc

SEQ ID NO: 7422 - DNA, 1405 bp, Homo sapiens
  source 1..1405: mol_type = unassigned DNA
caagaggccctgaccctccctctgcagttgcggcgccgcttcggggacgtgttcagcctgcagctggcctggacgccggtggtcgtgctcaatgggctggcggccgtgcgcgaggcgctggtgacccacggcgaggacaccgccgaccgcccgcctgtgcccatcacccagatcctgggtttcgggccgcgcggtcagggggtgttcctggcgcgctatgggcccgcgtggcgcgagcagaggcgcttctccgtctccaccttgcgcaacttgggcctgggcaagaagtcgctggagcagtgggtgaccgaggaggccgcctgcctttgtgccgccttcgccaaccacgacgcccctttcgccccaacggtctcttggacaaagccgaacgtgatcgcctccctcacctgcgggcgccgcttcgagtacgacgaccctcgcttcctcaggctgctggacctagctcaggagggactgaaggaggagtcgggctttctgcgcgaggtgctgaatgctgtccccgtcctcctgcatatcccagcgctggctggcaaggtcctacgcttccaaaaggctttcctgacccagctggatgagctgctaactgagcacaggatgacctgggacccagcccagcccccccgagacctgactgaggccttcctggcagagatggagaaggccaaggggaaccctgagagcagcttcaatgatgagaacctgtgcatagtggtggctgacctgttctctgccgggatggtgaccacctcgaccacgctggcctggggcctcctgctcatgatcctacatccggatgtgcagcgccgtgtccaacaggagatcgacgacgtgatagggcaggtgcggcgaccagagatgggtgaccaggctcacatgccctacaccactgccgtgattcatgaggtgcagcgctttggggacatcgtccccctgggtgtgacccatatgacatcccgtgacatcgaagtacagggcttccgcatccctaagggaacgacactcatcaccaacctgtcatcggtgctgaaggatgaggccgtctgggagaagcccttccgcttccaccccgaacacttcctggatgcccagggccactttgtgaagccggaggccttcctgcctttctcagcaggccgccgtgcatgcctcggggagcccctggcccgcatggagctcttcctcttcttcacctccctgctgcagcacttcagcttctcggtgcccactggacagccccggcccagccaccatggtgtctttgctttcctggtgaccccatccccctatgagctttgtgctgtgccccgctagaatggggtacctagtccccagcctgctccctagccagaggctctaatgtacaataaagcaatgtggtagttcc

SEQ ID NO: 7423 - DNA, 1348 bp, Homo sapiens
  source 1..1348: mol_type = unassigned DNA
ggcagccatggggctagaagcactggtgcccctggccatgatagtggccatcttcctgctcctggtggacctgatgcaccggcgccaacgctgggctgcacgctacccaccaggccccctgccactgcccgggctgggcaacctgctgcatgtggacttccagaacacaccatactgcttcgaccagttgcggcgccgcttcggggacgtgttcagcctgcagctggcctggacgccggtggtcgtgctcaatgggctggcggccgtgcgcgaggcgctggtgacccacggcgaggacaccgccgaccgcccgcctgtgcccatcacccagatcctgggtttcgggccgcgttcccaaggacgcccctttcgccccaacggtctcttggacaaagccgtgagcaacgtgatcgcctccctcacctgcgggcgccgcttcgagtacgacgaccctcgcttcctcaggctgctggacctagctcaggagggactgaaggaggagtcgggctttctgcgcgaggtgctgaatgctgtccccgtcctcctgcatatcccagcgctggctggcaaggtcctacgcttccaaaaggctttcctgacccagctggatgagctgctaactgagcacaggatgacctgggacccagcccagcccccccgagacctgactgaggccttcctggcagagatggagaaggccaaggggaaccctgagagcagcttcaatgatgagaacctgtgcatagtggtggctgacctgttctctgccgggatggtgaccacctcgaccacgctggcctggggcctcctgctcatgatcctacatccggatgtgcagcgccgtgtccaacaggagatcgacgacgtgatagggcaggtgcggcgaccagagatgggtgaccaggctcacatgccctacaccactgccgtgattcatgaggtgcagcgctttggggacatcgtccccctgggtgtgacccatatgacatcccgtgacatcgaagtacagggcttccgcatccctaagggaacgacactcatcaccaacctgtcatcggtgctgaaggatgaggccgtctgggagaagcccttccgcttccaccccgaacacttcctggatgcccagggccactttgtgaagccggaggccttcctgcctttctcagcaggccgccgtgcatgcctcggggagcccctggcccgcatggagctcttcctcttcttcacctccctgctgcagcacttcagcttctcggtgcccactggacagccccggcccagccaccatggtgtctttgctttcctggtgaccccatccccctatgagctttgtgctgtgccccgctag

SEQ ID NO: 7424 - DNA, 1667 bp, Homo sapiens
  source 1..1667: mol_type = unassigned DNA
ctcccgggctggcagcagggccccagcggcaccatgtctgccctcggagtcaccgtggccctgctggtgtgggcggccttcctcctgctggtgtccatgtggaggcaggtgcacagcagctggaatctgcccccaggccctttcccgcttcccatcatcgggaacctcttccagttggaattgaagaatattcccaagtccttcacccggttggcccagcgcttcgggccggtgttcacgctgtacgtgggctcgcagcgcatggtggtgatgcacggctacaaggcggtgaaggaagcgctgctggactacaaggacgagttctcgggcagaggcgacctccccgcgttccatgcgcacagggacaggggaatcatttttaataatggacctacctggaaggacatccggcggttttccctgaccaccctccggaactatgggatggggaaacagggcaatgagagccggatccagagggaggcccacttcctgctggaagcactcaggaagacccaaggccagcctttcgaccccaccttcctcatcggctgcgcgccctgcaacgtcatagccgacatcctcttccgcaagcattttgactacaatgatgagaagtttctaaggctgatgtatttgtttaatgagaacttccacctactcagcactccctggctccagctttacaataattttcccagctttctacactacttgcctggaagccacagaaaagtcataaaaaatgtggctgaagtaaaagagtatgtgtctgaaagggtgaaggagcaccatcaatctctggaccccaactgtccccgggacctcaccgactgcctgctcgtggaaatggagaaggaaaagcacagtgcagagcgcttgtacacaatggacggtatcaccgtgactgtggccgacctgttctttgcggggacagagaccaccagcacaactctgagatatgggctcctgattctcatgaaataccctgagattgaagagaagctccatgaagaaattgacagggtgattgggccaagccgaatccctgccatcaaggataggcaagagatgccctacatggatgctgtggtgcatgagattcagcggttcatcaccctcgtgccctccaacctgccccatgaagcaacccgagacaccattttcagaggatacctcatccccaagggcacagtcgtagtgccaactctggactctgttttgtatgacaaccaagaatttcctgatccagaaaagtttaagccagaacacttcctgaatgaaaatggaaagtttaagtacagtgactatttcaagccattttccacaggaaaacgagtgtgtgctggagaaggcctggctcgcatggagttgtttcttttgttgtgtgccattttgcagcattttaatttgaagcctctcgttgacccaaaggatatcgacctcagccctatacatattgggtttggctgtatcccaccacgttacaaactctgtgtcattccccgctcatgagtgtgtggaggacaccctgaaccccccgctttcaaacaagttttcaaattgtttgaggtcaggatttctcaaactgattcctttctttgcatatgagtatttgaaaataaatattttcccagaatataaataaatcatcacatgattatttt

SEQ ID NO: 7425 - DNA, 1912 bp, Homo sapiens
  source 1..1912: mol_type = unassigned DNA
acttccgggttgtttgctcccggagccataaccgcagctcagcgtgcgggcagagccggctgacaggagacaggacacagcacagagccccgcgccctctgaggcgggaggcttcgttcctgcaccagcgtggcttgccctttggacgcggcgagttaacttgagaaagtggaatcgaattccgatgttgaattttccttctggccccattcatgtggcaggtggtgattcaggattgtctcccgggctggcagcagggccccagcggcaccatgtctgccctcggagtcaccgtggccctgctggtgtgggcggccttcctcctgctggtgtccatgtggaggcaggtgcacagcagctggaatctgcccccaggccctttcccgcttcccatcatcgggaacctcttccagttggaattgaagaatattcccaagtccttcacccggttggcccagcgcttcgggccggtgttcacgctgtacgtgggctcgcagcgcatggtggtgatgcacggctacaaggcggtgaaggaagcgctgctggactacaaggacgagttctcgggcagaggcgacctccccgcgttccatgcgcacagggacaggggaatcatttttaataatggacctacctggaaggacatccggcggttttccctgaccaccctccggaactatgggatggggaaacagggcaatgagagccggatccagagggaggcccacttcctgctggaagcactcaggaagacccaaggccagcctttcgaccccaccttcctcatcggctgcgcgccctgcaacgtcatagccgacatcctcttccgcaagcattttgactacaatgatgagaagtttctaaggctgatgtatttgtttaatgagaacttccacctactcagcactccctggctccagctttacaataattttcccagctttctacactacttgcctggaagccacagaaaagtcataaaaaatgtggctgaagtaaaagagtatgtgtctgaaagggtgaaggagcaccatcaatctctggaccccaactgtccccgggacctcaccgactgcctgctcgtggaaatggagaaggaaaagcacagtgcagagcgcttgtacacaatggacggtatcaccgtgactgtggccgacctgttctttgcggggacagagaccaccagcacaactctgagatatgggctcctgattctcatgaaataccctgagattgaagagaagctccatgaagaaattgacagggtgattgggccaagccgaatccctgccatcaaggataggcaagagatgccctacatggatgctgtggtgcatgagattcagcggttcatcaccctcgtgccctccaacctgccccatgaagcaacccgagacaccattttcagaggatacctcatccccaagggcacagtcgtagtgccaactctggactctgttttgtatgacaaccaagaatttcctgatccagaaaagtttaagccagaacacttcctgaatgaaaatggaaagtttaagtacagtgactatttcaagccattttccacaggaaaacgagtgtgtgctggagaaggcctggctcgcatggagttgtttcttttgttgtgtgccattttgcagcattttaatttgaagcctctcgttgacccaaaggatatcgacctcagccctatacatattgggtttggctgtatcccaccacgttacaaactctgtgtcattccccgctcatgagtgtgtggaggacaccctgaaccccccgctttcaaacaagttttcaaattgtttgaggtcaggatttctcaaactgattcctttctttgcatatgagtatttgaaaataaatattttcccagaatataaataaatcatcacatgattattttaactat

SEQ ID NO: 7426 - DNA, 475 bp, Homo sapiens
  source 1..475: mol_type = unassigned DNA
aacagtattatggccagaggactcagaccacagctgcatccctgtgaggcacagactctccagggcacgcgggtcccgcctgggatgtgcacactcagttaacttgagaaagtggaatcgaattccgatgttgaattttccttctggccccattcatgtggcaggtggtgattcaggattgtctcccgggctggcagcagggccccagcggcaccatgtctgccctcggagtcaccgtggccctgctggtgtgggcggccttcctcctgctggtgtccatgtggaggcaggtgcacagcagctggaatctgcccccaggccctttcccgcttcccatcatcgggaacctcttccagttggaattgaagaatattcccaagtccttcacccggttggcccagcgcttcgggccggtgttcacgctgtacgtgggctcgcagcgcatggtggtgatgcacggctacaaggcggtgaa

SEQ ID NO: 7427 - DNA, 1720 bp, Homo sapiens
  source 1..1720: mol_type = unassigned DNA
aagcacacccagagctgcaggctctagcgcatcccagccagtgtctcctgcagctcagcagctgccttcaccatggacagcataagcacagccatcttactcctgctcctggctctcgtctgtctgctcctgaccctaagctcaagagataagggaaagctgcctccgggacccagacccctctcaatcctgggaaacctgctgctgctttgctcccaagacatgctgacttctctcactaagctgagcaaggagtatggctccatgtacacagtgcacctgggacccaggcgggtggtggtcctcagcgggtaccaagctgtgaaggaggccctggtggaccagggagaggagtttagtggccgcggtgactaccctgcctttttcaactttaccaagggcaatggcatcgccttctccagtggggatcgatggaaggtcctgagacagttctctatccagattctacggaatttcgggatggggaagagaagcattgaggagcgaatcctagaggagggcagcttcctgctggcggagctgcggaaaactgaaggcgagccctttgaccccacgtttgtgctgagtcgctcagtgtccaacattatctgttccgtgctcttcggcagccgcttcgactatgatgatgagcgtctgctcaccattatccgccttatcaatgacaacttccaaatcatgagcagcccctggggcgagttgtacgacatcttcccgagcctcctggactgggtgcctgggccgcaccaacgcatcttccagaacttcaagtgcctgagagacctcatcgcccacagcgtccacgaccaccaggcctcgctagaccccagatctccccgggacttcatccagtgcttcctcaccaagatggcagaggagaaggaggacccactgagccacttccacatggataccctgctgatgaccacacataacctgctctttggcggcaccaagacggtgagcaccacgctgcaccacgccttcctggcactcatgaagtacccaaaagttcaagcccgcgtgcaggaggagatcgacctcgtggtgggacgcgcgcggctgccggcgctgaaggaccgcgcggccatgccttacacagacgcggtgatccacgaggtgcagcgctttgcagacatcatccccatgaacttgccgcaccgcgtcactagggacacggcctttcgcggcttcctgatacccaagggcaccgatgtcatcaccctccttaacaccgtccactacgaccccagccagttcctgacgccccaggagttcaaccccgagcattttttggatgccaatcagtccttcaagaagagtccagccttcatgcccttctcagctgggcgccgtctgtgcctgggagagtcgctggcgcgcatggagctctttctgtacctcaccgccatcctgcagagcttttcgctgcagccgctgggtgcgcccgaggacatcgacctgaccccactcagctcaggtcttggcaatttgccgcggcctttccagctgtgcctgcgcccgcgctaacgccccggcccttccagattcgcctgtgagcgatgaggcccgcccatgcgggttgctacgtccccttcttggtccacagtctgccctcatccctctggcagtcacgctgtcttccctgcatgctgtgcctgccgcgtgcccttcccccatccctccaatctgtgccccgtct

SEQ ID NO: 7428 - DNA, 1896 bp, Homo sapiens
  source 1..1896: mol_type = unassigned DNA
cgccgcctgcttggaccgcagaagagcaggaggacgtctgagccatgctcgcggcgatgggctctctggcggctgccctctgggcagtggtccatcctcggactctcctactgggcactgtcgcctttctgctcgctgctgactttctcaaaagacggcgcccaaagaactacccgccggggccctggcgcctgcccttccttggcaacttcttccttgtggacttcgagcagtcgcacctggaggttcagctgtttgtgaagaaatatgggaacctttttagcttggagcttggtgacatatctgcagttcttattactggcttgcccttaatcaaagaagcccttatccacatggaccaaaactttgggaaccgccccgtgacccctatgcgagaacatatctttaagaaaaatggattgattatgtcaagtggccaggcatggaaggagcaaagaaggttcactctgacagcactaaggaactttggtttaggaaagaagagcttagaggaacgcattcaggaggaggcccaacacctcactgaagcaataaaagaggagaacggacagccttttgaccctcatttcaagatcaacaatgcagtttccaatatcatttgctccatcaccttcggagaacgctttgagtaccaggatagttggtttcagcagctgctgaagttactagatgaagtcacatacttggaggcttcaaagacatgccagctctacaatgtctttccatggataatgaaattcctgcctggaccccaccaaactctcttcagcaactggaaaaaactgaaattgtttgtttctcatatgattgacaaacacagaaaggattggaatcctgcagaaacaagagactttattgatgcttaccttaaagaaatgtcaaagcacacaggcaatcctacttcaagtttccatgaagaaaacctcatctgcagcaccctggacctcttctttgccggaaccgagacaacttccacaactctgcgatgggctctgctttatatggccctctacccagaaatccaagaaaaagtacaagctgagattgacagagtgattggccaggggcagcagccgagcacagccgcccgggagtccatgccctacaccaatgctgtcatccatgaggtgcagagaatgggcaacatcatccccctgaacgttcccagggaagtgacagttgataccactttggctgggtaccacctgcccaagggtaccatgatcctgaccaatttgacggcgctgcacagggaccccacagagtgggccacccctgacacattcaatccggaccattttctggagaatggacagtttaagaaaagggaagcctttatgcctttctcaataggaaagcgggcatgcctcggagaacagttggccaggactgagctgtttattttcttcacttcccttatgcaaaaatttaccttcaggcccccaaacaatgagaagctgagcctgaagtttagaatgggtatcaccatttccccagtcagtcaccgcctctgcgctgttcctcaggtgtaatattgttaagaaagaaaggggcaaggaaagtaagaagacatggcacgtgttctgaaaccactggtgtctgctcagatgtgttgggacaaaatgaaagtgactttcaagaaagatcagaggaatttgactcagagaaaactagatccaaatcccagctctactgtctcgtccgaattagccttgggaaaatcatttatatgctaaataatttacctttttatctaggagatgaaaagaggataatgtttccttccataaagaaagttcttgtaagaatcaaaagaaatggtgagctttaagtggtttgtaaaccataaaacacatcataaaagttctatctata

SEQ ID NO: 7429 - DNA, 1613 bp, Homo sapiens
  source 1..1613: mol_type = unassigned DNA
cctgggtctcagggctgctgtggagttcgcacctccagctcgggccgatgtggaagctttggagagctgaagagggcgcggcggcgctcggcggcgcgctcttcctgctgctcttcgcgctaggggtccgccagctgctgaagcagaggcggccgatgggcttccccccggggccgccggggctgccatttatcggcaacatctattccctggcagcctcatccgagcttccccatgtctacatgagaaagcagagccaggtgtacggagagatcttcagtttagatcttggaggcatatcaactgtggttctaaatggctatgatgtagtaaaggaatgccttgttcatcaaagcgaaatttttgcagacagaccatgccttcctttattcatgaagatgacaaaaatgggaggcttactcaattccagatatggccgaggatgggttgatcacagacgattagctgtaaacagttttcgatattttggatatggccaaaagtcttttgaatctaaaatcttggaagaaaccaaatttttcaatgatgctattgaaacatacaaaggtagaccttttgactttaaacagttaataacgaatgctgtttcaaacataaccaatctgatcatttttggagaacgattcacttatgaagacaccgattttcagcacatgattgagttatttagtgaaaatgtggaactagctgccagtgcctcagtcttcttgtataatgcctttccatggattggcatcctgccttttggaaaacatcaacagctgtttagaaatgcagctgtagtctatgattttctctccagactcattgaaaaagcttcagtcaacagaaagcctcagctacctcagcattttgttgatgcttatttagatgagatggatcaaggtaaaaatgacccatcatctactttctccaaagaaaacctaattttctcagtgggtgaactcatcattgctggaactgaaactacaaccaatgtgctacggtgggcgattcttttcatggccctttatcctaatattcaaggacaagttcagaaagagattgatttaattatgggccctaatgggaagccttcttgggacgacaaatgcaaaatgccttatactgaggcagttttgcatgaagttttaagattctgtaatatagttccattagggattttccatgcaacctctgaagatgcagttgtacgtggttattccattcctaaaggcacaacagtaattacaaatctttattctgtacactttgatgaaaagtactggagagacccagaagtgttccatcctgagcgatttctggacagcagtggatattttgccaagaaggaagctttggttcctttttccctaggaagaagacattgtcttggagaacacttggctcggatggaaatgttcttgttttttacagcattgcttcagaggtttcatttgcattttccacatgaactagttccagatctgaagcccaggttaggcatgacattgcagccccaaccctacctcatctgtgctgaaagacgctgaaactgcctgggatgttttcgggaacaagaatgtatatttgccttatccctgaacttggtt

SEQ ID NO: 7430 - DNA, 1750 bp, Homo sapiens
  source 1..1750: mol_type = unassigned DNA
aactagcccagccgcgcggagcgcctgggagaggagaaggagccgacctgccgagatggaggcgaccggcacctgggcgctgctgctggcgctggcgctgctcctgctgctgacgctggcgctgtccgggaccagggcccgaggccacctgccccccgggcccacgccgctaccactgctgggaaacctcctgcagctacggcccggggcgctgtattcagggctcatgcggctgagtaagaagtacggaccggtgttcaccatctacctgggaccgtggcggcctgtggtggtcctggttgggcaggaggctgtgcgggaggccctgggaggtcaggctgaggagttcagcggccggggaaccgtagcgatgctggaagggacttttgatggccatggggttttcttctccaacggggagcggtggaggcagctgaggaagtttaccatgcttgctctgcgggacctgggcatggggaagcgagaaggcgaggagctgatccaggcggaggcccggtgtctggtggagacattccaggggacagaaggacgcccattcgatccctccctgctgctggcccaggccacctccaacgtagtctgctccctcctctttggcctccgcttctcctatgaggataaggagttccaggccgtggtccgggcagctggtggtaccctgctgggagtcagctcccaggggggtcagacctacgagatgttctcctggttcctgcggcccctgccaggcccccacaagcagctcctccaccacgtcagcaccttggctgccttcacagtccggcaggtgcagcagcaccaggggaacctggatgcttcgggccccgcacgtgaccttgtcgatgccttcctgctgaagatggcacaggaggaacaaaacccaggcacagaattcaccaacaagaacatgctgatgacagtcatttatttgctgtttgctgggacgatgacggtcagcaccacggtcggctataccctcctgctcctgatgaaataccctcatgtccaaaagtgggtacgtgaggagctgaatcgggagctgggggctggccaggcaccaagcctaggggaccgtacccgcctcccttacaccgacgcggttctgcatgaggcgcagcggctgctggcgctggtgcccatgggaataccccgcaccctcatgcggaccacccgcttccgagggtacaccctgccccagggcacggaggtcttccccctccttggctccatcctgcatgaccccaacatcttcaagcacccagaagagttcaacccagaccgtttcctggatgcagatggacggttcaggaagcatgaggcgttcctgcccttctccttagggaagcgtgtctgccttggagagggcctggcaaaagcggagctcttcctcttcttcaccaccatcctacaagccttctccctggagagcccgtgcccgccggacaccctgagcctcaagcccaccgtcagtggccttttcaacattcccccagcctcaacagtgggcatggacagggttaatgtctccagagtgtacactgcaggcagccacatttacacgcctgcagttgttttccggagtctgtcccacggcccacacgctcacttgactcatgctgctaagatgcacaaccgcacacccatacacaactacaagggccacaaagcaactgctgggttagctttccacagacataaatatagtccatctgcaatcacaagcacatag

SEQ ID NO: 7431 - DNA, 2620 bp, Homo sapiens
  source 1..2620: mol_type = unassigned DNA
aactagcccagccgcgcggagcgcctgggagaggagaaggagccgacctgccgagatggaggcgaccggcacctgggcgctgctgctggcgctggcgctgctcctgctgctgacgctggcgctgtccgggaccagggcccgaggccacctgccccccgggcccacgccgctaccactgctgggaaacctcctgcagctacggcccggggcgctgtattcagggctcatgcggctgagtaagaagtacggaccggtgttcaccatctacctgggaccgtggcggcctgtggtggtcctggttgggcaggaggctgtgcgggaggccctgggaggtcaggctgaggagttcagcggccggggaaccgtagcgatgctggaagggacttttgatggccatggggttttcttctccaacggggagcggtggaggcagctgaggaagtttaccatgcttgctctgcgggacctgggcatggggaagcgagaaggcgaggagctgatccaggcggaggcccggtgtctggtggagacattccaggggacagaaggacgcccattcgatccctccctgctgctggcccaggccacctccaacgtagtctgctccctcctctttggcctccgcttctcctatgaggataaggagttccaggccgtggtccgggcagctggtggtaccctgctgggagtcagctcccaggggggtcagacctacgagatgttctcctggttcctgcggcccctgccaggcccccacaagcagctcctccaccacgtcagcaccttggctgccttcacagtccggcaggtgcagcagcaccaggggaacctggatgcttcgggccccgcacgtgaccttgtcgatgccttcctgctgaagatggcacaggaggaacaaaacccaggcacagaattcaccaacaagaacatgctgatgacagtcatttatttgctgtttgctgggacgatgacggtcagcaccacggtcggctataccctcctgctcctgatgaaataccctcatgtccaaaagtgggtacgtgaggagctgaatcgggagctgggggctggccaggcaccaagcctaggggaccgtacccgcctcccttacaccgacgcggttctgcatgaggcgcagcggctgctggcgctggtgcccatgggaataccccgcaccctcatgcggaccacccgcttccgagggtacaccctgccccagggcacggaggtcttccccctccttggctccatcctgcatgaccccaacatcttcaagcacccagaagagttcaacccagaccgtttcctggatgcagatggacggttcaggaagcatgaggcgttcctgcccttctccttagggaagcgtgtctgccttggagagggcctggcaaaagcggagctcttcctcttcttcaccaccatcctacaagccttctccctggagagcccgtgcccgccggacaccctgagcctcaagcccaccgtcagtggccttttcaacattcccccagccttccagctgcaagtccgtcccactgaccttcactccaccacgcagaccagatgaaggaaggcaacttggaagtggtgggtgcccaggacggtgcctccagcctcaacagtgggcatggacagggttaatgtctccagagtgtacactgcaggcagccacatttacacgcctgcagttgttttccggagtctgtcccacggcccacacgctcacttgactcatgctgctaagatgcacaaccgcacacccatacacaactacaagggccacaaagcaactgctgggttagctttccacagacataaatatagtccatctgcaatcacaagcacatagccaggtaacccaccaactcccctggatctgcagcccacacgtgggagtctggctgtcaccttcacaagccacagaaacggccacacatgttcacagctcacacgccctctccattcatcgaacttctcagtgtccctgtccctggtgcctggcacagggaacagcatgccccctccggggtcatgccacccagagactgtcgctgtctatggccccaactcatgctccctctcttggctacaccactctcccagcctgtgaccaccgatgtccacacacccccaaccacttgtccacacagctacccacgtacgacatcgtcctggctccccagagtatcttcccactgagacacgccgcccccacagaggcacagtccccagccacctctgcaactgcagccctcagtcacccctttttaagcaccctgattctaccaaatgcaaacacatctgggtctgcgattatgcacagagactttggacatacgaggaccctcagaccggaggaacacctgcccaaccccaacacgtgcttatgtaaccacgtggaaagcggcccctgctgcccctccacacacacatacacactcactgatctacagcccctgttcggcgtcagagtccccactagacccagtggaaggggttagagaccaagtaggggccagtttccaattcaccctgtcagggagtgagccggatctgacgttccttgtgacttaagggtccggcttgggaattaaagtttgtttctggcctttagcct

SEQ ID NO: 7432 - DNA, 1479 bp, Homo sapiens
  source 1..1479: mol_type = unassigned DNA
agaggagaaggagccgacctgccgagatggaggcgaccggcacctgggcgctgctgctggcgctggcgctgctcctgctgctgacgctggcgctgtccgggaccagggcccgaggccacctgccccccgggcccacgccgctaccactgctgggaaacctcctgcagctacggcccggggcgctgtattcagggctcatgcggctgagtaagaagtacggaccggtgttcaccatctacctgggaccgtggcggcctgtggtggtcctggttgggcaggaggctgtgcgggaggccctgggaggtcaggctgaggagttcagcggccggggaaccgtagcgatgctggaagggacttttgatggccatggaggaacaaaacccaggcacagaattcaccaacaagaacatgctgatgacagtcatttatttgctgtttgctgggacgatgacggtcagcaccacggtcggctataccctcctgctcctgatgaaataccctcatgtccaaaagtgggtacgtgaggagctgaatcgggagctgggggctggccaggcaccaagcctaggggaccgtacccgcctcccttacaccgacgcggttctgcatgaggcgcagcggctgctggcgctggtgcccatgggaataccccgcaccctcatgcggaccacccgcttccgagggtacaccctgccccagggcacggaggtcttccccctccttggctccatcctgcatgaccccaacatcttcaagcacccagaagagttcaacccagaccgtttcctggatgcagatggacggttcaggaagcatgaggcgttcctgcccttctccttagggaagcgtgtctgccttggagagggcctggcaaaagcggagctcttcctcttcttcaccaccatcctacaagccttctccctggagagcccgtgcccgccggacaccctgagcctcaagcccaccgtcagtggccttttcaacattcccccagccttccagctgcaagtccgtcccactgaccttcactccaccacgcagaccagatgaaggaaggcaacttggaagtggtgggtgcccaggacggtgcctccagcctcaacagtgggcatggacagggttaatgtctccagagtgtacactgcaggcagccacatttacacgcctgcagttgttttccggagtctgtcccacggcccacacgctcacttgactcatgctgctaagatgcacaaccgcacacccatacacaactacaagggccacaaagcaactgctgggttagctttccacagacataaatatagtccatctgcaatcacaagcacatagccaggtaacccaccaactcccctggatctgcagcccacacgtgggagtctggctgtcaccttcacaagccacagaaacggccacacatgttcacagctcacacgccctctccattcatcgaacttctcagtgtccctgtccctggtg

SEQ ID NO: 7433 - DNA, 4944 bp, Homo sapiens
  source 1..4944: mol_type = unassigned DNA
accggacttcggggcaaacttcaggtcccccgcctgctagcccgccaaccccctccgccaggcagccggcgcgcctccaggttccgcccaggcgtcgctgagtggcggcggcggggagaatgcgcgcggcgcagccaatccgggggcgttcctacaccccctgcccgcccccgaccttccagagcagagcaggacactggcgccgcgggtcaggcagctgcgtgcgcgtctcctccaggcagcaaggggaacccgaggccgccggcgcccggaccatgtcgtctccggggccgtcgcagccgccggccgaggacccgccctggcccgcgcgcctcctgcgtgcgcctctggggctgctgcggctggaccccagcgggggcgcgctgctgctatgcggcctcgtagcgctgctgggctggagctggctgcggaggcgccgggcgcggggcatcccgcccgggcccacgccctggcctctggtgggcaacttcggtcacgtgctgctgcctcccttcctccggcggcggagctggctgagcagcaggaccagggccgcagggattgatccctcggtcataggcccgcaggtgctcctggctcacctagcccgcgtgtacggcagcatcttcagcttctttatcggccactacctggtggtggtcctcagcgacttccacagcgtgcgcgaggcgctggtgcagcaggccgaggtcttcagcgaccgcccgcgggtgccgctcatctccatcgtgaccaaggagaagggggttgtgtttgcacattatggtcccgtctggagacaacaaaggaagttctctcattcaactcttcgtcattttgggttgggaaaacttagcttggagcccaagattattgaggagttcaaatatgtgaaagcagaaatgcaaaagcacggagaagaccccttctgccctttctccatcatcagcaatgccgtctctaacatcatttgctccttgtgctttggccagcgctttgattacactaatagtgagttcaagaaaatgcttggttttatgtcacgaggcctagaaatctgtctgaacagtcaagtcctcctggtcaacatatgcccttggctttattaccttccctttggaccatttaaggaattaagacaaattgaaaaggatataaccagtttccttaaaaaaatcatcaaagaccatcaagagtctctggatagagagaaccctcaggacttcatagacatgtaccttctccacatggaagaggagaggaaaaataatagtaacagcagttttgatgaagagtacttattttatatcattggggatctctttattgctgggactgataccacaactaactctttgctctggtgcctgctgtatatgtcgctgaaccccgatgtacaagaaaaggttcatgaagaaattgaaagagtcattggcgccaaccgagctccttccctcacagacaaggcccagatgccctacacagaagccaccatcatggaagtgcagaggctaactgtggtggtgccgcttgccattcctcatatgacctcagagaacacagtgctccaagggtataccattcctaaaggcacattgatcttacccaacctgtggtcagtacatagagacccagccatttgggagaaaccggaggatttctaccctaatcgatttctggatgaccaaggacaactaattaaaaaagaaacctttattccttttgggatagggaagcgggtgtgtatgggagaacaactggcaaagatggaattattcctaatgtttgtgagcctaatgcagagtttcgcatttgctttacctgaggattctaagaagcccctcctgactggaagatttggtctaactttagccccacatccatttaatataactatttcaaggagatgaagagcatctccaagaagagatggtaaaaagatatataaatacatatccttctaagcagattcttcctactgcaaaggacagtgaatccagcaactcagtggatccaagctgggctcagaggtcggaaggagggtagagcacactgggaggtttcatcttggaggattcctcagcaggatacttcagccattttagtaatgcaggtctgtgatttgggggatagaaaacaaagtacctatgaaacgggatatctggattttacttgcagtggcttccaccgatgggccaatcttctcatttcttagtgcctcagacatcccatatgtaaaatgagagtaataaaacttggcttctctctacctctcagcactaatgatggtcaaatgccttacatcttttctgatatctctaaaatgctgttaagttctggagaagaacttcaggagaagaagatctatcagctggcttttaaagacctatgacaacatgaaagtggtgttcagcctggaatgctttgtcagagatgggtgtggatttaggttatactgggggagaacttttctcagcacagattctatgccagcttctttgggcttgttctgtcactatctttttgtttatgattttagtttttactttttgtagatgtgggatgaagtggactctgtcgtgtatattgaggaaaaaagaaattataattttaaaaaatcccttgtaggattattatctaaatttatatgtctaacttctactacaactacaggaacagtgagccttgctacttctttagtagcttcttggcagaattcctttctactgagttatttgcaaagatgcagctctacctttttacttaaggcctgaatggtgagcatggggattttgatactgggactcatcaggaaaggattctgctttcaaactatactgaacattcctgtcctagcgtccctgccaccaggcccaatgcatctgatccttgaatatactctcaaagaattcactctctttttattaagagaactaaattgtttctaaatgtagatggtccctctggaaaagcagttttcagcaggggtggtaaccccttcagagggagtttggaaatgtgtgggtatgattcttggttatcataatgatgggggtgctactggccttctgctgccatgggaccaggatgctaaatgtcaaggtagtcctatacagtgaagaattgtcctgctcaagatgccaggatttcccccagtgagaacatgctctaaggaatgaccacccctttcttttattctcccacagtgctccatgtacagaagtaagcatagcagtcatatgagcaaccacattcctgaacctttcctcatgctggctctacacttaatcctttacttgtatgtttctgtaattcttacataaattctattaagagggtggcatactgtagtggatgaagctgaggcttatagtaggtaaggcacaaagttaaaaagtaacatcactgggtttcaaacctactggtctctgtgactaaagaacactttcagaaccacttcttgattctgccaccacttgatcccataacaggctaccccttggcctcatgctggagttgtgtgtgtctgtcttcatcccaggctgagctccttgaggtgaggatgttgtgctgtttgcctccctcacagtgccttggtcttagtggatgcccagttgtcttgtgaatgacttttaagaagtgtacttaagagaaaaatcctaccttatttgaataattacaagtcatgtttttgttgcttaaaggtgataaatcagtgtatattatttgttaatgtccattaaagccagtttttaaaaaaatcactggacttttgtgtttaccatttaaaacaaccattttaaacaaacttagaacgatgccttagctgtttataggtaacagaatgtaaactcccaccacctggagactaggccatatccagggacctcacactgactttcctaaaggagagaagcagctacgctgttcatactgatagagaagagggcaagaaaagatccagagtggctgttactttgaaaattaaacgaaagatgaaattctgaacttaaaacacttctgtttggccttctataactgatcacccttctttgctctgttttccagataaatggagacaccagatctccctaacctctgacttctgccgttagccatactctgtgtagttagatctcagtctgggaatggcattccagggcaattgtgaacatgaggctagatttttcctttgatttagcacattcctaggcagacttttgcaagctcaaaaaatgaaaataatatctgcttaaccaaaacataatcataggaagaagaaaaattttaaaatgattgatttttgactctacattctttatctaccatactgctcttttcctttttagaaatattactaagcactttccgtatagataaatgaaatacaggctaatctttaggtgtcttaggaatttttgctttttgaaaaagaaaagctaatagcctaactgcagaggaactgagtggatggggtagctgctgtatagatttttagatgagatgatacagtgtggattacactgtaccttgggcgggagagtttgttcttgatatggaattcatatgcttttgaattgcactaataactcagcattaacaagtatattactccttaaattatacatgcattttcaatattcctaaccaaatagtttatagcttattgagaagaagtctgttcttggagagatgttgaaattagatgtttattaaactttaaaatataatgccttaagctgtggcactttaaaaacatctttatatataaattgctaaaaggactgttaatgcttttctcagacacattggcattttacaattttgcacatggtttatttgaaatcaaaaaataactatactttgttttataagtctacctaatatctcatttttgattctcatcgttagcacagttttgttgcttttattaaactattttaa

SEQ ID NO: 7434 - DNA, 1879 bp, Homo sapiens
  source 1..1879: mol_type = unassigned DNA
agagcaggacactggcgccgcgggtcaggcagctgcgtgcgcgtctcctccaggcagcaaggggaacccgaggccgccggcgcccggaccatgtcgtctccggggccgtcgcagccgccggccgaggacccgccctggcccgcgcgcctcctgcgtgcgcctctggtgggcaacttcggtcacgtgctgctgcctcccttcctccggcggcggagctggctgagcagcaggaccagggccgcagggattgatccctcggtcataggcccgcaggtgctcctggctcacctagcccgcgtgtacggcagcatcttcagcttctttatcggccactacctggtggtggtcctcagcgacttccacagcgtgcgcgaggcgctggtgcagcaggccgaggtcttcagcgaccgcccgcgggtgccgctcatctccatcgtgaccaaggagaagggggttgtgtttgcacattatggtcccgtctggagacaacaaaggaagttctctcattcaactcttcgtcattttgggttgggaaaacttagcttggagcccaagattattgaggagttcaaatatgtgaaagcagaaatgcaaaagcacggagaagaccccttctgccctttctccatcatcagcaatgccgtctctaacatcatttgctccttgtgctttggccagcgctttgattacactaatagtgagttcaagaaaatgcttggttttatgtcacgaggcctagaaatctgtctgaacagtcaagtcctcctggtcaacatatgcccttggctttattaccttccctttggaccatttaaggaattaagacaaattgaaaaggatataaccagtttccttaaaaaaatcatcaaagaccatcaagagtctctggatagagagaaccctcaggacttcatagacatgtaccttctccacatggaagaggagaggaaaaataatagtaacagcagttttgatgaagagtacttattttatatcattggggatctctttattgctgggactgataccacaactaactctttgctctggtgcctgctgtatatgtcgctgaaccccgatgtacaagaaaaggttcatgaagaaattgaaagagtcattggcgccaaccgagctccttccctcacagacaaggcccagatgccctacacagaagccaccatcatggaagtgcagaggctaactgtggtggtgccgcttgccattcctcatatgacctcagagaacacagtgctccaagggtataccattcctaaaggcacattgatcttacccaacctgtggtcagtacatagagacccagccatttgggagaaaccggaggatttctaccctaatcgatttctggatgaccaaggacaactaattaaaaaagaaacctttattccttttgggatagggaagcgggtgtgtatgggagaacaactggcaaagatggaattattcctaatgtttgtgagcctaatgcagagtttcgcatttgctttacctgaggattctaagaagcccctcctgactggaagatttggtctaactttagccccacatccatttaatataactatttcaaggagatgaagagcatctccaagaagagatggtaaaaagatatataaatacatatccttctaagcagattcttcctactgcaaaggacagtgaatccagcaactcagtggatccaagctgggctcagaggtcggaaggagggtagagcacactgggaggtttcatcttggaggattcctcagcaggatacttcagccattttagtaatgcaggtctgtgatttgggggatagaaaacaaagtacctatgaaacgggatatctggattttacttgcagtggcttccaccgatg

SEQ ID NO: 7435 - DNA, 1942 bp, Homo sapiens
  source 1..1942: mol_type = unassigned DNA
gtctcgccatgctgctcctgggcctgctgctgctgctgcccctgctggctggcgcccgcctgctgtggaactggtggaagctccggagcctccacctcccgcctcttgccccgggcttcttgcacttgctgcagcccgacctcccaatctatctgcttggcctgactcagaaattcgggcccatctacaggctccaccttgggctgcaagacaagctggtgtctaggaactacccggacctgtccttgggagactactccctgctctggaaagcccacaagaagctcacccgctcagccctgctgctgggcatccgtgactccatggagccagtggtggagcagctgacccaggagttctgtgagcgcatgagagcccagcccggcacccctgtggccattgaggaggaattctctctcctcacctgcagcatcatctgttacctcaccttcggagacaagatcaaggacgacaacttaatgcctgcctattacaaatgtatccaggaggtgttaaaaacctggagccactggtccatccaaattgtggacgtgattccctttctcaggttcttccccaatccaggtctccggaggctgaagcaggccatagagaagagggatcacatcgtggagatgcagctgaggcagcacaaggagagcctcgtggcaggccagtggagggacatgatggactacatgctccaaggggtggcgcagccgagcatggaagagggctctggacagctcctggaagggcacgtgcacatggctgcagtggacctcctgatcggtggcactgagaccacagcaaacaccctctcctgggccgtggtttttttgcttcaccaccctgagattcagcagcgactgcaggaggagctagaccacgaactgggccctggtgcctccagctcccgggtcccctacaaggaccgtgcacggctgcccttgctcaatgccaccatcgccgaggtgctgcgcctgcggcccgttgtgcccttagccttgccccaccgcaccacacggcccagcagcatctccggctacgacatccctgagggcacagtcatcattccgaacctccaaggcgcccacctggatgagacggtctgggagaggccacatgagttctggcctgatcgcttcctggagccaggcaagaactccagagctctggccttcggctgcggtgcccgcgtgtgcctgggcgagccgctggcgcgcctggagctcttcgtggtgctgacccgactgctgcaggccttcacgctgctgccctccggggacgccctgccctccctgcagcccctgccccactgcagtgtcatcctcaagatgcagcctttccaagtgcggctgcagccccgggggatgggggcccacagcccgggccagagccagtgatggggcaggaccgatgccagccgggtacctcagtttctcctttattgctcctgtacgaacccctcccctcccccctgtaaacacagtgctgcgagatcgctggcagagaaggcttcctccagcggctgggtggtgaaggaccctggctcttctctcggggcgacccctcagtgctcggcagtcatactggggtgcgagagaggtgggcagcagctcagcctccccccgctggggagcgaaagtttcttggtctcagcttcatttccgtgaagggcaccgagaactcgaagcccttccagtggtaccagctcactccctgggaaaggggttgtcaagagagagtcaaagccggatgtcccatctgctcttcccgttccccttaaggaggtagctcccagcactcaaccaacctccccgcagagctcccttcctgaccctccgctgcagaggattgaggcttaattctgagctggccctttccagccaataaatcaactccagctccctctgcgaggctggcatgattgttccatttc

SEQ ID NO: 7436 - DNA, 2121 bp, Homo sapiens
  source 1..2121: mol_type = unassigned DNA
gggtcggtgggagggtacctgaaggtggggtcaagggaggccccaaaacagtctacacagcaggagggatggctggggctcttgagctataagtggcacctcagggccctgacgggcgtctcgccatgctgctcctgggcctgctgctgctgctgcccctgctggctggcgcccgcctgctgtggaactggtggaagctccggagcctccacctcccgcctcttgccccgggcttcttgcacttgctgcagcccgacctcccaatctatctgcttggcctgactcagaaattcgggcccatctacaggctccaccttgggctgcaagatgtggtggtgctgaactccaagaggaccattgaggaagccatggtcaaaaagtgggcagactttgctggcagacctgagccacttacctacaagctggtgtctaggaactacccggacctgtccttgggagactactccctgctctggaaagcccacaagaagctcacccgctcagccctgctgctgggcatccgtgactccatggagccagtggtggagcagctgacccaggagttctgtgagcgcatgagagcccagcccggcacccctgtggccattgaggaggaattctctctcctcacctgcagcatcatctgttacctcaccttcggagacaagatcaaggacgacaacttaatgcctgcctattacaaatgtatccaggaggtgttaaaaacctggagccactggtccatccaaattgtggacgtgattccctttctcaggttcttccccaatccaggtctccggaggctgaagcaggccatagagaagagggatcacatcgtggagatgcagctgaggcagcacaaggagagcctcgtggcaggccagtggagggacatgatggactacatgctccaaggggtggcgcagccgagcatggaagagggctctggacagctcctggaagggcacgtgcacatggctgcagtggacctcctgatcggtggcactgagaccacagcaaacaccctctcctgggccgtggtttttttgcttcaccaccctgagattcagcagcgactgcaggaggagctagaccacgaactgggccctggtgcctccagctcccgggtcccctacaaggaccgtgcacggctgcccttgctcaatgccaccatcgccgaggtgctgcgcctgcggcccgttgtgcccttagccttgccccaccgcaccacacggcccagcagcatctccggctacgacatccctgagggcacagtcatcattccgaacctccaaggcgcccacctggatgagacggtctgggagaggccacatgagttctggcctgatcgcttcctggagccaggcaagaactccagagctctggccttcggctgcggtgcccgcgtgtgcctgggcgagccgctggcgcgcctggagctcttcgtggtgctgacccgactgctgcaggccttcacgctgctgccctccggggacgccctgccctccctgcagcccctgccccactgcagtgtcatcctcaagatgcagcctttccaagtgcggctgcagccccgggggatgggggcccacagcccgggccagagccagtgatggggcaggaccgatgccagccgggtacctcagtttctcctttattgctcctgtacgaacccctcccctcccccctgtaaacacagtgctgcgagatcgctggcagagaaggcttcctccagcggctgggtggtgaaggaccctggctcttctctcggggcgacccctcagtgctcggcagtcatactggggtgcgagagaggtgggcagcagctcagcctccccccgctggggagcgaaagtttcttggtctcagcttcatttccgtgaagggcaccgagaactcgaagcccttccagtggtaccagctcactccctgggaaaggggttgtcaagagagagtcaaagccggatgtcccatctgctcttcccgttccccttaaggaggtagctcccagcactcaaccaacctccccgcagagctcccttcctgaccctccgctgcagaggattgaggcttaattctgagctggccctttccagccaataaatcaactccagctccctc

SEQ ID NO: 7437 - DNA, 2182 bp, Homo sapiens
  source 1..2182: mol_type = unassigned DNA
ggtgtcattccagaaaagggccactctgtgggcgggtcggtgggagggtacctgaaggtggggtcaagggaggccccaaaacagtctacacagcaggagggatggctggggctcttgagctataagtggcacctcagggccctgacgggcgtctcgccatgctgctcctgggcctgctgctgctgctgcccctgctggctggcgcccgcctgctgtggaactggtggaagctccggagcctccacctcccgcctcttgccccgggcttcttgcacctgctgcagcccgacctccccatctatctgcttggcctgactcagaaattcgggcccatctacaggctccaccttgggctgcaagatgtggtggtgctgaactccaagaggaccattgaggaagccatggtcaaaaagtgggcagactttgctggcagacctgagccacttacctacaagctggtgtctaggaactacccggacctgtccttgggagactactccctgctctggaaagcccacaagaagctcacccgctcagccctgctgctgggcatccgtgactccatggagccagtggtggagcagctgacccaggagttctgtgagcgcatgagagcccagcccggcacccctgtggccattgaggaggaattctctctcctcacctgcagcatcatctgttacctcaccttcggagacaagatcaaggacgacaacttaatgcctgcctattacaaatgtatccaggaggtgttaaaaacctggagccactggtccatccaaattgtggacgtgattccctttctcaggttcttccccaatccaggtctccggaggctgaagcaggccatagagaagagggatcacatcgtggagatgcagctgaggcagcacaaggagagcctcgtggcaggccagtggagggacatgatggactacatgctccaaggggtggcgcagccgagcatggaagagggctctggacagctcctggaagggcacgtgcacatggctgcagtggacctcctgatcggtggcactgagaccacagcaaacaccctctcctgggccgtggtttttttgcttcaccaccctgagattcagcagcgactgcaggaggagctagaccacgaactgggccctggtgcctccagctcccgggtcccctacaaggaccgtgcacggctgcccttgctcaatgccaccatcgccgaggtgctgcgcctgcggcccgttgtgcccttagccttgccccaccgcaccacacggcccagcagcatctccggctacgacatccctgagggcacagtcatcattccgaacctccaaggcgcccacctggatgagacggtctgggagaggccacatgagttctggcctgatcgcttcctggagccaggcaagaactccagagctctggccttcggctgcggtgcccgcgtgtgcctgggcgagccgctggcgcgcctggagctcttcgtggtgctgacccgactgctgcaggccttcacgctgctgccctccggggacgccctgccctccctgcagcccctgccccactgcagtgtcatcctcaagatgcagcctttccaagtgcggctgcagccccgggggatgggggcccacagcccgggccagagccagtgatggggcaggaccgatgccagccgggtacctcagtttctcctttattgctcccgtacgaacccctcccctcccccctgtaaacacagtgctgcgagatcgctggcagagaaggcttcctccagcggctgggtggtgaaggaccctggctcttctctcggggcgacccctcagtgctcggcagtcatactggggtgcgagagaggtgggcagcagctcagcctccccccgctggggagcgaaagtttcttggtctcagcttcatttccgtgaagggcaccgagaactcgaagcccttccagtggtaccagctcactccctgggaaaggggttgtcaagagagagtcaaagccggatgtcccatctgctcttcccgttccccttaaggaggtagctcccagcactcaaccaacctccccgcagagctcccttcctgaccctccgctgcagaggattgaggcttaattctgagctggccctttccagccaataaatcaactccagctccctctgcgaggctggcatgattgttccatttc

SEQ ID NO: 7438 - DNA, 1942 bp, Homo sapiens
  source 1..1942: mol_type = unassigned DNA
gtctcgccatgctgctcctgggcctgctgctgctgctgcccctgctggctggcgcccgcctgctgtggaactggtggaagctccggagcctccacctcccgcctcttgccccgggcttcttgcacttgctgcagcccgacctcccaatctatctgcttggcctgactcagaaattcgggcccatctacaggctccaccttgggctgcaagacaagctggtgtctaggaactacccggacctgtccttgggagactactccctgctctggaaagcccacaagaagctcacccgctcagccctgctgctgggcatccgtgactccatggagccagtggtggagcagctgacccaggagttctgtgagcgcatgagagcccagcccggcacccctgtggccattgaggaggaattctctctcctcacctgcagcatcatctgttacctcaccttcggagacaagatcaaggacgacaacttaatgcctgcctattacaaatgtatccaggaggtgttaaaaacctggagccactggtccatccaaattgtggacgtgattccctttctcaggttcttccccaatccaggtctccggaggctgaagcaggccatagagaagagggatcacatcgtggagatgcagctgaggcagcacaaggagagcctcgtggcaggccagtggagggacatgatggactacatgctccaaggggtggcgcagccgagcatggaagagggctctggacagctcctggaagggcacgtgcacatggctgcagtggacctcctgatcggtggcactgagaccacagcaaacaccctctcctgggccgtggtttttttgcttcaccaccctgagattcagcagcgactgcaggaggagctagaccacgaactgggccctggtgcctccagctcccgggtcccctacaaggaccgtgcacggctgcccttgctcaatgccaccatcgccgaggtgctgcgcctgcggcccgttgtgcccttagccttgccccaccgcaccacacggcccagcagcatctctggctacgacatccctgagggcacagtcatcattccgaacctccaaggcgcccacctggatgagacggtctgggagaggccacatgagttctggcctgatcgcttcctggagccaggcaagaactccagagctctggccttcggctgcggtgcccgcgtgtgcctgggcgagccgctggcgcgcctggagctcttcgtggtgctgacccgactgctgcaggccttcacgctgctgccctccggggacgccctgccctccctgcagcccctgccccactgcagtgtcatcctcaagatgcagcctttccaagtgcggctgcagccccgggggatgggggcccacagcccgggccagagccagtgatggggcaggaccgatgccagccgggtacctcagtttctcctttattgctcccgtacgaacccctcccctcccccctgtaaacacagtgctgcgagatcgctggcagagaaggcttcctccagcggctgggtggtgaaggaccctggctcttctctcggggcgacccctcagtgctcggcagtcatactggggtgcgagagaggtgggcagcagctcagcctccccccgctggggagcgaaagtttcttggtctcagcttcatttccgtgaagggcaccgagaactcgaagcccttccagtggtaccagctcactccctgggaaaggggttgtcaagagagagtcaaagccggatgtcccatctgctcctcccgttccccttaaggaggtggctcccagcactcaaccaacctccccgcagagctcccttcctgaccctctgccgcagaggattgaggcttaatcctgagctggtcctttccagccaataaatcaactccagctccctctgcgaggctggcatgattgttccatttc

SEQ ID NO: 7439 - DNA, 1914 bp, Homo sapiens
  source 1..1914: mol_type = unassigned DNA
gtctcgccatgctgctcctgggcctgctgctgctgctgcccctgctggctggcgcccgcctgctgtggaactggtggaagctccggagcctccacctcccgcctcttgccccgggcttcttgcacctgctgcagcccgacctccccatctatctgcttggcctgactcagaaattcgggcccatctacaggctccaccttgggctgcaagacaagctggtgtctaggaactacccggacctgtccttgggagactactccctgctctggaaagcccacaagaagctcacccgctcagccctgctgctgggcatccgtgactccatggagccagtggtggagcagctgacccaggagttctgtgagcgcatgagagcccagcccggcacccctgtggccattgaggaggaattctctctcctcacctgcagcatcatctgttacctcaccttcggagacaagatcaaggacgacaacttaatgcctgcctattacaaatgtatccaggaggtgttaaaaacctggagccactggtccatccaaattgtggacgtgattccctttctcaggttcttccccaatccaggtctccggaggctgaagcaggccatagagaagagggatcacatcgtggagatgcagctgaggcagcacaaggagagcctcgtggcaggccagtggagggacatgatggactacatgctccaaggggtggcgcagccgagcatggaagagggctctggacagctcctggaagggcacgtgcacatggctgcagtggacctcctgatcggtggcactgagaccacagcaaacaccctctcctgggccgtggtttttttgcttcaccaccctgagattcagcagcgactgcaggaggagctagaccacgaactgggccctggtgcctccagctcccgggtcccctacaaggaccgtgcacggctgcccttgctcaatgccaccatcgccgaggtgctgcgcctgcggcccgttgtgcccttagccttgccccaccgcaccacacggcccagcagcatctccggctacgacatccctgagggcacagtcatcattccgaacctccaaggcgcccacctggatgagacggtctgggagaggccacatgagttctggcctgatcgcttcctggagccaggcaagaactccagagctctggccttcggctgcggtgcccgcgtgtgcctgggcgagccgctggcgcgcctggagctcttcgtggtgctgacccgactgctgcaggccttcacgctgctgccctccggggacgccctgccctccctgcagcccctgccccactgcagtgtcatcctcaagatgcagcctttccaagtgcggctgcagccccgggggatgggggcccacagcccgggccagagccagtgatggggcaggaccgatgccagccgggtacctcagtttctcctttattgctcccgtacgaacccctcccctcccccctgtaaacacagtgctgcgagatcgctggcagagaaggcttcctccagcggctgggtggtgaaggaccctggctcttctctcggggcgacccctcagtgctcggcagtcatactggggtgcgagagaggtgggcagcagctcagcctccccccgctggggagcgaaagtttcttggtctcagcttcatttccgtgaagggcaccgagaactcgaagcccttccagtggtaccagctcactccctgggaaaggggttgtcaagagagagtcaaagccggatgtcccatctgctcttcccgttccccttaaggaggtagctcccagcactcaaccaacctccccgcagagctcccttcctgaccctccgctgcagaggattgaggcttaattctgagctggccctttccagccaataaatcaactccagctccctc

SEQ ID NO: 7440 - DNA, 2118 bp, Homo sapiens
  source 1..2118: mol_type = unassigned DNA
gggtcggtgggagggtacctgaaggtggggtcaagggaggccccaaaacagtctacacagcaggagggatggctggggctcttgagctataagtggcacctcagggccctgacgggcgtctcgccatgctgctcctgggcctgctgctgctgcccctgctggctggcgcccgcctgctgtggaactggtggaagctccggagcctccacctcccgcctcttgccccgggcttcttgcacttgctgcagcccgacctcccaatctatctgcttggcctgactcagaaattcgggcccatctacaggctccaccttgggctgcaagatgtggtggtgctgaactccaagaggaccattgaggaagccatggtcaaaaagtgggcagactttgctggcagacctgagccacttacctacaagctggtgtctaagaactacccggacctgtccttgggagactactccctgctctggaaagcccacaagaagctcacccgctcagccctgctgctgggcatccgtgactccatggagccagtggtggagcagctgacccaggagttctgtgagcgcatgagagcccagcccggcacccctgtggccattgaggaggaattctctctcctcacctgcagcatcatctgttacctcaccttcggagacaagatcaaggacgacaacttaatgcctgcctattacaaatgtatccaggaggtgttaaaaacctggagccactggtccatccaaattgtggacgtgattccctttctcaggttcttccccaatccaggtctccggaggctgaagcaggccatagagaagagggatcacatcgtggagatgcagctgaggcagcacaaggagagcctcgtggcaggccagtggagggacatgatggactacatgctccaaggggtggcgcagccgagcatggaagagggctctggacagctcctggaagggcacgtgcacatggctgcagtggacctcctgatcggtggcactgagaccacagcaaacaccctctcctgggccgtggtttttttgcttcaccaccctgagattcagcagcgactgcaggaggagctagaccacgaactgggccctggtgcctccagctcccgggtcccctacaaggaccgtgcacggctgcccttgctcaatgccaccatcgccgaggtgctgcgcctgcggcccgttgtgcccttagccttgccccaccgcaccacacggcccagcagcatctccggctacgacatccctgagggcacagtcatcattccgaacctccaaggcgcccacctggatgagacggtctgggagaggccacatgagttctggcctgatcgcttcctggagccaggcaagaactccagagctctggccttcggctgcggtgcccgcgtgtgcctgggcgagccgctggcgcgcctggagctcttcgtggtgctgacccgactgctgcaggccttcacgctgctgccctccggggacgccctgccctccctgcagcccctgccccactgcagtgtcatcctcaagatgcagcctttccaagtgcggctgcagccccgggggatgggggcccacagcccaggccagaaccagtgatggggcaggaccgatgccagccgggtacctcagtttctcctttattgctcccgtacgaacccctcccctcccccctgtaaacacagtgctgcgagatcgctggcagagaaggcttcctccagcggctgggtggtgaaggaccctggctcttctctcggggcgacccctcagtgctcggcagtcatactggggtgcgagagaggtgggcagcagctcagcctccccccgctggggagcgaaagtttcttggtctcagcttcatttccgtgaagggcaccgagaactcgaagcccttccagtggtaccagctcactccctgggaaaggggttgtcaagagagagtcaaagccggatgtcccatctgctcttcccgttccccttaaggaggtagctcccagcactcaaccaacctccccgcagagctcccttcctgaccctccgctgcagaggattgaggcttaattctgagctggccctttccagccaataaatcaactccagctccctc

SEQ ID NO: 7441 - DNA, 2114 bp, Homo sapiens
  source 1..2114: mol_type = unassigned DNA
gggtcggtgggagggtacctgaaggtggggtcaagggaggccccaaaacagtctacacagcaggagggatggctggggctcttgagctataagtggcacctcagggccctgacgggcgtctcgccatgctgctcctgggcctgctgctgctgcccctgctggctggcgcccgcctgctgtggaactggtggaagctccggagcctccacctcccgcctcttgccccgggcttcttgcacttgctgcagcccgacctcccaatctatctgcttggcctgactcagaaattcgggcccatctacaggctccaccttgggctgcaagatgtggtggtgctgaactccaagaggaccattgaggaagccatggtcaaaaagtgggcagactttgctggcagacctgagccacttacctacaagctggtgtctaagaactacccggacctgtccttgggagactactccctgctctggaaagcccacaagaagctcacccgctcagccctgctgctgggcatccgtgactccatggagccagtggtggagcagctgacccaggagttctgtgagcgcatgagagcccagcccggcacccctgtggccattgaggaggaattctctctcctcacctgcagcatcatctgttacctcaccttcggagacaagatcaaggacgacaacttaatgcctgcctattacaaatgtatccaggaggtgttaaaaacctggagccactggtccatccaaattgtggacgtgattccctttctcaggttcttccccaatccaggtctccggaggctgaagcaggccatagagaagagggatcacatcgtggagatgcagctgaggcagcacaaggagagcctcgtggcaggccagtggagggacatgatggactacatgctccaaggggtggcgcagccgagcatggaagagggctctggacagctcctggaagggcacgtgcacatggctgcagtggacctcctgatcggtggcactgagaccacagcaaacaccctctcctgggccgtggtttttttgcttcaccaccctgagattcagcagcgactgcaggaggagctagaccacgaactgggccctggtgcctccagctcccgggtcccctacaaggaccgtgcacggctgcccttgctcaatgccaccatcgccgaggtgctgcgcctgcggcccgttgtgcccttagccttgccccaccgcaccacacggcccagcagcatctccggctacgacatccctgagggcacagtcatcattccgaacctccaaggcgcccacctggatgagacggtctgggagaggccacatgagttctggcctgatcgcttcctggagccaggcaagaactccagagctctggccttcggctgcggtgcccgcgtgtgcctgggcgagccgctggcgcgcctggagctcttcgtggtgctgacccgactgctgcaggccttcacgctgctgccctccggggacgccctgccctccctgcagcccctgccccactgcagtgtcatcctcaagatgcagcctttccaagtgcggctgcagccccgggggatgggggcccacagcccaggccagaaccagtgatggggcaggaccgatgccagccgggtacctcagtttctcctttattgctcccgtacgaacccctcccctcccccctgtaaacacagtgctgcgagatcgctggcagagaaggcttcctccagcggctgggtggtgaaggaccctggctcttctctcggggcgacccctcagtgctcggcagtcatactggggtgcgagagaggtgggcagcagctcagcctccccccgctggggagcgaaagtttcttggtctcagcttcatttccgtgaagggcaccgagaactcgaagcccttccagtggtaccagctcactccctgggaaaggggttgtcaagagagagtcaaagccggatgtcccatctgctcttcccgttccccttaaggaggtagctcccagcactcaaccaacctccccgcagagctcccttcctgaccctccgctgcagaggattgaggcttaattctgagctggccctttccagccaataaatcaactccagctc

SEQ ID NO: 7442 - DNA, 2121 bp, Homo sapiens
  source 1..2121: mol_type = unassigned DNA
gggtcggtgggagggtacctgaaggtggggtcaagggaggccccaaaacagtctacacagcaggagggatggctggggctcttgagctataagtggcacctcagggccctgacgggcgtctcgccatgctgctcctgggcctgctgctgctgctgcccctgctggctggcgcccgcctgctgtggaactggtggaagctccggagcctccacctcccgcctcttgccccgggcttcttgcacttgctgcagcccgacctcccaatctatctgcttggcctgactcagaaattcgggcccatctacaggctccaccttgggctgcaagatgtggtggtgctgaactccaagaggaccattgaggaagccatggtcaaaaagtgggcagactttgctggcagacctgagccacttacctacaagctggtgtctaggaactacccggacctgtccttgggagactactccctgctctggaaagcccacaagaagctcacccgctcagccctgctgctgggcatccgtgactccatggagccagtggtggagcagctgacccaggagttctgtgagcgcatgagagcccagcccggcacccctgtggccattgaggaggaattctctctcctcacctgcagcatcatctgttacctcaccttcggagacaagatcaaggacgacaacttaatgcctgcctattacaaatgtatccaggaggtgttaaaaacctggagccactggtccatccaaattgtggacgtgattccctttctcaggttcttccccaatccaggtctccggaggctgaagcaggccatagagaagagggatcacatcgtggagatgcagctgaggcagcacaaggagagcctcgtggcaggccagtggagggacatgatggactacatgctccaaggggtggcgcagccgagcatggaagagggctctggacagctcctggaagggcacgtgcacatggctgcagtggacctcctgatcggtggcactgagaccacagcaaacaccctctcctgggccgtggtttttttgcttcaccaccctgagattcagcagcgactgcaggaggagctagaccacgaactgggccctggtgcctccagctcccgggtcccctacaaggaccgtgcacggctgcccttgctcaatgccaccatcgccgaggtgctgcgcctgcggcccgttgtgcccttagccttgccccaccgcaccacacggcccagcagcatctctggctacgacatccctgagggcacagtcatcattccgaacctccaaggcgcccacctggatgagacggtctgggagaggccacatgagttctggcctgatcgcttcctggagccaggcaagaactccagagctctggccttcggctgcggtgcccgcgtgtgcctgggcgagccgctggcgcgcctggagctcttcgtggtgctgacccgactgctgcaggccttcacgctgctgccctccggggacgccctgccctccctgcagcccctgccccactgcagtgtcatcctcaagatgcagcctttccaagtgcggctgcagccccgggggatgggggcccacagcccgggccagagccagtgatggggcaggaccgatgccagccgggtacctcagtttctcctttattgctcccgtacgaacccctcccctcccccctgtaaacacagtgctgcgagatcgctggcagagaaggcttcctccagcggctgggtggtgaaggaccctggctcttctctcggggcgacccctcagtgctcggcagtcatactggggtgcgagagaggtgggcagcagctcagcctccccccgctggggagcgaaagtttcttggtctcagcttcatttccgtgaagggcaccgagaactcgaagcccttccagtggtaccagctcactccctgggaaaggggttgtcaagagagagtcaaagccggatgtcccatctgctcctcccgttccccttaaggaggtggctcccagcactcaaccaacctccccgcagagctcccttcctgaccctctgccgcagaggattgaggcttaatcctgagctggtcctttccagccaataaatcaactccagctccctc

SEQ ID NO: 7443 - DNA, 1939 bp, Homo sapiens
  source 1..1939: mol_type = unassigned DNA
gtctcgccatgctgctcctgggcctgctgctgctgcccctgctggctggcgcccgcctgctgtggaactggtggaagctccggagcctccacctcccgcctcttgccccgggcttcttgcacttgctgcagcccgacctcccaatctatctgcttggcctgactcagaaattcgggcccatctacaggctccaccttgggctgcaagacaagctggtgtctaagaactacccggacctgtccttgggagactactccctgctctggaaagcccacaagaagctcacccgctcagccctgctgctgggcatccgtgactccatggagccagtggtggagcagctgacccaggagttctgtgagcgcatgagagcccagcccggcacccctgtggccattgaggaggaattctctctcctcacctgcagcatcatctgttacctcaccttcggagacaagatcaaggacgacaacttaatgcctgcctattacaaatgtatccaggaggtgttaaaaacctggagccactggtccatccaaattgtggacgtgattccctttctcaggttcttccccaatccaggtctccggaggctgaagcaggccatagagaagagggatcacatcgtggagatgcagctgaggcagcacaaggagagcctcgtggcaggccagtggagggacatgatggactacatgctccaaggggtggcgcagccgagcatggaagagggctctggacagctcctggaagggcacgtgcacatggctgcagtggacctcctgatcggtggcactgagaccacagcaaacaccctctcctgggccgtggtttttttgcttcaccaccctgagattcagcagcgactgcaggaggagctagaccacgaactgggccctggtgcctccagctcccgggtcccctacaaggaccgtgcacggctgcccttgctcaatgccaccatcgccgaggtgctgcgcctgcggcccgttgtgcccttagccttgccccaccgcaccacacggcccagcagcatctccggctacgacatccctgagggcacagtcatcattccgaacctccaaggcgcccacctggatgagacggtctgggagaggccacatgagttctggcctgatcgcttcctggagccaggcaagaactccagagctctggccttcggctgcggtgcccgcgtgtgcctgggcgagccgctggcgcgcctggagctcttcgtggtgctgacccgactgctgcaggccttcacgctgctgccctccggggacgccctgccctccctgcagcccctgccccactgcagtgtcatcctcaagatgcagcctttccaagtgcggctgcagccccgggggatgggggcccacagcccaggccagaaccagtgatggggcaggaccgatgccagccgggtacctcagtttctcctttattgctcccgtacgaacccctcccctcccccctgtaaacacagtgctgcgagatcgctggcagagaaggcttcctccagcggctgggtggtgaaggaccctggctcttctctcggggcgacccctcagtgctcggcagtcatactggggtgcgagagaggtgggcagcagctcagcctccccccgctggggagcgaaagtttcttggtctcagcttcatttccgtgaagggcaccgagaactcgaagcccttccagtggtaccagctcactccctgggaaaggggttgtcaagagagagtcaaagccggatgtcccatctgctcttcccgttccccttaaggaggtagctcccagcactcaaccaacctccccgcagagctcccttcctgaccctccgctgcagaggattgaggcttaattctgagctggccctttccagccaataaatcaactccagctccctctgcgaggctggcatgattgttccatttc

SEQ ID NO: 7444 - DNA, 1942 bp, Homo sapiens; identical to SEQ ID NO: 7435
  source 1..1942: mol_type = unassigned DNA

SEQ ID NO: 7445 - DNA, 1939 bp, Homo sapiens; identical to SEQ ID NO: 7443
  source 1..1939: mol_type = unassigned DNA

SEQ ID NO: 7446 - DNA, 2114 bp, Homo sapiens
  source 1..2114: mol_type = unassigned DNA
tgggaaggcacctgagggtggggtcaagggaggccccaaaacagtctacacagcaggagggatggctggggctcttgagctataagtggcacctcagggccctgacgggcgtcttgccatgctgctcctgggcctgctgctgctgctgcccctgctggctggcgcccgcctgctgtggaactggtggaagctccggagcctccacctcctgcctcttgccccgggcttcttgcacctgctgcagcccgacctccccatctatctgcttggcctgactcagaaattcgggcccatctacaggctccaccttgggctgcaagatgtggtggtgctgaactccaagaggaccattgaggaagccatggtcaaaaagtgggcagactttgctggcagacctgagccacttacctacaagctggtgtctaagaactacccggacctgtccttgggagactactccctgctctggaaagcccacaagaagctcacccgctcagccctgctgctgggcatccgtgactccatggagccagtggtggagcagctgacccaggagttctgtgagcgcatgagagcccagcccggcacccctgtggccattgaggaggaattctctctcctcacctgcagcatcatctgttacctcaccttcggagacaagatcaaggacgacaacttaatgcctgcctattacaaatgtatccaggaggtgttaaaaacctggagccactggtccatccaaattgtggacgtgattccctttctcaggttcttccccaatccaggtctccggaggctgaagcaggccatagagaagagggatcacatcgtggagatgcagctgaggcagcacaaggagagcctcgtggcaggccagtggagggacatgatggactacatgctccaaggggtggcgcagccgagcatggaagagggctctggacagctcctggaagggcacgtgcacatggctgcagtggacctcctgatcggtggcactgagaccacagcaaacaccctctcctgggccgtggtttttttgcttcaccaccctgagattcagcagcgactgcaggaggagctagaccacgaactgggccctggtgcctccagctcccgggtcccctacaaggaccgtgcacggctgcccttgctcaatgccaccatcgccgaggtgctgcgcctgcggcccgttgtgcccttagccttgccccaccgcaccacacggcccagcagcatctccggctacgacatccctgagggcacagtcatcattccgaacctccaaggcgcccacctggatgagacggtctgggagaggccacatgagttctggcctgatcgcttcctggagccaggcaagaactccagagctctggccttcggctgcggtgcccgcgtgtgcctgggcgagccgctggcgcgcctggagctcttcgtggtgctgacccgactgctgcaggccttcacgctgctgccctccggggacgccctgccctccctgcagcccctgccccactgcagtgtcatcctcaagatgcagcctttccaagtgcggctgcagccccgggggatgggggcccacagcccaggccagaaccagtgatggggcaggaccgatgccagccgggtacctcagtttctcctttattgctcccgtacgaacccctcccctcccccctgtaaacacagtgctgcgagatcgctggcagagaaggcttcctccagcggctgggtggtgaaggaccctggctcttctctcggggcgacccctcagtgctcggcagtcatactggggtgcgagagaggtgggcagcagctcagcctccccccgctggggagcgaaagtttcttggtctcagcttcatttccgtgaagggcaccgagaactcgaagcccttccagtggtaccagctcactccctgggaaaggggttgtcaagagagagtcaaagccggatgtcccatctgctcttcccgttccccttaaggaggtagctcccagcactcaaccaacctccccgcagagctcccttcctgaccctccgctgcagaggattgaggcttaattctgagctggccctttccagccaataaatcaactccagctccctc

SEQ ID NO: 7447 - DNA, 1965 bp, Homo sapiens
  source 1..1965: mol_type = unassigned DNA
gtcaagggaggccccaaaacagtctacacagcaggagggatggctggggctcttgagctataagtggcacctcagggccctgacgggcgtcttgccatgctgctcctgggcctgctgctgctgctgcccctgctggctggcgcccgcctgctgtggaactggtggaagctccggagcctccacctcccgcctcttgccccgggcttcttgcacttgctgcagcccgacctcccaatctatctgcttggcctgactcagaaattcgggcccatctacaggctccaccttgggctgcaagatgtggtggtgctgaactccaagaggaccattgaggaagccatggtcaaaaagtgggcagactttgctggcagacctgagccacttacctacaagctggtgtctaagaactacccggacctgtccttgggagactactccctgctctggaaagcccacaagaagctcacccgctcagccctgctgctgggcatccgtgactccatggagccagtggtggagcagctgacccaggagttctgtgagcgcatgagagcccagcccggcacccctgtggccattgaggaggaattctctctcctcacctgcagcatcatctgttacctcaccttcggagacaagatcaaggacgacaacttaatgcctgcctattacaaatgtatccaggaggtgttaaaaacctggagccactggtccatccaaattgtggacgtgattccctttctcaggttcttccccaatccaggtctccggaggctgaagcaggccatagagaagagggatcacatcgtggagatgcagctgaggcagcacaaggagagcctcgtggcaggccagtggagggacatgatggactacatgctccaaggggtggcgcagccgagcatggaagagggctctggacagctcctggaagggcacgtgcacatggctgcagtggacctcctgatcggtggcactgagaccacagcaaacaccctctcctgggccgtggtttttttgcttcaccaccctgagattcagcagcgactgcaggaggagctagaccacgaactgggccctggtgcctccagctcccgggtcccctacaaggaccgtgcacggctgcccttgctcaatgccaccatcgccgaggtgctgcgcctgcggcccgttgtgcccttagccttgccccaccgcaccacacggcccagcagcatctccggctacgacatccctgagggcacagtcatcattccgaacctccaaggcgcccacctggatgagacggtctgggagaggccacatgagttctggcctgatcgcttcctggagccaggcaagaactccagagctctggccttcggctgcggtgcccgcgtgtgcctgggcgagccgctggcgcgcctggagctcttcgtggtgctgacccgactgctgcaggccttcacgctgctgccctccggggacgccctgccctccctgcagcccctgccccactgcagtgtcatcctcaagatgcagcctttccaagtgcggctgcagccccgggggatgggggcccacagcccaggccagaaccagtgatggggcaggaccgatgccagccgggtacctcagtttctcctttattgctcccgtacgaacccctcccctcccccctgtaaacacagtgctgcgagatcgctggcagagaaggcttcctccagcggctgggtggtgaaggaccctggctcttctctcggggcgacccctcagtgctcggcagtcatactggggtgcgagagaggtgggcagcagctcagcctccccccgctggggagcgaaagtttcttggtctcagcttcatttccgtgaagggcaccgagaactcgaagcccttccagtggtaccagctcactccctgggaaaggggttgtcaagagagagtcaaagccggatgtcccatctgctcttcccgttcccctt

SEQ ID NO: 7448 - DNA, 2024 bp, Homo sapiens
  source 1..2024: mol_type = unassigned DNA
tgggaaggcacctgagggtggggtcaagggaggccccaaaacagtctacacagcaggagggatggctggggctcttgagctataagtggcacctcagggccctgacgggcgtcttgccatgctgctcctgggcctgctgctgctgctgcccctgctggctggcgcccgcctgctgtggaactggtggaagctccggagcctccacctcctgcctcttgccccgggcttcttgcacctgctgcagcccgacctccccatctatctgcttggcctgactcagaaattcgggcccatctacaggctccaccttgggctgcaagacaagctggtgtctaagaactacccggacctgtccttgggagactactccctgctctggaaagcccacaagaagctcacccgctcagccctgctgctgggcatccgtgactccatggagccagtggtggagcagctgacccaggagttctgtgagcgcatgagagcccagcccggcacccctgtggccattgaggaggaattctctctcctcacctgcagcatcatctgttacctcaccttcggagacaagatcaaggacgacaacttaatgcctgcctattacaaatgtatccaggaggtgttaaaaacctggagccactggtccatccaaattgtggacgtgattccctttctcaggttcttccccaatccaggtctccggaggctgaagcaggccatagagaagagggatcacatcgtggagatgcagctgaggcagcacaaggagagcctcgtggcaggccagtggagggacatgatggactacatgctccaaggggtggcgcagccgagcatggaagagggctctggacagctcctggaagggcacgtgcacatggctgcagtggacctcctgatcggtggcactgagaccacagcaaacaccctctcctgggccgtggtttttttgcttcaccaccctgagattcagcagcgactgcaggaggagctagaccacgaactgggccctggtgcctccagctcccgggtcccctacaaggaccgtgcacggctgcccttgctcaatgccaccatcgccgaggtgctgcgcctgcggcccgttgtgcccttagccttgccccaccgcaccacacggcccagcagcatctccggctacgacatccctgagggcacagtcatcattccgaacctccaaggcgcccacctggatgagacggtctgggagaggccacatgagttctggcctgatcgcttcctggagccaggcaagaactccagagctctggccttcggctgcggtgcccgcgtgtgcctgggcgagccgctggcgcgcctggagctcttcgtggtgctgacccgactgctgcaggccttcacgctgctgccctccggggacgccctgccctccctgcagcccctgccccactgcagtgtcatcctcaagatgcagcctttccaagtgcggctgcagccccgggggatgggggcccacagcccaggccagaaccagtgatggggcaggaccgatgccagccgggtacctcagtttctcctttattgctcccgtacgaacccctcccctcccccctgtaaacacagtgctgcgagatcgctggcagagaaggcttcctccagcggctgggtggtgaaggaccctggctcttctctcggggcgacccctcagtgctcggcagtcatactggggtgcgagagaggtgggcagcagctcagcctccccccgctggggagcgaaagtttcttggtctcagcttcatttccgtgaagggcaccgagaactcgaagcccttccagtggtaccagctcactccctgggaaaggggttgtcaagagagagtcaaagccggatgtcccatctgctcttcccgttccccttaaggaggtagctcccagcactcaaccaacctccccgcagagctcccttcctgaccctccgctgcagaggattgaggcttaattctgagctggccctttccagccaataaatcaactccagctccctc

SEQ ID NO: 7449 - DNA, 3262 bp, Homo sapiens
  source 1..3262: mol_type = unassigned DNA
ggaggaaacgcagcgccagcagcatctcatctaccctccttgacacctccccgtggctccagccagaccctagaggtcagccttgcggaccaacaggaggactcccagctttcccttttcaagaggtccccagacaccggccaccctcttccagcccctgcggccagtgcaaggaggcaccaatgctctgaggctgtcgcgtggtgcagcgtcgagcatcctcgccgaggtcctttctgctgcctgtcccgcctcaccccgctccatcacaccagctggccctctttgcttccttttcccagaatcgttaagccccgactcccactagcacctcgtaccaacctcgccccaccccatcctcctgccttcccgcgctccggtgtcccccgctgccatgagctcccccatcagcaagagccgctcgcttgccgccttcctgcagcagctgcgcagtccgaggcagcccccgagactggtgacatctacggcgtacacgtcccctcagccgcgagaggtgccagtctgcccgctgacagctggtggcgagactcagaacgcggccgccctgccgggccccaccagctggccactgctgggcagcctgctgcagattctctggaaagggggtctcaagaaacagcacgacaccctggtggagtaccacaagaagtatggcaagattttccgcatgaagttgggttcctttgagtcggtgcacctgggctcgccatgcctgctggaagcgctgtaccgcaccgagagcgcgtacccgcagcggctggagatcaaaccgtggaaggcctatcgcgactaccgcaaagaaggctacgggctgctgatcctggaaggggaagactggcagcgggtccggagtgcctttcaaaagaaactaatgaaaccaggggaagtgatgaagctggacaacaaaatcaatgaggtcttggccgattttatgggcagaatagatgagctctgtgatgaaagaggccacgttgaagacttgtacagcgaactgaacaaatggtcgtttgaaagtatctgcctcgtgttgtatgagaagagatttgggcttctccagaagaatgcaggggatgaagctgtgaacttcatcatggccatcaaaacaatgatgagcacgtttgggaggatgatggtcactccagtcgagctgcacaagagcctcaacaccaaggtctggcaggaccacactctggcctgggacaccattttcaaatcagtcaaagcttgtatcgacaaccggttagagaagtattctcagcagcctagtgcagatttcctttgtgacatttatcaccagaatcggctttcaaagaaagaattgtatgctgctgtcacagagctccagctggctgcggtggaaacgacagcaaacagtctaatgtggattctctacaatttatcccgtaatccccaagtgcaacaaaagcttcttaaggaaattcaaagtgtattacctgagaatcaggtgccacgggcagaagatttgaggaatatgccgtatttaaaagcctgtctgaaagaatctatgaggcttacgccgagtgtaccatttacaactcggactcttgacaaggcaacagttctgggtgaatatgctttacccaaaggaacagtgctcatgctaaatacccaggtgttgggatccagtgaagacaattttgaagattcaagtcagtttagacctgaacgttggcttcaggagaaggaaaaaattaatccttttgcgcatcttccatttggcgttggaaaaagaatgtgcattggtcgccgattagcagagcttcaactgcatttggctctttgttggattgtccgcaaatacgacatccaggccacagacaatgagcctgttgagatgctacactcaggcaccctggtgcccagccgggaactccccatcgcgttttgccagcgataatacgcctcagatggtggtatttgctaacatcatatccaactcagggaagcggactgagtgctgggatccaaggcattctacagggttcactgctggtttacacttcacctgtgtcagcaccatcttcaggtgcttagaatggcctgggagcctgttctgtcttgcatcttccatgacatgaaagggaggctggcacttgtcagtcaggtagaggttacaaaccgtttcaggccctgcctaccacattcactgtttgaatctttaattcccaagaataagtttacatttcacaatgaatgacctacaacagctaaattttctggggctgggagtaatactgacaatccatttactgtagctctgcttaatgtactacttaggaaaatgtccctgcttaataatgtaagccaagctaaatgatggttaaagttatcaggcctcccatgaaattgcgttcttcctgcattgaaataaaaacattattgggaaactagagaacacctctatttttaaaaggactttaacgaagtcaaacaacttataagactagtgattcactggggcattattttgttagaggaccttaaaattgtttattttttaaatgtgattcctttatggcattagggtaaagatgaagcaataatttttaaattgtgtatgtgcatatgaagcacagacatgcatgtgtgtgtgtgtctgtgtgtgtgtgtccgtgtatgtgtgtgtgggttctaatggtaatttgcctcagtcatttttttaatatttgcagtacttgatttaggatctgtggtgcagggcaatgtttcaaagtttagtcacagcttaaaaacattcagtgtgactttaatattataaaatgatttcccatgccataatttttctgtctattaaatgggacaagtgtaaagcatgcaaaagttagagatctgttatataacatttgttttgtgatttgaactcctaggaaaaatatgatttcataaatgtaaaatgcacagaaatgcatgcaatacttataagacttaaaaattgtgtttacagatggtttatttgtgcatatttttactactgcttttcctaaatgcatactgtatataattctgtgtatttgataaatatttcttcctacattatatttttagaatatttcagaaatatacatttatgtctttatattgtaataaatatgtacatatctaggtatatgctttctctctgctgtgaaattatttttagaattataaattcacgtcttgtcagatttcatctgtataccttcaaattctctgaaagtaaaaataaaagtttttaaatatt

SEQ ID NO: 7450 - DNA, 2227 bp, Homo sapiens
  source 1..2227: mol_type = unassigned DNA
ctagcacctcgtaccaacctcgccccaccccatcctcctgccttcccgcgctccggtgtcccccgctgccatgagctcccccatcagcaagagccgctcgcttgccgccttcctgcagcagctgcgcagtccgaggcagcccccgagactggtgacatctacggcgtacacgtcccctcagccgcgagaggtgccagtctgcccgctgacagctggtggcgagactcagaacgcggccgccctgccgggccccaccagctggccactgctgggcagcctgctgcagattctctggaaagggggtctcaagaaacagcacgacaccctggtggagtaccacaagaagtatggcaagattttccgcatgaagttgggttcctttgagtcggtgcacctgggctcgccatgcctgctggaagcgctgtaccgcaccgagagcgcgtacccgcagcggctggagatcaaaccgtggaaggcctatcgcgactaccgcaaagaaggctacgggctgctgatcctggaaggggaagactggcagcgggtccggagtgcctttcaaaagaaactaatgaaaccaggggaagtgatgaagctggacaacaaaatcaatgaggtcttggccgattttatgggcagaatagatgagctctgtgatgaaagaggccacgttgaagacttgtacagcgaactgaacaaatggtcgtttgaaagtatctgcctcgtgttgtatgagaagagatttgggcttctccagaagaatgcaggggatgaagctgtgaacttcatcatggccatcaaaacaatgatgagcacgtttgggaggatgatggtcactccagtcgagctgcacaagagcctcaacaccaaggtctggcaggaccacactctggcctgggacaccattttcaaatcagtcaaagcttgtatcgacaaccggttagagaagtattctcagcagcctagtgcagatttcctttgtgacatttatcaccagaatcggctttcaaagaaagaattgtatgctgctgtcacagagctccagctggctgcggtggaaacgacagcaaacagtctaatgtggattctctacaatttatcccgtaatccccaagtgcaacaaaagcttcttaaggaaattcaaagtgtattacctgagaatcaggtgccacgggcagaagatttgaggaatatgccgtatttaaaagcctgtctgaaagaatctatgaggcttacgccgagtgtaccatttacaactcggactcttgacaaggcaacagttctgggtgaatatgctttacccaaaggaattgtccgcaaatacgacatccaggccacagacaatgagcctgttgagatgctacactcaggcaccctggtgcccagccgggaactccccatcgcgttttgccagcgataatacgcctcagatggtggtatttgctaacatcatatccaactcagggaagcggactgagtgctgggatccaaggcattctacagggttcactgctggtttacacttcacctgtgtcagcaccatcttcaggtgcttagaatggcctgggagcctgttctgtcttgcatcttccatgacatgaaagggaggctggcacttgtcagtcaggtagaggttacaaaccgtttcaggccctgcctaccacattcactgtttgaatctttaattcccaagaataagtttacatttcacaatgaatgacctacaacagctaaattttctggggctgggagtaatactgacaatccatttactgtagctctgcttaatgtactacttaggaaaatgtccctgcttaataatgtaagccaagctaaatgatggttaaagttatcaggcctcccatgaaattgcgttcttcctgcattgaaataaaaacattattgggaaactagagaacacctctatttttaaaaggactttaacgaagtcaaacaacttataagactagtgattcactggggcattattttgttagaggaccttaaaattgtttattttttaaatgtgattcctttatggcattagggtaaagatgaagcaataatttttaaattgtgtatgtgcatatgaagcacagacatgcatgtgtgtgtgtgtctgtgtgtgtgtgtccgtgtatgtgtgtgtgggttctaatggtaatttgcctcagtcatttttttaatatttgcagtacttgatttaggatctgtggtgcagggcaatgtt

SEQ ID NO: 7451 - DNA, 2125 bp, Homo sapiens
  source 1..2125: mol_type = unassigned DNA
agcgctggcggcggcggcaggtggcgcgggaggtcgcggcgcgccatggggctcccggcgctgctggccagtgcgctctgcaccttcgtgctgccgctgctgctcttcctggctgcgatcaagctctgggacctgtactgcgtgagcggccgcgaccgcagttgtgccctcccattgccccccgggactatgggcttccccttctttggggaaaccttgcagatggtactgcagcggaggaagttcctgcagatgaagcgcaggaaatacggcttcatctacaagacgcatctgttcgggcggcccaccgtacgggtgatgggcgcggacaatgtgcggcgcatcttgctcggagagcaccggctggtgtcggtccactggccagcgtcggtgcgcaccattctgggatctggctgcctctctaacctgcacgactcctcgcacaagcagcgcaagaaggtgattatgcgggccttcagccgcgaggcactcgaatgctacgtgccggtgatcaccgaggaagtgggcagcagcctggagcagtggctgagctgcggcgagcgcggcctcctggtctaccccgaggtgaagcgcctcatgttccgaatcgccatgcgcatcctactgggctgcgaaccccaactggcgggcgacggggactccgagcagcagcttgtggaggccttcgaggaaatgacccgcaatctcttctcgctgcccatcgacgtgcccttcagcgggctgtaccggggcatgaaggcgcggaacctcattcacgcgcgcatcgagcagaacattcgcgccaagatctgcgggctgcgggcatccgaggcgggccagggctgcaaagacgcgctgcagctgttgatcgagcactcgtgggagaggggagagcggctggacatgcaggcactaaagcaatcttcaaccgaactcctctttggaggacacgaaaccacggccagtgcagccacatctctgatcacttacctggggctctacccacatgttctccagaaagtgcgagaagagctgaagagtaagggtttactttgcaagagcaatcaagacaacaagttggacatggaaattttggaacaacttaaatacatcgggtgtgttattaaggagacccttcgactgaatcccccagttccaggagggtttcgggttgctctgaagacttttgaattaaatggataccagattcccaagggctggaatgttatctacagtatctgtgatactcatgatgtggcagagatcttcaccaacaaggaagaatttaatcctgaccgattcatgctgcctcacccagaggatgcatccaggttcagcttcattccatttggaggaggccttaggagctgtgtaggcaaagaatttgcaaaaattcttctcaaaatatttacagtggagctggccaggcattgtgactggcagcttctaaatggacctcctacaatgaaaaccagtcccaccgtgtatcctgtggacaatctccctgcaagattcacccatttccatggggaaatctgatgagcttgaatgttcaaacctgagacttattggaagtgtacatatgagtttttaaggagtgttgtgttgactttatatttaatttctaaatgtatattataatatttatgtgttttgactatactaccacaatctttaaatattaaaataatgaatttgtatcatttccaaataaagtaaaatttgaaggtacttttctggtattttaagattcctgttgggtaaaactcaccagtttagtattttcttagtgtatttaaccagattttacaatgcctacctggacttatttgtcatctttgcatctgttttctgtgagaagaaatcttagctgttttttatgttaacagttattagaaaatatatgtctgtgtgtgttattccagacgtatctctgtaaattcttctacagtcacttagattccctatttggaaaattgatccaagttaatttaatttttttttggtttgctgtactttagggaaagatgaacctgaaaaggtaacactgagaactgtcactctaacctctccagcttatctaacatgtcataaacataataaatctgtgttgtccaatagtgcc

SEQ ID NO: 7452 - DNA, 2245 bp, Homo sapiens
  source 1..2245: mol_type = unassigned DNA
cggcacctggaaatggaaagccagtgaaggctgctttgggccggggcagcgggtgggaccgggcgggagggattccaaagagaccgccgggaaggctagagcttggaattccggctcctcggagtcctggccctcccccaccgccgcctcggagctcagcacaccttggatgggggaggcgggcagctcctagccccgcaccccaggaggcgcgctcggagggaagccgccaccgcgccgcctctgcctcggcgcggaacaaacggttaaagattttgggcagcgcctcgcggggggaggagccaggggcccaatccgcaattaaagatgaactttgggtgaactaattgtctgaccaagcggaggaagttcctgcagatgaagcgcaggaaatacggcttcatctacaagacgcatctgttcgggcggcccaccgtacgggtgatgggcgcggacaatgtgcggcgcatcttgctcggagagcaccggctggtgtcggtccactggccagcgtcggtgcgcaccattctgggatctggctgcctctctaacctgcacgactcctcgcacaagcagcgcaagaaggtgattatgcgggccttcagccgcgaggcactcgaatgctacgtgccggtgatcaccgaggaagtgggcagcagcctggagcagtggctgagctgcggcgagcgcggcctcctggtctaccccgaggtgaagcgcctcatgttccgaatcgccatgcgcatcctactgggctgcgaaccccaactggcgggcgacggggactccgagcagcagcttgtggaggccttcgaggaaatgacccgcaatctcttctcgctgcccatcgacgtgcccttcagcgggctgtaccggggcatgaaggcgcggaacctcattcacgcgcgcatcgagcagaacattcgcgccaagatctgcgggctgcgggcatccgaggcgggccagggctgcaaagacgcgctgcagctgttgatcgagcactcgtgggagaggggagagcggctggacatgcaggcactaaagcaatcttcaaccgaactcctctttggaggacacgaaaccacggccagtgcagccacatctctgatcacttacctggggctctacccacatgttctccagaaagtgcgagaagagctgaagagtaagggtttactttgcaagagcaatcaagacaacaagttggacatggaaattttggaacaacttaaatacatcgggtgtgttattaaggagacccttcgactgaatcccccagttccaggagggtttcgggttgctctgaagacttttgaattaaatggataccagattcccaagggctggaatgttatctacagtatctgtgatactcatgatgtggcagagatcttcaccaacaaggaagaatttaatcctgaccgattcatgctgcctcacccagaggatgcatccaggttcagcttcattccatttggaggaggccttaggagctgtgtaggcaaagaatttgcaaaaattcttctcaaaatatttacagtggagctggccaggcattgtgactggcagcttctaaatggacctcctacaatgaaaaccagtcccaccgtgtatcctgtggacaatctccctgcaagattcacccatttccatggggaaatctgatgagcttgaatgttcaaacctgagacttattggaagtgtacatatgagtttttaaggagtgttgtgttgactttatatttaatttctaaatgtatattataatatttatgtgttttgactatactaccacaatctttaaatattaaaataatgaatttgtatcatttccaaataaagtaaaatttgaaggtacttttctggtattttaagattcctgttgggtaaaactcaccagtttagtattttcttagtgtatttaaccagattttacaatgcctacctggacttatttgtcatctttgcatctgttttctgtgagaagaaatcttagctgttttttatgttaacagttattagaaaatatatgtctgtgtgtgttattccagacgtatctctgtaaattcttctacagtcacttagattccctatttggaaaattgatccaagttaatttaatttttttttggtttgctgtactttagggaaagatgaacctgaaaaggtaacactgagaactgtcactctaacctctccagcttatctaacatgtcataaacataataaatctgtgttgtccaat

SEQ ID NO: 7453 - DNA, 2125 bp, Homo sapiens; identical to SEQ ID NO: 7451
  source 1..2125: mol_type = unassigned DNA

SEQ ID NO: 7454 - DNA, 1569 bp, Homo sapiens
  source 1..1569: mol_type = unassigned DNA
atgttcccttgggggctgagctgcctgtcagtgctgggggcggcgggcactgctctcctgtgcgcgggcctgctgctcagcctggcccagcacctctggaccctccgctggatgctgagccgggaccgggcctccaccctgcctctgcccaagggctccatggggtggcccttcttcggcgaaacgctgcactggttagttcagggctcgcgcttccacagttctcgccgagagcgctatgggacagtgttcaagacgcacctgctgggcaggccagtgatccgcgtgagcggcgcggagaacgtgcgcaccatcctgctgggcgagcaccgcctggtgcgcagccagtggccgcagagtgcgcacatcctgctgggctcgcacacactgctaggtgcggtcggcgagccgcaccggcggcggcgcaaggtcctggcgcgcgtgttcagccgcgccgcgctggagcgctacgtgccgcgcctgcagggggcgctgcggcatgaggtgcgctcctggtgcgcggcgggcgggccggtctcagtctacgacgcctccaaagcgctcaccttccgcatggccgcgcgcatcctgctggggttgcggctggacgaggcgcagtgcgccacgctggcccggaccttcgagcagctcgtggagaacctcttctcactgcctctggacgttcccttcagtggcctacgcaagggcatccgggcaagggaccagctgcatcggcacctggagggggccatttctgagaagcttcacgaggacaaggctgcagagccgggtgatgccctcgacctaatcattcacagtgcaagggagctgggccatgagccctccatgcaggagctgaaggagtcggctgtggagctcctcttcgccgccttcttcaccacggccagtgccagcacctcgctcgtcctgctgctactgcagcatccggcggccatcgccaagattcgggaggagctggtggcgcaggggctggggcgcgcgtgcggctgcgcgcccggggccgctgggggcagcgaggggcccccgcccgactgcggctgcgagcccgacctcagcctcgcggcgctgggccgtctgcgctacgtcgactgcgtggtcaaggaggtgctgcgcctcctgccgccagtgtccgggggctaccgcaccgccctgcgcaccttcgagctcgacggctaccagatccccaagggctggagcgtgatgtatagcatccgggacacgcacgagacggctgcggtgtaccgcagccctcccgaaggcttcgatccagagcgcttcggcgcagcgcgcgaagattcccggggcgcctccagccgcttccattacatcccgttcggcggcggtgcgcgcagctgcctcggccaggagctggcgcaagccgtgctccagctgctagctgtggagctagtgcgcaccgcgcgctgggaactggccacacccgccttccccgccatgcagacggtgcccatcgtgcacccagtggacgggctgcggctctttttccaccccctcacgccttcggttgcggggaatgggctatgcctctga

SEQ ID NO: 7455 - DNA, 2286 bp, Homo sapiens
  source 1..2286: mol_type = unassigned DNA
gccgagggcagcttagccacggccggttcccgttccctccaggacgcgagggtcgccttgggtggggaaccgcgaccgggcgaggacctatcccggtgtggggcttcccgatttcgaaagaatctcgctgcacccccgcccagagttcagaccaagcgaaaagttatttgagaggcctcgggggcgcggggtgaggagtcgtggcggaggccttggtcggggcgccgtggatatccccgagtcaccgcgtccctctcctgcagctcccgcgtcgctgggaggagcgagggagcgagcgggaaggggtctagctggcctttgctcggccctccccagcgcccggctttgaacccgccctgcactgctgtctgggcgggtccggggactcagcactcgacccaaaggtgcaggcgcgcgagcacaacccatggctgcgctgggctgcgcgaggctgaggtgggcgctgcgaggggccggccgtggcctctgcccccacggggccagagccaaggccgcgatccctgccgccctcccctcggacaaggccaccggagctcccggagccgggcctggtgtccggcggcggcaacggagcttagaggagattccacgtctaggacagctgcgcttcttctttcagctgttcgttcaaggctatgccctgcaactgcaccagttacaggtgctttacaaggccaagtacggtccaatgtggatgtcctacttagggcctcagatgcacgtgaacctggccagtgccccgctcttggagcaagtgatgcggcaagagggcaagtacccagtacggaacgacatggagctatggaaggagcaccgggaccagcacgacctgacctatgggccgttcaccacggaaggacaccactggtaccagctgcgccaggctctgaaccagcggttgctgaagccagcggaagcagcgctctatacggatgctttcaatgaggtgattgatgactttatgactcgactggaccagctgcgggcagagagtgcttcggggaaccaggtgtcggacatggctcaactcttctactactttgccttggaagctatttgctacatcctgttcgagaaacgcattggctgcctgcagcgatccatccccgaggacaccgtgaccttcgtcagatccatcgggttaatgttccagaactcactctatgccaccttcctccccaagtggactcgccccgtgctgcctttctggaagcgatacctggatggttggaatgccatcttttcctttgggaagaagctgattgatgagaagctcgaagatatggaggcccaactgcaggcagcagggccagatggcatccaggtgtctggctacctgcacttcttactggccagtggacagctcagtcctcgggaggccatgggcagcctgcctgagctgctcatggctggagtggacacgacatccaacacgctgacatgggccctgtaccacctctcaaaggaccctgagatccaggaggccttgcacgaggaagtggtgggtgtggtgccagccgggcaagtgccccagcacaaggactttgcccacatgccgttgctcaaagctgtgcttaaggagactctgcgtctctaccctgtggtccccacaaactcccggatcatagaaaaggaaattgaagttgatggcttcctcttccccaagaacacccagtttgtgttctgccactatgtggtgtcccgggaccccactgccttctctgagcctgaaagcttccagccccaccgctggctgagaaacagccagcctgctacccccaggatccagcacccatttggctctgtgccctttggctatggggtccgggcctgcctgggccgcaggattgcagagctggagatgcagctactcctcgcaaggctgatccagaagtacaaggtggtcctggccccggagacgggggagttgaagagtgtggcccgcattgtcctggttcccaataagaaagtgggcctgcagttcctgcagagacagtgctgagctgagtctccgccttgctggggcttgtcctagaggctccagctctggcacagtggttcctggctgctgccatgtctcagatgaggagggagagaaggaggccgccagactcgagaggtgggaggaactccttgcacacaccctgagcttttgccacttctatcatttttgagcaactccctctcagctaaaaggccacccctttatcgcattgctgtccttgggtagaatataaaataaagggacttttatttcttattgga

SEQ ID NO: 7456 - DNA, 2540 bp, Homo sapiens
  source 1..2540: mol_type = unassigned DNA
ttgcaacatgagacccaagggagttgtgaagtcagccccagccccgcctactgttcctgggtgctaatccccagcacagaccactcaggaggagggattggctgaggagcttggagagggggcgtcatcacctcacccaaaggttaaataggggttgagatatgatgctcaggagaagcgctttctttcgcgagcaccctgaaccagaccatgacccagaccctcaagtacgcctccagagtgttccatcgcgtccgctgggcgcccgagttgggcgcctccctaggctaccgagagtaccactcagcacgccggagcttggcagacatcccaggcccctctacgcccagctttctggccgaacttttctgcaagggggggctgtcgaggctacacgagctgcaggtgcagggcgccgcgcacttcgggccggtgtggctagccagctttgggacagtgcgcaccgtgtacgtggctgcccctgcactcgtcgaggagctgctgcgacaggagggaccccggcccgagcgctgcagcttctcgccctggacggagcaccgccgctgccgccagcgggcttgcggactgctcactgcggaaggcgaagaatggcaaaggctccgcagtctcctggccccgctcctcctccggcctcaagcggccgcccgctacgccggaaccctgaacaacgtagtctgcgaccttgtgcggcgtctgaggcgccagcggggacgtggcacggggccgcccgccctggttcgggacgtggcgggggaattttacaagttcggactggaaggcatcgccgcggttctgctcggctcgcgcttgggctgcctggaggctcaagtgccacccgacacggagaccttcatccgcgctgtgggctcggtgtttgtgtccacgctgttgaccatggcgatgccccactggctgcgccaccttgtgcctgggccctggggccgcctctgccgagactgggaccagatgtttgcatttgctcagaggcacgtggagcggcgagaggcagaggcagccatgaggaacggaggacagcccgagaaggacctggagtctggggcgcacctgacccacttcctgttccgggaagagttgcctgcccagtccatcctgggaaatgtgacagagttgctattggcgggagtggacacggtgtccaacacgctctcttgggctctgtatgagctctcccggcaccccgaagtccagacagcactccactcagagatcacagctgccctgagccctggctccagtgcctacccctcagccactgttctgtcccagctgcccctgctgaaggcggtggtcaaggaagtgctaagactgtaccctgtggtacctggaaattctcgtgtcccagacaaagacattcatgtgggtgactatattatccccaaaaatacgctggtcactctgtgtcactatgccacttcaagggaccctgcccagttcccagagccaaattcttttcgtccagctcgctggctgggggagggtcccaccccccacccatttgcatctcttccctttggctttggcaagcgcagctgtatggggagacgcctggcagagcttgaattgcaaatggctttggcccagatcctaacacattttgaggtgcagcctgagccaggtgcggccccagttagacccaagacccggactgtcctggtacctgaaaggagcatcaacctacagtttttggacagatagtcccatggaaagagactgtcatcatcaccctttcattcatcatagggataagattttttgtaggcacaagaccaaggtatacatcttcccctaatgcctatctgaccaaactggatagaaccaccatagtgaagtgtgaggcggccctgaccaatgtgtgaagtatgcacttggcctgactcaggaagccaggtgagaaaaccatggtctctctgcttgcttggcccttctgatcatgtatgcatcccccaaggatgaaatcagattttaactaataatgctggatggcctgaggaaagattcaactgcctctctttttgggctttcatagtgttcattgatgctgctggctaagcatttatcaaagcataagctcagtaactgtgcatctggtctgtacctggttggtccttcgtctttgcatgtaagctctttgagaggaagggtgaagccttatttgttttttatgtcccctgccagggcctgtctctgactaggtgtcaccatacacattcttagattgaatctgaaccatgtggcagaagggataagcagcttacttagtaggctctgtctacccccttccttctttgtcttgcccctaggaaggtgaatctgccctagcctggtttacggtttcttataactctcctttgctctctggccactattaagtgggtttgccccatcacttagttctcaggcagagacatctttgggcctgtccctgcccaggcctctggctttttatattgaaaatttttaaatattcacaaattttagaataaatcaaatattccatt

SEQ ID NO: 7457 - DNA, 2153 bp, Homo sapiens
  source 1..2153: mol_type = unassigned DNA
acaggtggccctgctactggctgcagctccagccctgcctccttctctagcatataaacaatccaacagcctcactgaatcactgctgtgcagggcaggaaagctccatgcacatagcccagcaaagagcaacacagagctgaaaggaagactcagaggagagagataagtaaggaaagtagtgatggctctcatcccagacttggccatggaaacctggcttctcctggctgtcagcctggtgctcctctatctatatggaacccattcacatggactttttaagaagcttggaattccagggcccacacctctgccttttttgggaaatattttgtcctaccataagggcttttgtatgtttgacatggaatgtcataaaaagtatggaaaagtgtggggcttttatgatggtcaacagcctgtgctggctatcacagatcctgacatgatcaaaacagtgctagtgaaagaatgttattctgtcttcacaaaccggaggccttttggtccagtgggatttatgaaaagtgccatctctatagctgaggatgaagaatggaagagattacgatcattgctgtctccaaccttcaccagtggaaaactcaaggagatggtccctatcattgcccagtatggagatgtgttggtgagaaatctgaggcgggaagcagagacaggcaagcctgtcaccttgaaagacgtctttggggcctacagcatggatgtgatcactagcacatcatttggagtgaacatcgactctctcaacaatccacaagacccctttgtggaaaacaccaagaagcttttaagatttgattttttggatccattctttctctcaataacagtctttccattcctcatcccaattcttgaagtattaaatatctgtgtgtttccaagagaagttacaaattttttaagaaaatctgtaaaaaggatgaaagaaagtcgcctcgaagatacacaaaagcaccgagtggatttccttcagctgatgattgactctcagaattcaaaagaaactgagtcccacaaagctctgtccgatctggagctcgtggcccaatcaattatctttatttttgctggctatgaaaccacgagcagtgttctctccttcattatgtatgaactggccactcaccctgatgtccagcagaaactgcaggaggaaattgatgcagttttacccaataaggcaccacccacctatgatactgtgctacagatggagtatcttgacatggtggtgaatgaaacgctcagattattcccaattgctatgagacttgagagggtctgcaaaaaagatgttgagatcaatgggatgttcattcccaaaggggtggtggtgatgattccaagctatgctcttcaccgtgacccaaagtactggacagagcctgagaagttcctccctgaaagattcagcaagaagaacaaggacaacatagatccttacatatacacaccctttggaagtggacccagaaactgcattggcatgaggtttgctctcatgaacatgaaacttgctctaatcagagtccttcagaacttctccttcaaaccttgtaaagaaacacagatccccctgaaattaagcttaggaggacttcttcaaccagaaaaacccgttgttctaaaggttgagtcaagggatggcaccgtaagtggagcctgaattttcctaaggacttctgctttgctcttcaagaaatctgtgcctgagaacaccagagacctcaaattactttgtgaatagaactctgaaatgaagatgggcttcatccaatggactgcataaataaccggggattctgtacatgcattgagctctctcattgtctgtgtagagtgttatacttgggaatataaaggaggtgaccaaatcagtgtgaggaggtagatttggctcctctgcttctcacgggactatttccaccacccccagttagcaccattaactcctcctgagctctgataagagaatcaacatttctcaataatttcctccacaaattattaatgaaaataagaattattttgatggctctaacaatgacatttatatcacatgttttctctggagtattctataagttttatgttaaatcaataaagaccactttacaaaagta

SEQ ID NO: 7458 - DNA, 2318 bp, Homo sapiens
  source 1..2318: mol_type = unassigned DNA
cactgctgtgcagggcaggaaagctccatgcacatagcccagcaaagagcaacacagagctgaaaggaagactcagaggagagagataagtaaggaaagtagtgatggctctcatcccagacttggccatggaaacctggcttctcctggctgtcagcctggtgctcctctatctcgtctttggggcctacagcatggatgtgatcactagcacatcatttggagtgaacatcgactctctcaacaatccacaagacccctttgtggaaaacaccaagaagcttttaagatttgattttttggatccattctttctctcaataacagtctttccattcctcatcccaattcttgaagtattaaatatctgtgtgtttccaagagaagttacaaattttttaagaaaatctgtaaaaaggatgaaagaaagtcgcctcgaagatacacaaaagcaccgagtggatttccttcagctgatgattgactctcagaattcaaaagaaactgagtcccacaaagctctgtccgatctggagctcgtggcccaatcaattatctttatttttgctggctatgaaaccacgagcagtgttctctccttcattatgtatgaactggccactcaccctgatgtccagcagaaactgcaggaggaaattgatgcagttttacccaataaggcaccacccacctatgatactgtgctacagatggagtatcttgacatggtggtgaatgaaacgctcagattattcccaattgctatgagacttgagagggtctgcaaaaaagatgttgagatcaatgggatgttcattcccaaaggggtggtggtgatgattccaagctatgctcttcaccgtgacccaaagtactggacagagcctgagaagttcctccctgaaagattcagcaagaagaacaaggacaacatagatccttacatatacacaccctttggaagtggacccagaaactgcattggcatgaggtttgctctcatgaacatgaaacttgctctaatcagagtccttcagaacttctccttcaaaccttgtaaagaaacacagatccccctgaaattaagcttaggaggacttcttcaaccagaaaaacccgttgttctaaaggttgagtcaagggatggcaccgtaagtggagcctgaattttcctaaggacttctgctttgctcttcaagaaatctgtgcctgagaacaccagagacctcaaattactttgtgaatagaactctgaaatgaagatgggcttcatccaatggactgcataaataaccggggattctgtacatgcattgagctctctcattgtctgtgtagagtgttatacttgggaatataaaggaggtgaccaaatcagtgtgaggaggtagatttggctcctctgcttctcacgggactatttccaccacccccagttagcaccattaactcctcctgagctctgataagagaatcaacatttctcaataatttcctccacaaattattaatgaaaataagaattattttgatggctctaacaatgacatttatatcacatgttttctctggagtattctataagttttatgttaaatcaataaagaccactttacaaaagtattatcagatgctttcctgcacattaaggagaaatctatagaactgaatgagaaccaacaagtaaatatttttggtcattgtaatcactgttggcgtggggcctttgtcagaactagaatttgattattaacataggtgaaagttaatccactgtgactttgcccattgtttagaaagaatattcatagtttaattatgccttttttgatcaggcacagtggctcacgcctgtaatcctagcagtttgggaggctgagccgggtggatcgcctgaggtcaggagttcaagacaagcctggcctacatggttgaaaccccatctctactaaaaatacacaaattagctaggcatggtggactcgcctgtaatctcactacacaggaggctgaggcaggagaatcacttgaacctgggaggcggatgttgaagtgagctgagattgcaccactgcactccagtctgggtgagagtgagactcagtcttaaaaaaatatgcctttttgaagcacgtacattttgtaacaaagaactgaagctcttattatattattagttttgatttaatgttttcagcccatctcctttcatatttctgggagacagaaaacatgtttccctacacctcttgcattccatcctcaacacccaactgtctcgatgcaatgaacacttaataaaaaacagtcgattggtc

SEQ ID NO: 7459 - DNA, 1361 bp, Homo sapiens
  source 1..1361: mol_type = unassigned DNA
acggatctcattccaaacttggctgtggaaacctggcttctccttactaaactagaatttcacacagcttttatgatggtcaacagcctgtgctggctatcacagatcctgacatgatcaaaacagtgctagtgaaagaatgttattctgtcttcacaaaccggaggccttttggtccagtgggatttatgaaaagtgccatctctatagctgaggatgaagaatggaagagattacgatcattgctgtctccaaccttcaccagtggaaaactcaaggagatggtccctatcattgcccagtatggagatgtgttggtgagaaatctgaggcgggaagcagagacaggcaagcctgtcaccttgaaagacgtctttggggcctacagcatggatgtgatcactagcacatcatttggagtgaacatcgactctctcaacaatccacaagacccctttgtggaaaacaccaagaagcttttaagatttgattttttggatccattctttctctcaataacagtctttccattcctcatcccaattcttgaagtattaaatatctgtgtgtttccaagagaagttacaaattttttaagaaaatctgtaaaaaggatgaaagaaagtcgcctcgaagatacacaaaagcaccgagtggatttccttcagctgatgattgactctcagaattcaaaagaaactgagtcccacaaagctctgtccgatctggagctcgtggcccaatcaattatctttatttttgctggctatgaaaccacgagcagtgttctctccttcattatgtatgaactggccactcaccctgatgtccagcagaaactgcaggaggaaattgatgcagttttacccaataaggcaccacccacctatgatactgtgctacagatggagtatcttgacatggtggtgaatgaaacgctcagattattcccaattgctatgagacttgagagggtctgcaaaaaagatgttgagatcaatgggatgttcattcccaaaggggtggtggtgatgattccaagctatgctcttcaccgtgacccaaagtactggacagagcctgagaagttcctccctgaaagattcagcaagaagaacaaggacaacatagatccttacatatacacaccctttggaagtggacccagaaactgcattggcatgaggtttgctctcatgaacatgaaacttgctctaatcagagtccttcagaacttctccttcaaaccttgtaaagaaacacagatccccctgaaattaagcttaggaggacttcttcaaccagaaaaacccgttgttctaaaggttgagtcaagggatggcaccgtaagtggagcctga

SEQ ID NO: 7460 - DNA, 1515 bp, Homo sapiens
  source 1..1515: mol_type = unassigned DNA
atggatctcattccaaactttgccatggaaacatgggttcttgtggctaccagcctggtactcctctatatttatgggacccattcacataaactttttaagaagctgggaattcctgggccaacccctctgccttttctgggaactattttgttctaccttaggggtctttggaattttgacagagaatgtaatgaaaaatacggagaaatgtgggggctgtatgaggggcaacagcccatgctggtcatcatggatcccgacatgatcaaaacagtgttagtgaaagaatgttactctgtcttcacaaaccagatgcctttaggtccaatgggatttctgaaaagtgccttaagttttgctgaagatgaagaatggaagagaatacgaacattgctatctccagctttcaccagtgtaaaattcaaggaaatggtccccatcatttcccaatgtggagatatgttggtgagaagcctgaggcaggaagcagagaacagcaagtccatcaacttgaaagatttctttggggcctacaccatggatgtaatcactggcacattatttggagtgaacttggattctctcaacaatccacaagatccctttctgaaaaatatgaagaagcttttaaaattggattttttggatccctttttactcttaatatcactctttccatttcttaccccagtttttgaagccctaaatatcggtttgtttccaaaagatgttacccattttttaaaaaattccattgaaaggatgaaagaaagtcgcctcaaagataaacaaaagcatcgagtagatttctttcaacagatgatcgactcccagaattccaaagaaacaaagtcccataaagctctgtctgatctggagcttgtggcccagtcaattatcatcatttttgctgcctatgacacaactagcaccactctccccttcattatgtatgaactggccactcaccctgatgtccagcagaaactgcaggaggagattgacgcagttttacccaataaggcacctgtcacctacgatgccctggtacagatggagtaccttgacatggtggtgaatgaaacgctcagattattcccagttgttagtagagttacgagagtctgcaagaaagatattgaaatcaatggagtgttcattcccaaagggttagcagtgatggttccaatctatgctcttcaccatgacccaaagtactggacagagcctgagaagttctgccctgaaagtaggttcagtaagaagaacaaggacagcatagatctttacagatacataccttttggagctggaccccgaaactgcattggcatgaggtttgctctcacaaacataaaacttgctgtcattagagcactgcagaacttctccttcaaaccttgtaaagagactcagatcccactgaaattagacaatctaccaattcttcaaccagaaaaacctattgttctaaaagtgcacttaagagatgggattacaagtggaccctga

SEQ ID NO: 7461 - DNA, 1349 bp, Homo sapiens
  source 1..1349: mol_type = unassigned DNA
atggatctcattccaaactttgccatggaaacatgggttcttgtggctaccagcctggtactcctctatatttatgggacccattcacataaactttttaagaagctgggaattcctgggccaacccctctgccttttctgggaactattttgttctaccttaggggtctttggaattttgacagagaatgtaatgaaaaatacggagaaatgtgggggctgtatgaggggcaacagcccatgctggtcatcatggatcccgacatgatcaaaacagtgttagtgaaagaatgttactctgtcttcacaaaccagatgcctttaggtccaatgggatttctgaaaagtgccttaagttttgctgaagatgaagaatggaagagaatacgaacattgctatctccagctttcaccagtgtaaaattcaaggaaatggtccccatcatttcccaatgtggagatatgttggtgagaagcctgaggcaggaagcagagaacagcaagtccatcaacttgaaagatttctttggggcctacaccatggatgtaatcactggcacattatttggagtgaacttggattctctcaacaatccacaagatccctttctgaaaaatatgaagaagcttttaaaattggattttttggatccctttttactcttaatatcactctttccatttcttaccccagtttttgaagccctaaatatcggtttgtttccaaaagatgttacccattttttaaaaaattccattgaaaggatgaaagaaagtcgcctcaaagataaacaaaagcatcgagtagatttctttcaacagatgatcgactcccagaattccaaagaaacaaagtcccataaagctctgtctgatctggagcttgtggcccagtcaattatcatcatttttgctgcctatgacacaactagcaccactctccccttcattatgtatgaactggccactcaccctgatgtccagcagaaactgcaggaggagattgacgcagttttacccaataaggcacctgtcacctacgatgccctggtacagatggagtaccttgacatggtggtgaatgaaacgctcagattattcccagttgttagtagagttacgagagtctgcaagaaagatattgaaatcaatggagtgttcattcccaaagggttagcagtgatggttccaatctatgctcttcaccatgacccaaagtactggacagagcctgagaagttctgccctgaaagatcccactgaaattagacaatctaccaattcttcaaccagaaaaacctattgttctaaaagtgcacttaagagatgggattacaagtggaccctga

SEQ ID NO: 7462 - DNA, 1279 bp, Homo sapiens
  source 1..1279: mol_type = unassigned DNA
gcacagcccagcaaagagcagcacacagctgaaagaaaaactcagaagacagagctgaaaaagaaaactggtgatggatctcattccaaactttgccatggaaacatgggttcttgtggctaccagcctggtactcctctatatggtctttggaattttgacagagaatgtaatgaaaaatacggagaaatgtggggcctttaggtccaatgggatttctgaaaagtgccttaagttttgctgaagatgaagaatggaagagaatacgaacattgctatctccagctttcaccagtgtaaaattcaaggaagtaagaaaataaggtgatttataattagaaacttaaaggatgaatctggagacaggtaatggtccccatcatttcccaatgtggagatatgttggtgagaagcctgaggcaggaagcagagaacagcaagtccatcaacttgaaagatttctttggggcctacaccatggatgtaatcactggcacattatttggagtgaacttggattctctcaacaatccacaagatccctttctgaaaaatatgaagaagcttttaaaattggattttttggatccctttttactcttaatatacagagtctcgctgtgttgcctaggccggagtgcatggtgcgatctgggctcactgaaacctccacctcctgggttcgagtgattctcctgcctcagcctcctgaggagctgggattacagcatcgagtagatttctttcaacagatgatcgactcccagaattccaaagaaacaaagtcccataaagctctgtctgatctggagcttgtggcccagtcaattatcatcatttttgctgcctatgacacaactagcaccactctccccttcattatgtatgaactggccactcaccctgatgtccagcagaaactgcaggaggagattgacgcagttttacccaataaggcacctgtcacctacgatgccctggtacagatggagtaccttgacatggtggtgaatgaaacgctcagattattcccagttgttagtagagttacgagagtctgcaagaaagatattgaaatcaatggagtgttcattcccaaagggttagcagtgatggttccaatctatgctcttcaccatgacccaaagtactggacagagcctgagaagttctgccctgaaagatcccactgaaattagacaatctaccaattcttcaaccagaaaaacctattgttctaaaagtgcacttaagagatgggattacaagtggaccctga

SEQ ID NO: 7463 - DNA, 1709 bp, Homo sapiens
  source 1..1709: mol_type = unassigned DNA
acctctgggcagagaaacaaagctctatatgcacagcccagcaaagagcagcacacagctgaaagaaaaactcagaagacagagctgaaaaagaaaactggtgatggatctcattccaaactttgccatggaaacatgggttcttgtggctaccagcctggtactcctctatatttatgggacccattcacataaactttttaagaagctgggaattcctgggccaacccctctgccttttctgggaactattttgttctaccttaggggtctttggaattttgacagagaatgtaatgaaaaatacggagaaatgtgggggctgtatgaggggcaacagcccatgctggtcatcatggatcccgacatgatcaaaacagtgttagtgaaagaatgttactctgtcttcacaaaccagatgcctttaggtccaatgggatttctgaaaagtgccttaagttttgctgaagatgaagaatggaagagaatacgaacattgctatctccagctttcaccagtgtaaaattcaaggaaatggtccccatcatttcccaatgtggagatatgttggtgagaagcctgaggcaggaagcagagaacagcaagtccatcaacttgaaagatttctttggggcctacaccatggatgtaatcactggcacattatttggagtgaacttggattctctcaacaatccacaagatccctttctgaaaaatatgaagaagcttttaaaattggattttttggatccctttttactcttaatatcactctttccatttcttaccccagtttttgaagccctaaatatcggtttgtttccaaaagatgttacccattttttaaaaaattccattgaaaggatgaaagaaagtcgcctcaaagataaacaaaagcatcgagtagatttctttcaacagatgatcgactcccagaattccaaagaaacaaagtcccataaagctctgtctgatctggagcttgtggcccagtcaattatcatcatttttgctgcctatgacacaactagcaccactctccccttcattatgtatgaactggccactcaccctgatgtccagcagaaactgcaggaggagattgacgcagttttacccaataaggcacctgtcacctacgatgccctggtacagatggagtaccttgacatggtggtgaatgaaacgctcagattattcccagttgttagtagagttacgagagtctgcaagaaagatattgaaatcaatggagtgttcattcccaaagggttagcagtgatggttccaatctatgctcttcaccatgacccaaagtactggacagagcctgagaagttctgccctgaaaggttcagtaagaagaacaaggacagcatagatctttacagatacataccttttggagctggaccccgaaactgcattggcatgaggtttgctctcacaaacataaaacttgctgtcattagagcactgcagaacttctccttcaaaccttgtaaagagactcagatcccactgaaattagacaatctaccaattcttcaaccagaaaaacctattgttctaaaagtgcacttaagagatgggattacaagtggaccctgactttccctaaggacttccactttgttcaagaaagctgtatcccagaacactagacacttcaaattgttttgtgaataaaactcagaaatgaaga

SEQ ID NO: 7464 - DNA, 1192 bp, Homo sapiens
  source 1..1192: mol_type = unassigned DNA
atggatctcattccaaactttgccatggaaacatgggttcttgtggctaccagcctggtactcctctatatttatgggacccattcacataaactttttaagaagctgggaattcctgggccaacccctctgccttttctgggaactattttgttctaccttaggggtctttggaattttgacagagaatgtaatgaaaaatttctttggggcctacaccatggatgtaatcactggcacattatttggagtgaacttggattctctcaacaatccacaagatccctttctgaaaaatatgaagaagcttttaaaattggattttttggatccctttttactcttaatatcactctttccatttcttaccccagtttttgaagccctaaatatcggtttgtttccaaaagatgttacccattttttaaaaaattccattgaaaggatgaaagaaagtcgcctcaaagataaacaaaagcatcgagtagatttctttcaacagatgatcgactcccagaattccaaagaaacaaagtcccataaagctctgtctgatctggagcttgtggcccagtcaattatcatcatttttgctgcctatgacacaactagcaccactctccccttcattatgtatgaactggccactcaccctgatgtccagcagaaactgcaggaggagattgacgcagttttacccaataaggcacctgtcacctacgatgccctggtacagatggagtaccttgacatggtggtgaatgaaacgctcagattattcccagttgttagtagagttacgagagtctgcaagaaagatattgaaatcaatggagtgttcattcccaaagggttagcagtgatggttccaatctatgctcttcaccatgacccaaagtactggacagagcctgagaagttctgccctgaaaggttcagtaagaagaacaaggacagcatagatctttacagatacataccttttggagctggaccccgaaactgcattggcatgaggtttgctctcacaaacataaaacttgctgtcattagagcactgcagaacttctccttcaaaccttgtaaagagactcagatcccactgaaattagacaatctaccaattcttcaaccagaaaaacctattgttctaaaagtgcacttaagagatgggattacaagtggaccctga

SEQ ID NO: 7465 - DNA, 328 bp, Homo sapiens
  source 1..328: mol_type = unassigned DNA
acctctgggcagagaaacaaagctctatatgcacagcccagcaaagagcagcacacagctgaaagaaaaactcagaagacagagctgaaaaagaaaactggtgatggatctcattccaaactttgccatggaaacatgggttcttgtggctaccagcctggtactcctctatatttatgggacccattcacataaactttttaagaagctgggaattcctgggccaacccctctgccttttctgggaactattttgttctaccttaggggtctttggaattttgacagagaatgtaatgaaaaatacggagaaatgtggggaccctaa

SEQ ID NO: 7466 - DNA, 1720 bp, Homo sapiens
  source 1..1720: mol_type = unassigned DNA
gctgtgcagggcagggaagctccaggcaaacagcccagcaaacagcagcactcagctaaaaggaagactcacagaacacagttgaagaaggaaagtggcgatggacctcatcccaaatttggcggtggaaacctggcttctcctggctgtcagcctggtgctcctctatctatatgggacccgtacacatggactttttaagagactgggaattccagggcccacacctctgcctttgttgggaaatgttttgtcctatcgtcagggtctctggaaatttgacacagagtgctataaaaagtatggaaaaatgtggggaacgtatgaaggtcaactccctgtgctggccatcacagatcccgacgtgatcagaacagtgctagtgaaagaatgttattctgtcttcacaaatcgaaggtctttaggcccagtgggatttatgaaaagtgccatctctttagctgaggatgaagaatggaagagaatacggtcattgctgtctccaaccttcaccagcggaaaactcaaggagatgttccccatcattgcccagtatggagatgtattggtgagaaacttgaggcgggaagcagagaaaggcaagcctgtcaccttgaaagacatctttggggcctacagcatggatgtgattactggcacatcatttggagtgaacatcgactctctcaacaatccacaagacccctttgtggagagcactaagaagttcctaaaatttggtttcttagatccattatttctctcaataatactctttccattccttaccccagtttttgaagcattaaatgtctctctgtttccaaaagataccataaattttttaagtaaatctgtaaacagaatgaagaaaagtcgcctcaacgacaaacaaaagcaccgactagatttccttcagctgatgattgactcccagaattcgaaagaaactgagtcccacaaagctctgtctgatctggagctcgcagcccagtcaataatcttcatttttgctggctatgaaaccaccagcagtgttctttccttcactttatatgaactggccactcaccctgatgtccagcagaaactgcaaaaggagattgatgcagttttgcccaataaggcaccacctacctatgatgccgtggtacagatggagtaccttgacatggtggtgaatgaaacactcagattattcccagttgctattagacttgagaggacttgcaagaaagatgttgaaatcaatggggtattcattcccaaagggtcaatggtggtgattccaacttatgctcttcaccatgacccaaagtactggacagagcctgaggagttccgccctgaaaggttcagtaagaagaaggacagcatagatccttacatatacacaccctttggaactggacccagaaactgcattggcatgaggtttgctctcatgaacatgaaacttgctctaatcagagtccttcagaacttctccttcaaaccttgtaaagaaacacagatccccttgaaattagacacgcaaggacttcttcaaccagaaaaacccattgttctaaaggtggattcaagagatggaaccctaagtggagaatgagttattctaaggatttctactttggtcttcaagaaagctgtgccccagaacaccagagatttcaacttagtcaataaaaccttgaaataaagatgggcttaatctaatgta

SEQ ID NO: 7467 - DNA, 3320 bp, Homo sapiens
  source 1..3320: mol_type = unassigned DNA
ctgctgtgcagggcagggaagctccaggcaaacagcccagcaaacagcagcactcagctaaaaggaagactcacagaacacagttgaagaaggaaagtggcgatggacctcatcccaaatttggcggtggaaacctggcttctcctggctgtcagcctggtgctcctctatctgatgagagtccccaaatcagcgaagagtccacttactaaacagacataaggaaatgaagtgtcctggaagaattcctgcctgaacctctcaggagcatttgaggacatttatcaagtattcactccaggattgggactatgaagacttcagctgctttcagctaatcattgagacttttcaggggtctcagaatagtcaggaaaggacctgatgagtgaatgcaattactgatgttggagttgctgttattatttatcgtgtacatattacctccctctcttgaccattccagttcctgagtaactcaccagccctctgatctataaagtcacaatccctgtgacctgatttctgtttcactttgtagatatgggacccgtacacatggactttttaagagactgggaattccagggcccacacctctgcctttgttgggaaatgttttgtcctatcgtcagggtctctggaaatttgacacagagtgctataaaaagtatggaaaaatgtggggtatctcttccctgtttggaccacattacccttcatcatatgaagccttgggtggctcctgtgtgagactcttgctgtgtgtcacaccctaatgaactagaacctaaggttgctgtgtgtcgtacaactagggctccgttgtccccacacagaacgtatgaaggtcaactccctgtgctggccatcacagatcccgacgtgatcagaacagtgctagtgaaagaatgttattctgtcttcacaaatcgaaggtctttaggcccagtgggatttatgaaaagtgccatctctttagctgaggatgaagaatggaagagaatacggtcattgctgtctccaaccttcaccagcggaaaactcaaggagatgttccccatcattgcccagtatggagatgtattggtgagaaacttgaggcgggaagcagagaaaggcaagcctgtcaccttgaaagacatctttggggcctacagcatggatgtgattactggcacatcatttggagtgaacatcgactctctcaacaatccacaagacccctttgtggagagcactaagaagttcctaaaatttggtttcttagatccattatttctctcaataatactctttccattccttaccccagtttttgaagcattaaatgtctctctgtttccaaaagataccataaattttttaagtaaatctgtaaacagaatgaagaaaagtcgcctcaacgacaaacaaaaggtaaaatctgatggtggttaaatgacgatgtttaggttttgataaatttagattttatacacatgatagagcatgtatctgtatttttaaaaataaagacagagaacttatgtttagaacaagagaagccatttggtagaaataaagaaggagattggggaaggagatgagaatgagtcagagagatagcatttaaaacttgaaatcaggcacaacaattagtatgtcatgatataaacagtattgagataaaattttaccacttctcttccctttaataaattgtcaaaggataaagtttcctgtttgaaaatatattttactggtattgtgctttcctcatatcacagattggtaaagaatcattttaagtccaagactcttattttacatattctgcaattaaaggtcctatgaggctacctgccgactgctgacatgtagtgtgtggtaaatgtgagtgtttcacagcctggagtgaacaggggtcttctctgagaattgaggttgcaaggctggctaactcagctttgccttcacgagccctagaggccagccgaaggatgtctgcaggtcagggagacaggaccaggtaacccagctgtcactgaagattatatagagtttgagaatgttggaatatttgaaaatgctcccccaaaaaagctgctgatgagttctggaaatgtcaggagattaatctatacggacactgctgaagaaaaaggtagaagaataaaagatccagtacttcttcctgggtaagcagttatgaccagagatggaaccggcaactctttggccagaaagctgtatccaaaagacagagaagatgagaaacagggagggcaaaggcgaaaaagcaattggacatgatagctagatttgtttcaggaaaacatcctgctttccaaggatttagatgaatgtttttgttcactggtgactcaggtaacacgtcttcaagaagccatagggaggttgagggagggaagtcaagaagggaggttgaggactgcacttttgatttacttctgacttcacgagtcactttctgccaaagaaatctctccttttgcttctagcaccgactagatttccttcagctgatgattgactcccagaattcgaaagaaactgagtcccacaaagctctgtctgatctggagctcgcagcccagtcaataatcttcatttttgctggctatgaaaccaccagcagtgttctttccttcactttatatgaactggccactcaccctgatgtccagcagaaactgcaaaaggagattgatgcagttttgcccaataaggcaccacctacctatgatgccgtggtacagatggagtaccttgacatggtggtgaatgaaacactcagattattcccagttgctattagacttgagaggacttgcaagaaagatgttgaaatcaatggggtattcattcccaaagggtcaatggtggtgattccaacttatgctcttcaccatgacccaaagtactggacagagcctgaggagttccgccctgaaaggttcagtaagaagaaggacagcatagatccttacatatacacaccctttggaactggacccagaaactgcattggcatgaggtttgctctcatgaacatgaaacttgctctaatcagagtccttcagaacttctccttcaaaccttgtaaagaaacacagatccccttgaaattagacacgcaaggacttcttcaaccagaaaaacccattgttctaaaggtggattcaagagatggaaccctaagtggagaatgagttattctaaggatttctactttggtcttcaagaaagctgtgccccagaacaccagagatttcaacttagtcaataaaaccttgaaataaagatgggcttaatct

SEQ ID NO: 7468 - DNA, 1971 bp, Homo sapiens
  source 1..1971: mol_type = unassigned DNA
gtgcagggcagggaagctccaggcaaacagcccagcaaacagcagcactcagctaaaaggaagactcacagaacacagttgaagaaggaaagtggcgatggacctcatcccaaatttggcggtggaaacctggcttctcctggctgtcagcctggtgctcctctatctgatgagagtccccaaatcagcgaagagtccacttactaaacagacataaggaaatgaagtgtcctggaagaattcctgcctgaacctctcaggagcatttgaggacatttatcaagtattcactccaggattgggactatgaagacttcagctgctttcagctaatcattgagacttttcaggggtctcagaatagtcaggaaaggacctgatgagtgaatgcaattactgatgttggagttgctgttattatttatcgtatatgggacccgtacacatggactttttaagagactgggaattccagggcccacacctctgcctttgttgggaaatgttttgtcctatcgtcagggtctctggaaatttgacacagagtgctataaaaagtatggaaaaatgtggggaacgtatgaaggtcaactccctgtgctggccatcacagatcccgacgtgatcagaacagtgctagtgaaagaatgttattctgtcttcacaaatcgaaggtctttaggcccagtgggatttatgaaaagtgccatctctttagctgaggatgaagaatggaagagaatacggtcattgctgtctccaaccttcaccagcggaaaactcaaggagatgttccccatcattgcccagtatggagatgtattggtgagaaacttgaggcgggaagcagagaaaggcaagcctgtcaccttgaaagacatctttggggcctacagcatggatgtgattactggcacatcatttggagtgaacatcgactctctcaacaatccacaagacccctttgtggagagcactaagaagttcctaaaatttggtttcttagatccattatttctctcaataatactctttccattccttaccccagtttttgaagcattaaatgtctctctgtttccaaaagataccataaattttttaagtaaatctgtaaacagaatgaagaaaagtcgcctcaacgacaaacaaaagcaccgactagatttccttcagctgatgattgactcccagaattcgaaagaaactgagtcccacaaagctctgtctgatctggagctcgcagcccagtcaataatcttcatttttgctggctatgaaaccaccagcagtgttctttccttcactttatatgaactggccactcaccctgatgtccagcagaaactgcaaaaggagattgatgcagttttgcccaataaggcaccacctacctatgatgccgtggtacagatggagtaccttgacatggtggtgaatgaaacactcagattattcccagttgctattagacttgagaggacttgcaagaaagatgttgaaatcaatggggtattcattcccaaagggtcaatggtggtgattccaacttatgctcttcaccatgacccaaagtactggacagagcctgaggagttccgccctgaaaggttcagtaagaagaaggacagcatagatccttacatatacacaccctttggaactggacccagaaactgcattggcatgaggtttgctctcatgaacatgaaacttgctctaatcagagtccttcagaacttctccttcaaaccttgtaaagaaacacagatccccttgaaattagacacgcaaggacttcttcaaccagaaaaacccattgttctaaaggtggattcaagagatggaaccctaagtggagaatgagttattctaaggatttctactttggtcttcaagaaagctgtgccccagaacaccagagatttcaacttagtcaataaaaccttgaaataaagatgggcttaatct

SEQ ID NO: 7469 - DNA, 1599 bp, Homo sapiens
  source 1..1599: mol_type = unassigned DNA
atggatctcatcccaaacttggccgtggaaacctggcttctcctggctgtcagcctgatactcctctatctatatggaacccgtacacatggactttttaagaagcttggaattccagggcccacacctctgccttttttgggaaatgctttgtccttccgtaagggctattggacgtttgacatggaatgttataaaaagtatagaaaagtctggggtatttatgactgtcaacagcctatgctggctatcacagatcccgacatgatcaaaacagtgctagtgaaagaatgttattctgtcttcacaaaccggaggcctttcgggccagtgggatttatgaaaaatgccatctctatagctgaggatgaagaatggaagagaatacgatcattgctgtctccaacattcaccagcggaaaactcaaggagatggtccctatcattgcccagtatggagatgtgttggtgagaaatctgaggcgggaagcagagacaggcaagcctgtcaccttgaaacacgtctttggggcctacagcatggatgtgatcactagcacatcatttggagtgagcatcgactctctcaacaatccacaagacccctttgtggaaaacaccaagaagcttttaagatttaatccattagatccattcgttctctcaataaaagtctttccattccttaccccaattcttgaagcattaaatatcactgtgtttccaagaaaagttataagttttctaacaaaatctgtaaaacagataaaagaaggtcgcctcaaagagacacaaaagcaccgagtggatttccttcagctgatgattgactctcagaattcaaaagactctgagacccacaaagctctgtctgatctggagctcatggcccaatcaattatctttatttttgctggctatgaaaccacgagcagtgttctctccttcattatatatgaactggccactcaccctgatgtccagcagaaagtgcagaaggaaattgatacagttttacccaataaggcaccacccacctatgatactgtgctacagttggagtatcttgacatggtggtgaatgaaacactcagattattcccagttgctatgagacttgagagggtctgcaaaaaagatgttgaaatcaatgggatgtttattcccaaaggggtggtggtgatgattccaagctatgttcttcatcatgacccaaagtactggagagagcctgagaagttcctccctgaaaggttcagtaaaaagaacaaggacaacatagatccttacatatacacaccctttggaagtggacccagaaactgcattggcatgaggtttgctctcgtgaacatgaaacttgctctagtcagagtccttcagaacttctccttcaaaccttgtaaagaaacacagatccccctgaaattacgctttggaggacttcttctaacagaaaaacccattgttctaaaggctgagtcaagggatgagacctttgtagatatggagcccattcacatggactttttaagaagcttggcattccagggcccacacctctgctttttttgggaactactttgtcctaccatcagg

SEQ ID NO: 7470 - DNA, 1971 bp, Homo sapiens
  source 1..1971: mol_type = unassigned DNA
gtgatggatctcatcccaaacttggccgtggaaacctggcttctcctggctgtcagcctgatactcctctatctatatggaacccgtacacatggactttttaagaagcttggaattccagggcccacacctctgccttttttgggaaatgctttgtccttccgtaagggctattggacgtttgacatggaatgttataaaaagtatagaaaagtctggggtatttatgactgtcaacagcctatgctggctatcacagatcccgacatgatcaaaacagtgctagtgaaagaatgttattctgtcttcacaaaccggaggcctttcgggccagtgggatttatgaaaaatgccatctctatagctgaggatgaagaatggaagagaatacgatcattgctgtctccaacattcaccagcggaaaactcaaggagatggtccctatcattgcccagtatggagatgtgttggtgagaaatctgaggcgggaagcagagacaggcaagcctgtcaccttgaaacacgtctttggggcctacagcatggatgtgatcactagcacatcatttggagtgagcatcgactctctcaacaatccacaagacccctttgtggaaaacaccaagaagcttttaagatttaatccattagatccattcgttctctcaataaaagtctttccattccttaccccaattcttgaagcattaaatatcactgtgtttccaagaaaagttataagttttctaacaaaatctgtaaaacagataaaagaaggtcgcctcaaagagacacaaaagcaccgagtggatttccttcagctgatgattgactctcagaattcaaaagactctgagacccacaaagctctgtctgatctggagctcatggcccaatcaattatctttatttttgctggctatgaaaccacgagcagtgttctctccttcattatatatgaactggccactcaccctgatgtccagcagaaagtgcagaaggaaattgatacagttttacccaataaggcaccacccacctatgatactgtgctacagttggagtatcttgacatggtggtgaatgaaacactcagattattcccagttgctatgagacttgagagggtctgcaaaaaagatgttgaaatcaatgggatgtttattcccaaaggggtggtggtgatgattccaagctatgttcttcatcatgacccaaagtactggagagagcctgagaagttcctccctgaaaggttcagtaaaaagaacaaggacaacatagatccttacatatacacaccctttggaagtggacccagaaactgcattggcatgaggtttgctctcgtgaacatgaaacttgctctagtcagagtccttcagaacttctccttcaaaccttgtaaagaaacacagatccccctgaaattacgctttggaggacttcttctaacagaaaaacccattgttctaaaggctgagtcaagggatgagaccgtaagtggagcctgatttccctaaggacttctggtttgctcttcaagaaagctgtgccccagaacaccagagacctcaaattactttacaaatagaaccctgaaatgaagacgggcttcatccaatgtgctgcataaataatcggggattctgtacgtgcattgtgctctctcatggtctgtatagagtgttatacttggtaatatagaggagatgaccaaatcagtgctggggaagtagatttggcttctctgcttctcataggactatctccaccacccccagttagcaccattaactcctcctgagctctgataacataattaacatttctcaataatttcaaccacaatcattaataaaaataggaattattttgatggctctaacagtgacatttatatcatgtgttatatctgtagtattctatagtaagctttatattaagcaaatcaataaaaacctctttac

SEQ ID NO: 7471 - DNA, 2176 bp, Homo sapiens
  source 1..2176: mol_type = unassigned DNA
gaagtggaggtgggagggagcgacaatggaaaaatcacctgaaaactgggacagaggaaggaagctacagttacgaaggagagctgcaaaagttgcagcagaaaggttgggagtcccgacaggttccgtagcccacagaaaagaagcaagggacggcaggactgtttcacacttttctgcttctggaaggtgctggacaaaaacatggaactaatttccccaacagtgattataatcctgggttgccttgctctgttcttactccttcagcggaagaatttgcgtagacccccgtgcatcaagggctggattccttggattggagttggatttgagtttgggaaagcccctctagaatttatagagaaagcaagaatcaagtatggaccaatatttacagtctttgctatgggaaaccgaatgacctttgttactgaagaagaaggaattaatgtgtttctaaaatccaaaaaagtagattttgaactagcagtgcaaaatatcgtttatcgtacagcatcaattccaaagaatgtctttttagcactgcatgaaaaactctatattatgttgaaagggaaaatggggactgtcaatctccatcagtttactgggcaactgactgaagaattacatgaacaactggagaatttaggcactcatgggacaatggacctgaacaacttagtaagacatctcctttatccagtcacagtgaatatgctctttaataaaagtttgttttccacaaacaagaaaaaaatcaaggagttccatcagtattttcaagtttatgatgaagattttgagtatgggtcccagttgccagagtgtcttctaagaaactggtcaaaatccaaaaagtggttcctggaactgtttgagaaaaacattccagatataaaagcatgtaaatctgcaaaagataattccatgacattattgcaagctacgctggatattgtagagacggaaacaagtaaggaaaactcacccaattatgggctcttactgctttgggcttctctgtctaatgctgttcctgttgcattttggacacttgcatacgtcctttctcatcctgatatccacaaggccattatggaaggcatatcttctgtgtttggcaaagcaggcaaagataagattaaagtgtctgaggatgacctggagaatctccttctaattaaatggtgtgttttggaaaccattcgtttaaaagctcctggtgtcattactagaaaagtggtgaagcctgtggaaattttgaattacatcattccttctggtgacttgttgatgttgtctccattttggctgcatagaaatccaaagtattttcctgagcctgaattgttcaaacctgaacgttggaaaaaggcaaatttagagaagcactctttcttggactgcttcatggcatttggaagcgggaagttccagtgtcctgcaaggtggtttgctctgttagaggttcagatgtgtattattttaatactttataaatatgactgtagtcttctggacccattacccaaacagagttatctccatttggtgggtgtcccccagccggaagggcaatgccgaattgaatataaacaaagaatatgacatctgttgggcctcacaaggaccagggccttctggaggagtggcactaccccacctggcagcacctagacctgagctctacaaaaacacactgcttcactttgttttaggacttagttcaagaacacattcaaatggtgcatgtgtttggtatcttcaacagtagaccaagaatctaacatcactctcagtaatatagagaccggaatacatggtttataggaaatgatcaaatgatccaaaaaaactccacattttttaagaagttggaatttgatttcatgcataactgtattaaaacattaaatagaaataatgtcatttgaatgaaaatcttatcacattaaattcactgtgaaggcagcatacttaaatttttattttgaaaagtctaaaaggcttagatttttaaaatttaataattatttctacaaattttctatttttcttgaggtgattctcaactagcaattggaactcctaggctctattaacataattctttattgtaaacgtatctaatgctaaaagtaataaaatggtagttttctgagacctgtga

SEQ ID NO: 7472 - DNA, 2530 bp, Homo sapiens
  source 1..2530: mol_type = unassigned DNA
ggggcactcagagatccagcaggtgctgcaccatgagtgtctctgtgctgagccccagcagactcctgggtgatgtctctggaatcctccaagcggcctccctgctcattctgcttctgctgctgatcaaggcagttcagctctacctgcacaggcagtggctgctcaaagccctccagcagttcccgtgccctccctcccactggctcttcgggcacatccaggagctccaacaggaccaggagctacaacggattcagaaatgggtggagacattcccaagtgcctgtcctcattggctatggggaggcaaagttcgtgtccagctctatgaccctgactatatgaaggtgattctggggagatcagacccgaaatcccatggttcctacagattcctggctccatggattgggtacggcttgctcctgttgaatgggcagacatggttccagcatcgacggatgctgaccccagccttccactatgacatcctgaagccctatgtggggctcatggcagactctgtacgagtgatgctggacaaatgggaagagctccttggccaggattcccctctggaggtctttcagcacgtctccttgatgaccctggacaccatcatgaagtgtgccttcagccatcagggcagcatccaggtggacaggaattctcagtcctacatacaggccattagtgacctgaacaacctggttttttcccgtgtgaggaatgcctttcaccagaatgacaccatctacagcctgacctctgctggccgctggacacaccgcgcctgccagctggcccatcagcacacagaccaagtgatccaactgaggaaggctcaactacagaaggagggggagctggagaagatcaagaggaagaggcatttggattttctggatatcctcctcttggccaaaatggagaatgggagcatcttgtcagacaaggacctccgtgctgaggtggacacgttcatgtttgagggccacgacaccacagccagtgggatctcctggatcctctatgctctggccacacaccccaagcatcaggagaggtgccgggaggagatccacagcctcctgggtgatggagcctccatcacctggaaccacctggaccagatgccctacaccaccatgtgcattaaggaggcactgaggctctacccaccggtgccaggcattggcagagagctcagcactcccgtcaccttccctgatgggcgctccttgcccaaaggtatcatggtcctcctctccatttatggccttcaccacaacccaaaagtgtggcccaacccagaggtgtttgaccctttccgttttgcaccgggttctgctcaacacagccacgctttcctgcccttctcaggaggatcaaggaactgcatcgggaaacaatttgccatgaacgagctgaaggtggccacggccctgaccctgctccgctttgagctgctgcctgatcccaccaggatccccatccccattgcacgacttgtgttgaaatccaaaaatggaatccacctgcgtctcaggaggctccctaacccttgtgaagacaaggaccagctttgagggcctccacctgccgtcctgtcttcctgacccccgcttctgtccccttcctgtctgcccatatcctgttttctgtctgcccaccttcccttcttcccacctgcctgctgtcccccagtctgcctgcccttctctctctcacctttctccaggctccctacctgcttgtctacctgtctcctacccacctgtatctcttgttgggagaaaagctgagtgttgggagaagctgaggccgagcttgcatgtctgacataatgtaaaagagtcttggatcatgtccaggatccagggtctaaaaccccttgtggcctttggaacaccaagctctgtgctgaagggtggaaggctaccctgacgcaccataatctaagcccggggcataaaacccctcgtggcttggatagaatccagggctcgtggctctggaatgtgtctgaacttgctgcctcctcgctccttgctctcccaggatcaattgtatcttgagttaaaagaacctgctctccattatctcaagtagcagagcagatgctaaaccgtcacagctgtaaatcatgtgcttaatgcaacatgccctttcgacccccacattctcaccacctgtttctttgtttgatcaccaataaataatctgcacttccagagctcggggccttcacagcctccatccttagctttggcgccctggacccactttctctctcaaactgtcttttctcactgctttgactctgccggactttgtcacccccacgacctggtgttgggtctgaacaccccaacatccctgaatctccacccacctcccaaactcctgcctgccctccagactgtctgcccatacacctgtctccttcttcctgcctgcttgtctgttcctatattagtttcctattactgctgtaataaactatcacaatctcagtgattttaaa

SEQ ID NO: 7473 - DNA, 1760 bp, Homo sapiens
  source 1..1760: mol_type = unassigned DNA
agagatccagcaggtgctgcaccatgagtgtctctgtgctgagccccagcagactcctgggtgatgtctctggaatcctccaagcggcctccctgctcattctgcttctgctgctgatcaaggcagttcagctctacctgcacaggcagtggctgctcaaagccctccagcagttcccgtgccctccctcccactggctcttcgggcacatccaggagctccaacaggaccaggagctacaacggattcagaaatgggtggagacattcccaagtgcctgtcctcattggctatggggaggcaaagttcgtgtccagctctatgaccctgactatatgaaggtgattctggggagatcagacccgaaatcccatggttcctacagattcctggctccatggattgggtacggcttgctcctgttgaatgggcagacatggttccagcatcgacggatgctgaccccagccttccactatgacatcctgaagccctatgtggggctcatggcagactctgtacgagtgatgctggacaaatgggaagagctccttggccaggattcccctctggaggtctttcagcacgtctccttgatgaccctggacaccatcatgaagtgtgccttcagccatcagggcagcatccaggtggacaggaattctcagtcctacatacaggccattagtgacctgaacaacctggttttttcccgtgtgaggaatgcctttcaccagaatgacaccatctacagcctgacctctgctggccgctggacacaccgcgcctgccagctggcccatcagcacacaggagaccaagtgatccaactgaggaaggctcaactacagaaggagggggagctggagaagatcaagaggaagaggcatttggattttctggatatcctcctcttggccaaaatggagaatgggagcatcttgtcagacaaggacctccgtgctgaggtggacacgttcatgtttgagggccacgacaccacagccagtgggatctcctggatcctctatgctctggccacacaccccaagcatcaggagaggtgccgggaggagatccacagcctcctgggtgatggagcctccatcacctggaaccacctggaccagatgccctacaccaccatgtgcattaaggaggcactgaggctctacccaccggtgccaggcattggcagagagctcagcactcccgtcaccttccctgatgggcgctccttgcccaaaggtatcatggtcctcctctccatttatggccttcaccacaacccaaaagtgtggcccaacccagaggtgtttgaccctttccgttttgcaccgggttctgctcaacacagccacgctttcctgcccttctcaggaggatcaaggaactgcatcgggaaacaatttgccatgaacgagctgaaggtggccacggccctgaccctgctccgctttgagctgctgcctgatcccaccaggatccccatccccattgcacgacttgtgttgaaatccaaaaatggaatccacctgcgtctcaggaggctccctaacccttgtgaagacaaggaccagctttgagggcctccacctgccgtcctgtcttcctgacccccgcttctgtccccttcctgtctgcccatatcctgttttctgtctgcccatacacctgtctccttcttcctgcctgcttgtctgttcctatattagtttcctattactgctgtaataaactatcacaatctcagtgatttt

SEQ ID NO: 7474 - DNA, 1725 bp, Homo sapiens
  source 1..1725: mol_type = unassigned DNA
gggcactcagagatccagcaggtgctgcaccatgagtgtctctgtgctgagccccagcagactcctgggtgatgtctctggaatcctccaagcggcctccctgctcattctgcttctgctgctgatcaaggcagttcagctctacctgcacaggcagtggctgctcaaagccctccagcagttcccgtgccctccctcccactggctcttcgggcacatccaggagctccaacaggaccaggagctacaacggattcagaaatgggtggagacattcccaagtgcctgtcctcattggctatggggaggcaaagttcgtgtccagctctatgaccctgactatatgaaggtgattctggggagatcagacccgaaatcccatggttcctacagattcctggctccatggattgggtacggcttgctcctgttgaatgggcagacatggttccagcatcgacggatgctgaccccagccttccactatgacatcctgaagccctatgtggggctcatggcagactctgtacgagtgatgctggacaaatgggaagagctccttggccaggattcccctctggaggtctttcagcacgtctccttgatgaccctggacaccatcatgaagtgtgccttcagccatcagggcagcatccaggtggacaggaattctcagtcctacatacaggccattagtgacctgaacaacctggttttttcccgtgtgaggaatgcctttcaccagaatgacaccatctacagcctgacctctgctggccgctggacacaccgcgcctgccagctggcccatcagcacacagaccaagtgatccaactgaggaaggctcaactacagaaggagggggagctggagaagatcaagaggaagaggcatttggattttctggatatcctcctcttggccaaaatggagaatgggagcatcttgtcagacaaggacctccgtgctgaggtggacacgttcatgtttgagggccacgacaccacagccagtgggatctcctggatcctctatgctctggccacacaccccaagcatcaggagaggtgccgggaggagatccacagcctcctgggtgatggagcctccatcacctggaaccacctggaccagatgccctacaccaccatgtgcattaaggaggcactgaggctctacccaccggtgccaggcattggcagagagctcagcactcccgtcaccttccctgatgggcgctccttgcccaaaggtatcatggtcctcctctccatttatggccttcaccacaacccaaaagtgtggcccaacccagaggtgtttgaccctttccgttttgcaccgggttctgctcaacacagccacgctttcctgcccttctcaggaggatcaaggtgagacgtcctgtgtggtaattcgaatagaggaatgagggaagtctctggtcaaccctctgatctttgtgagcctgatgttcatatgtggcatcttcaggtgtgctcttaaatgttggtatttgtgggaaagtcaggcacctggtgtgggcgtctctgtgtacaaaaggaaggtggcattcagagcaccccatggagactttgctccctctgcttcttcaaatgggcagcctgaattcactgtcagtgcatgttccaaacttcagtatattcatgtattttcctcactttaaggatatgaattctcaaaattagatattctccagtaaa

SEQ ID NO: 7475 - DNA, 1036 bp, Homo sapiens
  source 1..1036: mol_type = unassigned DNA
ctctgtgctgagccccagcagactcctgggtgatgtctctggaatcctccaagcggcctccctgctcattctgcttctgctgctgatcaaggcagttcagctctacctgcacaggcagtggctgctcaaagccctccagcagttcccgtgccctccctcccactggctcttcgggcacatccaggagctccaacaggaccaggagctacaacggattcagaaatgggtggagacattcccaagtgcctgtcctcattggctatggggaggcaaagttcgtgtccagctctatgaccctgactatatgaaggtgattctggggagatcagacccgaaatcccatggttcctacagattcctggctccatggattgggtacggcttgctcctgttgaatgggcagacatggttccagcatcgacggatgctgaccccagccttccactatgacatcctgaagccctatgtggggctcatggcagactctgtacgagtgatgctggacaaatgggaagagctccttggccaggattcccctctggaggtctttcagcacgtctccttgatgaccctggacaccatcatgaagtgtgccttcagccatcagggcagcatccaggtggacagaccaagtgatccaactgaggaaggctcaactacagaaggagggggagctggagaagatcaagaggaagaggcatttggattttctggatatcctcctcttggccaaaatggagaatgggagcatcttgtcagacaaggacctccgtgctgaggtggacacgttcatgtttgagggccacgacaccacagccagtgggatctcctggatcctctatgctctggccacacaccccaagcatcaggagaggtgccgggaggagatccacagcctcctgggtgatggagcctccatcacctgatgccctacaccaccatgtgcattaaggaggcactgaggctctacccaccggtgccaggcattggcagagagctcagcactcccgtcaccttccctgatgggcgctccttg

SEQ ID NO: 7476 - DNA, 2973 bp, Homo sapiens
  source 1..2973: mol_type = unassigned DNA
gaggcaaagacctcctagcagagggggagaggagggatgccgcagctgagcctgtcctggctgggcctcgggcccgtggcagcatccccgtggctgcttctgctgctggttggaggctcctggctcctggcccgcgtcctggcctggacctacaccttctatgacaactgccgccgcctccagtgttttcctcaacccccgaaacagaactggttttggggacaccagggcctggtcactcccacggaagagggcatgaagacattgacccagctggtgaccacatatccccagggctttaagttgtggctgggtcctaccttccccctcctcattttatgccaccctgacattatccggcctatcaccagtgcctcagctgctgtcgcacccaaggatatgattttctatggcttcctgaagccctggctgggggatgggctcctgctgagtggtggtgacaagtggagccgccaccgtcggatgttgacgcctgccttccatttcaacatcttgaagccttatatgaagattttcaacaagagtgtgaacatcatgcacgacaagtggcagcgcctggcctcagagggcagcgccagactggacatgtttgaacacatcagcctcatgaccttggacagtctgcagaaatgtgtcttcagctttgaaagcaattgtcaggagaagcccagtgaatatattgccgccatcttggagctcagtgcctttgtagaaaagagaaaccagcagattctcttgcacacggacttcctgtattatctcactcctgatgggcagcgcttccgcagggcctgccacctggtgcacgacttcacagatgccgtcatccaggagcggcgctgcaccctccccactcagggtattgatgatttcctcaagaacaaggcaaagtccaagactttagacttcattgatgtgcttctgctgagcaaggatgaagatgggaaggaattgtctgatgaggacataagagcagaagctgacaccttcatgtttgagggccatgacactacagccagtggtctctcctgggtcctataccaccttgcaaagcacccagaataccaggaacagtgccggcaagaagtgcaagagcttctgaaggaccgtgaacctatagagattgaatgggacgacctggcccagctgcccttcctgaccatgtgcattaaggagagcctgcggttgcatcccccagtcccggtcatctcccgatgttgcacgcaggactttgtgctcccagacggccgcgtcatccccaaaggcattgtctgcctcatcaatattatcgggatccattacaacccaactgtgtggccagaccctgaggtctacgaccccttccgtttcgaccaagagaacatcaaggagaggtcacctctggcttttattcccttctcggcagggcccagaaactgcatcgggcaggcgttcgccatggctgagatgaaggtggtcctggcgctcaccctgctgcacttccgcatcctgccgacccacactgaaccccgcaggaaacccgagctgatattgcgcgcagagggtggactttggctgcgggtggagcccctgggtgcgaactcacagtgactgtcctacccacccacccacctctgtagagtcccagaaacaaaactatgctgacacctctgcttgagcctcgttgacagccagcatggggctcctggggactggtgggatctaagaaagggaggtgagtgggtggaggcagggtgacgtctctgaacccaaaaccctgacggcctctctggctgagcacagggcatctaggcccttagtgggttctcccagagcccaagtaaaaactttatcctgtgggcagtagggagccctgggaggtgtttgagcaggagagggaacaggattaagaatgggtttaaggagcaagactgagactctgattcagcgagaaacaaccataggggcagatcccttcatctgtcctgggaatgtcctcccaagactggagtcctcagctcagaacaaagggaaaggggtgcagcttccaccctggcaggctctcagaaatttttagttcctttttccaccaacttcccacccctgtttctccccctcccagtgcgttctctctgtgactctcttcccttactttcagaggcataggatctggagccagactgcttgggctcaagtcctggctctgctgcgtgacttgagcaagttaattcctctctctgtgcctcggttccctcaaccatataatggagacaacagcattacctatatcagggttttcctgaggtctcaatataagggactcagagctgtgcctggcacacaatgaatgctaaatatatggagccattattatttcctgtctcagaaagtctggctgttaaagaatgttgtctttcaagatcgttatttctaccacgactttaaaggctgtgttttggaactcaaaggcaaaaattctaatatctgtgctccttgaacaacctcttctcctagagggctgtgcatataagatatgtatatatatatatatattatatatatatatatatacacacacacacacacacacacacacatatatacatatacacacacacacacacacacacacacacacacacacatatatatatatatatatttttttttttttcctgaggatggtgaaggtacctgactgtgtgaggtggtaggagaatgagagaaacctcagtcagtgtctcaaaataaaatcctgctacaaacattgatctcttttcatagcctaagggatgttgcatcgctaaaccctgttgacttctctaatctcttctgtagctgatctccttcccttgctacactcggttactctggccttgattctgatctccaaatacattatattttttatttgggaccatcgtattgcctttgcacctttatcaaatataagttgcctatatttatttggat

SEQ ID NO: 7477 - DNA, 2872 bp, Homo sapiens
  source 1..2872: mol_type = unassigned DNA
ggatgccgcagctgagcctgtcctggctgggcctcgggcccgtggcagcatccccgtggctgcttctgctgctggttggaggctcctggctcctggcccgcgtcctggcctggacctacaccttctatgacaactgccgccgcctccagtgttttcctcaacccccgaaacagaactggttttggggacaccagggcctggtcactcccacggaagagggcatgaagacattgacccagctggtgaccacatatccccagggctttaagttgtggctgggtcctaccttccccctcctcattttatgccaccctgacattatccggcctatcaccagtgcctcagctgctgtcgcacccaaggatatgattttctatggcttcctgaagccctggctgggggatgggctcctgctgagtggtggtgacaagtggagccgccaccgtcggatgttgacgcctgccttccatttcaacatcttgaagccttatatgaagattttcaacaagagtgtgaacatcatgcacgacaagtggcagcgcctggcctcagagggcagcgccagactggacatgtttgaacacatcagcctcatgaccttggacagtctgcagaaatgtgtcttcagctttgaaagcaattgtcaggagaagcccagtgaatatattgccgccatcttggagctcagtgcctttgtagaaaagagaaaccagcagattctcttgcacacggacttcctgtattatctcactcctgatgggcagcgcttccgcagggcctgccacctggtgcacgacttcacagatgccgtcatccaggagcggcgctgcaccctccccactcagggtattgatgatttcctcaagaacaaggcaaagtccaagactttagacttcattgatgtgcttctgctgagcaaggatgaagatgggaaggaattgtctgatgaggacataagagcagaagctgacaccttcatgtttgagggccatgacactacagccagtggtctctcctgggtcctataccaccttgcaaagcacccagaataccaggaacagtgccggcaagaagtgcaagagcttctgaaggaccgtgaacctatagagattgaatgggacgacctggcccagctgcccttcctgaccatgtgcattaaggagagcctgcggttgcatcccccagtcccggtcatctcccgatgttgcacgcaggactttgtgctcccagacggccgcgtcatccccaaaggtctacgaccccttccgtttcgaccaagagaacatcaaggagaggtcacctctggcttttattcccttctcggcagggcccagaaactgcatcgggcaggcgttcgccatggctgagatgaaggtggtcctggcgctcaccctgctgcacttccgcatcctgccgacccacactgaaccccgcaggaaacccgagctgatattgcgcgcagagggtggactttggctgcgggtggagcccctgggtgcgaactcacagtgactgtcctacccacccacccacctctgtagagtcccagaaacaaaactatgctgacacctctgcttgagcctcgttgacagccagcatggggctcctggggactggtgggatctaagaaagggaggtgagtgggtggaggcagggtgacgtctctgaacccaaaaccctgacggcctctctggctgagcacagggcatctaggcccttagtgggttctcccagagcccaagtaaaaactttatcctgtgggcagtagggagccctgggaggtgtttgagcaggagagggaacaggattaagaatgggtttaaggagcaagactgagactctgattcagcgagaaacaaccataggggcagatcccttcatctgtcctgggaatgtcctcccaagactggagtcctcagctcagaacaaagggaaaggggtgcagcttccaccctggcaggctctcagaaatttttagttcctttttccaccaacttcccacccctgtttctccccctcccagtgcgttctctctgtgactctcttcccttactttcagaggcataggatctggagccagactgcttgggctcaagtcctggctctgctgcgtgacttgagcaagttaattcctctctctgtgcctcggttccctcaaccatataatggagacaacagcattacctatatcagggttttcctgaggtctcaatataagggactcagagctgtgcctggcacacaatgaatgctaaatatatggagccattattatttcctgtctcagaaagtctggctgttaaagaatgttgtctttcaagatcgttatttctaccacgactttaaaggctgtgttttggaactcaaaggcaaaaattctaatatctgtgctccttgaacaacctcttctcctagagggctgtgcatataagatatgtatatatatatatatattatatatatatatatatacacacacacacacacacacacacacatatatacatatacacacacacacacacacacacacacacacacacacatatatatatatatatatttttttttttttcctgaggatggtgaaggtacctgactgtgtgaggtggtaggagaatgagagaaacctcagtcagtgtctcaaaataaaatcctgctacaaacattgatctcttttcatagcctaagggatgttgcatcgctaaaccctgttgacttctctaatctcttctgtagctgatctccttcccttgctacactcggttactctggccttgattctgatctccaaatacattatattttttatttgggaccatcgtattgcctttgcacctttatcaaatataagttgcctatatttatttgg

SEQ ID NO: 7478 - DNA, 3395 bp, Homo sapiens
  source 1..3395: mol_type = unassigned DNA
gaggcaaagacctcctagcagagggggagaggagggtatgtgggacaagctgcttctgataggagccaggctggcagtggcagggctggagggtcctggcctgggatggggaggggactgcccaaggttggggtgggtcaaggctgctggcctgggagactggtgatttcctggtaactggacccctggcaacctcccagtgattcaggctgggcctttttggattctaatcagcctctctctctctttccctttctgtgtaactggaggccacttggctgctggttttcattgggcatttctggactttagatctcagctcttgtttacccatctcagagccttccctgatctgcctccagcactgcccatccttgcccctttccactgtccttggagcttcctgggcccttccctgggcctcaggatcccaccctccatcccgtctgccctgcaggatgccgcagctgagcctgtcctggctgggcctcgggcccgtggcagcatccccgtggctgcttctgctgctggttggaggctcctggctcctggcccgcgtcctggcctggacctacaccttctatgacaactgccgccgcctccagtgttttcctcaacccccgaaacagaactggttttggggacaccagggcctggtcactcccacggaagagggcatgaagacattgacccagctggtgaccacatatccccagggctttaagttgtggctgggtcctaccttccccctcctcattttatgccaccctgacattatccggcctatcaccagtgcctcagctgctgtcgcacccaaggatatgattttctatggcttcctgaagccctggctgggggatgggctcctgctgagtggtggtgacaagtggagccgccaccgtcggatgttgacgcctgccttccatttcaacatcttgaagccttatatgaagattttcaacaagagtgtgaacatcatgcacgacaagtggcagcgcctggcctcagagggcagcgccagactggacatgtttgaacacatcagcctcatgaccttggacagtctgcagaaatgtgtcttcagctttgaaagcaattgtcaggagaagcccagtgaatatattgccgccatcttggagctcagtgcctttgtagaaaagagaaaccagcagattctcttgcacacggacttcctgtattatctcactcctgatgggcagcgcttccgcagggcctgccacctggtgcacgacttcacagatgccgtcatccaggagcggcgctgcaccctccccactcagggtattgatgatttcctcaagaacaaggcaaagtccaagactttagacttcattgatgtgcttctgctgagcaaggatgaagatgggaaggaattgtctgatgaggacataagagcagaagctgacaccttcatgtttgagggccatgacactacagccagtggtctctcctgggtcctataccaccttgcaaagcacccagaataccaggaacagtgccggcaagaagtgcaagagcttctgaaggaccgtgaacctatagagattgaatgggacgacctggcccagctgcccttcctgaccatgtgcattaaggagagcctgcggttgcatcccccagtcccggtcatctcccgatgttgcacgcaggactttgtgctcccagacggccgcgtcatccccaaaggcattgtctgcctcatcaatattatcgggatccattacaacccaactgtgtggccagaccctgaggtctacgaccccttccgtttcgaccaagagaacatcaaggagaggtcacctctggcttttattcccttctcggcagggcccagaaactgcatcgggcaggcgttcgccatggctgagatgaaggtggtcctggcgctcaccctgctgcacttccgcatcctgccgacccacactgaaccccgcaggaaacccgagctgatattgcgcgcagagggtggactttggctgcgggtggagcccctgggtgcgaactcacagtgactgtcctacccacccacccacctctgtagagtcccagaaacaaaactatgctgacacctctgcttgagcctcgttgacagccagcatggggctcctggggactggtgggatctaagaaagggaggtgagtgggtggaggcagggtgacgtctctgaacccaaaaccctgacggcctctctggctgagcacagggcatctaggcccttagtgggttctcccagagcccaagtaaaaactttatcctgtgggcagtagggagccctgggaggtgtttgagcaggagagggaacaggattaagaatgggtttaaggagcaagactgagactctgattcagcgagaaacaaccataggggcagatcccttcatctgtcctgggaatgtcctcccaagactggagtcctcagctcagaacaaagggaaaggggtgcagcttccaccctggcaggctctcagaaatttttagttcctttttccaccaacttcccacccctgtttctccccctcccagtgcgttctctctgtgactctcttcccttactttcagaggcataggatctggagccagactgcttgggctcaagtcctggctctgctgcgtgacttgagcaagttaattcctctctctgtgcctcggttccctcaaccatataatggagacaacagcattacctatatcagggttttcctgaggtctcaatataagggactcagagctgtgcctggcacacaatgaatgctaaatatatggagccattattatttcctgtctcagaaagtctggctgttaaagaatgttgtctttcaagatcgttatttctaccacgactttaaaggctgtgttttggaactcaaaggcaaaaattctaatatctgtgctccttgaacaacctcttctcctagagggctgtgcatataagatatgtatatatatatatatattatatatatatatatatacacacacacacacacacacacacacatatatacatatacacacacacacacacacacacacacacacacacacatatatatatatatatatttttttttttttcctgaggatggtgaaggtacctgactgtgtgaggtggtaggagaatgagagaaacctcagtcagtgtctcaaaataaaatcctgctacaaacattgatctcttttcatagcctaagggatgttgcatcgctaaaccctgttgacttctctaatctcttctgtagctgatctccttcccttgctacactcggttactctggccttgattctgatctccaaatacattatattttttatttgggaccatcgtattgcctttgcacctttatcaaatataagttgcctatatttatttggat

SEQ ID NO: 7479 - DNA, 1688 bp, Homo sapiens
  source 1..1688: mol_type = unassigned DNA
agctcttccctgggcctcaggtcctcaccctgcatcccctctgccctgcaggatgtcgctgctgagcctgccctggctgggcctcagaccggtggcaacgtccccatggctactcctgctgctggttgtgggctcctggctactcgcccgcatcctggcttggacctatgccttctataacaactgccgccggctccagtgtttcccacagcccccaaaacggaactggttttggggtcacctgggcctgatcactcctacagaggagggcttgaagaactcgacccagatgtcggccacctattcccagggctttacgatatggctgggtcccatcatccccttcatcgttttatgccaccctgacaccatccggtctatcaccaatgcctcagctgccattgcacccaaggataatctcttcatcaggttcctgaagccctggctgggagaagggatactgctgagtggcggtgacaagtggagccgccaccgtcggatgctgacgcccgccttccatttcaacatcctgaagtcctatataacgatcttcaacaagagtgcaaacatcatgcttgacaagtggcagcacctggcctcagagggcagcagttgtctggacatgtttgagcacatcagcctcatgaccttggacagtctacagaaatgcatcttcagctttgacagccattgtcaggagaggcccagtgaatatattgccaccatcttggagctcagtgcccttgtagagaaaagaagccagcatatcctccagcacatggactttctgtattacctctcccatgacgggcggcgcttccacagggcctgccgcctggtgcatgacttcacagacgctgtcatccgggagcggcgtcgcaccctccccactcagggtattgatgattttttcaaagacaaagccaagtccaagactttggatttcattgatgtgcttctgctgagcaaggatgaagatgggaaggcattgtcagatgaggatataagagcagaggctgacaccttcatgtttggaggccatgacaccacggccagtggcctctcctgggtcctgtacaaccttgcgaggcacccagaataccaggagcgctgccgacaggaggtgcaagagcttctgaaggaccgcgatcctaaagagattgaatgggacgacctggcccagctgcccttcctgaccatgtgcgtgaaggagagcctgaggttacatcccccagctcccttcatctcccgatgctgcacccaggacattgttctcccagatggccgagtcatccccaaaggcattacctgcctcatcgatattataggggtccatcacaacccaactgtgtggccggatcctgaggtctacgaccccttccgctttgacccagagaacagcaaggggaggtcacctctggcttttattcctttctccgcagggcccaggaactgcatcgggcaggcgttcgccatggcggagatgaaagtggtcctggcgttgatgctgctgcacttccggttcctgccagaccacactgagccccgcaggaagctggaattgatcatgcgcgccgagggcgggctttggctgcgggtggagcccctgaatgtaagcttgcagtgactttctgacccatccacctgtttttttgcagattgtcatgaataaaacggtgctgtcacct

SEQ ID NO: 7480 - DNA, 2044 bp, Homo sapiens
  source 1..2044: mol_type = unassigned DNA
gctgccaactgtcatgataagtatatgcttttatctgaacacccttgtcttggaagggcagggtggaggtaaacttggggttcagagtcccctctaaccaccctccaacttcccctgcaaactcccaagaaggtactgagacctgagaattcagtgctcgtgctggggcaccctgagctgcacccagtgggcccaaccccaggttttggctggctgcccaggcacggaagacacacccaggctgtggggattggctgcctcagcccagcccagcccagccccgcctcctacggccttccctagatcaggggccagggccaaagacctcccagcagaagaggagaagaggttgtgtgggacaagctgctcccgacagaaggatgtcgctgctgagcctgccctggctgggcctcagaccggtggcaacgtccccatggctactcctgctgctggttgtgggctcctggctactcgcccgcatcctggcttggacctatgccttctataacaactgccgccggctccagtgtttcccacagcccccaaaacggaactggttttggggtcacctgggcctgatcactcctacagaggagggcttgaagaactcgacccagatgtcggccacctattcccagggctttacgatatggctgggtcccatcatccccttcatcgttttatgccaccctgacaccatccggtctatcaccaatgcctcagctgccattgcacccaaggataatctcttcatcaggttcctgaagccctggctgggagaagggatactgctgagtggcggtgacaagtggagccgccaccgtcggatgctgacgcccgccttccatttcaacatcctgaagtcctatataacgatcttcaacaagagtgcaaacatcatgcttgacaagtggcagcacctggcctcagagggcagcagttgtctggacatgtttgagcacatcagcctcatgaccttggacagtctacagaaatgcatcttcagctttgacagccattgtcaggagaggcccagtgaatatattgccaccatcttggagctcagtgcccttgtagagaaaagaagccagcatatcctccagcacatggactttctgtattacctctcccatgacgggcggcgcttccacagggcctgccgcctggtgcatgacttcacagacgctgtcatccgggagcggcgtcgcaccctccccactcagggtattgatgattttttcaaagacaaagccaagtccaagactttggatttcattgatgtgcttctgctgagcaaggatgaagatgggaaggcattgtcagatgaggatataagagcagaggctgacaccttcatgtttggaggccatgacaccacggccagtggcctctcctgggtcctgtacaaccttgcgaggcacccagaataccaggagcgctgccgacaggaggtgcaagagcttctgaaggaccgcgatcctaaagagattgaatgggacgacctggcccagctgcccttcctgaccatgtgcgtgaaggagagcctgaggttacatcccccagctcccttcatctcccgatgctgcacccaggacattgttctcccagatggccgagtcatccccaaaggcattacctgcctcatcgatattataggggtccatcacaacccaactgtgtggccggatcctgaggtctacgaccccttccgctttgacccagagaacagcaaggggaggtcacctctggcttttattcctttctccgcagggcccaggaactgcatcgggcaggcgttcgccatggcggagatgaaagtggtcctggcgttgatgctgctgcacttccggttcctgccagaccacactgagccccgcaggaagctggaattgatcatgcgcgccgagggcgggctttggctgcgggtggagcccctgaatgtaagcttgcagtgactttctgacccatccacctgtttttttgcagattgtcatgaataaaacggtgctgtcacctctgcctgggcctcactgacagcctgcag

SEQ ID NO: 7481 - DNA, 2445 bp, Homo sapiens
  source 1..2445: mol_type = unassigned DNA
caggatgctgcccatcacagaccgcctgctgcacctcctggggctggagaagacggcgttccgcatatacgcggtgtccacccttctcctcttcctgctcttcttcctgttccgcctgctgctgcggttcctgaggctctgcaggagcttctacatcacctgccgccggctgcgctgcttcccccagcctccccggcgcaactggctgctgggccacctgggcatgtaccttccaaatgaggcgggccttcaagatgagaagaaggtactggacaacatgcaccatgtactcttggtatggatgggacctgtcctgccgctgttggttctggtgcaccctgattacatcaaaccccttttgggagcctcagctgccatcgcccccaaggatgacctcttctatggcttcctaaaaccttggctaggggatgggctgctgctcagcaaaggtgacaagtggagccggcaccgtcgcctgctgacacccgccttccactttgacatcctgaagccttacatgaagatcttcaaccagagcgctgacattatgcatgctaaatggcggcatctggcagagggctcagcggtctcccttgatatgtttgagcatatcagcctcatgaccctggacagtcttcagaaatgtgtcttcagctacaacagcaactgccaagagaagatgagtgattatatctccgctatcattgaactgagcgctctgtctgtccggcgccagtatcgcttgcaccactacctcgacttcatttactaccgctcggcggatgggcggaggttccggcaggcctgtgacatggtgcaccacttcaccactgaagtcatccaggaacggcggcgggcactgcgtcagcagggggccgaggcctggcttaaggccaagcaggggaagaccttggactttattgatgtgctgctcctggccagggatgaagatggaaaggaactgtcagacgaggatatccgagccgaagcagacaccttcatgtttgagggtcacgacacaacatccagtgggatctcttggatgctgttcaatttggcaaagtatccggaataccaggagaaatgccgagaagagattcaggaagtcatgaaaggccgggagctggaggagctggagtgggacgatctgactcagctgccctttacaactatgtgcattaaggagagcctgcgccagtacccacctgtcactcttgtctctcgccaatgcacggaggacatcaagctcccagatgggcgcatcatccccaaaggaatcatctgcttggtcagcatctatggaacccaccacaaccccacagtgtggcctgactccaaggtgtacaacccctaccgctttgacccggacaacccacagcagcgctctccactggcctatgtgcccttctctgcaggacccaggaattgcatcggacagagcttcgccatggccgagttgcgcgtggttgtggcactaacactgctacgtttccgcctgagcgtggaccgaacgcgcaaggtgcggcggaagccggagctcatactgcgcacggagaacgggctctggctcaaggtggagccgctgcctccgcgggcctgagcgtgggcgcgcccctgcggctcccgagggtccaggccccgcccccaaaggaccaggactcgccccaaagatcccgagggcataggccacccccctcgaagttcaggttcagctcctggatgaccaggcaccgctgttgagcagcctggtggtactggccacgcccctcaaggcaaggctcctccccttagggggcctgatcccgccccttgaggcttaggtcccgccccctgacttctcgcacctgtcctgtttgagggaccagggtcgaccctgcccccttgggctcaggccccgcccccaggatcctacggattgaggtcctcaggccacgcccctgcagatccaggtctccaggccttgcccactgagccttcagaggacctaagacccacctatgactcagggcccaccacaccccacccccccccaactggctgaacccctggcaggcttccaaactgaggaaagctggagcctgacgtcagagcttttaactcggacatcaccctcctgaggccctcagctcatacgggcagactgctcaggcgtgaggctggatcgtagggttcgaggctgcttgcttttgttgttgttttgtaaactcagacccttgtaagccccttccttcctcccttgcccaaagatcctttgctgagtgttctgtttttgcagaataaaagcaaaggatgcagacttaccccaccctccacccctagctcagccagatccttacacgtggagcccccagcatgggaatgaggggctctgcaactgagcgaagctgcgggctaggaggctggaaagccatttatcctaggacataaactcagattttgggggtc

SEQ ID NO: 7482 - DNA, 5052 bp, Homo sapiens
  source 1..5052: mol_type = unassigned DNA
agaagaaggggagaggaggttgtgtgggacaaggtgctcctgacagaaggatgccacagctgagcctgtcctcgctgggcctttggccaatggcagcatccccgtggctgctcctgctgctggttggggcctcctggctcctggcccgcatcctggcctggacctataccttctatgacaactgctgccgcctccggtgtttcccgcaacccccgaaacggaattggttcttgggtcacctgggcctgattcacagctcggaggaaggtctcctatacacacaaagcctggcatgcaccttcggtgatatgtgctgctggtgggtggggccctggcacgcaatcgtccgcatcttccaccccacctacatcaagcctgtgctctttgctccagctgccattgtaccaaaggacaaggtcttctacagcttcctgaagccctggctgggggatgggctcctgctgagtgctggtgaaaagtggagccgccaccgtcggatgctgacgcctgccttccatttcaacatcctgaagccctatatgaagattttcaatgagagtgtgaacatcatgcatgccaagtggcagctcctggcctcagagggtagtgcccgtctggacatgtttgagcacatcagcctcatgaccttggacagtctgcagaaatgtgtcttcagctttgacagccattgccaggagaagcccagtgaatatattgccgccatcttggagctcagtgcccttgtgacaaaaagacaccagcagatcctcctgtacatagacttcctgtattatctcacccctgatgggcagcgtttccgcagggcctgccgcctggtgcacgacttcacagatgccgtcatccaggagcggcgccgcaccctccctagccagggtgttgatgacttcctccaagccaaggccaaatccaagactttggacttcattgatgtactcctgctgagcaaggatgaagatgggaagaagttgtccgatgaggacataagagcagaagctgacacctttatgtttgagggccatgacaccacagccagtggtctctcctgggtcctgtaccaccttgcaaagcacccggaataccaggagcgctgtcggcaggaggtgcaagagcttctgaaggaccgtgagcctaaagagattgaatgggacgacctggcccagctgcccttcctgaccatgtgcattaaggagagcctgaggctgcatcccccagtccctgccgtctctcgctgctgcacccaagacattgtgctcccagacggccgggtcatccccaaaggcattatctgcctcatcagtgtttttggaacccatcacaacccagccgtgtggccggaccctgaggtctatgacccctttcgctttgacccaaagaacatcaaggagaggtcacctctggcttttattcccttctcagcagggcccaggaactgcatcgggcaggcgttcgcgatggcggagatgaaggtggtcctggggctcacgctgctgcgcttccgcgtcctgcctgaccacaccgagccccgcaggaagccggagctggtcctgcgcgcagagggcggactttggctgcgggtggagcccctgagctgagttctgcagagacccactctgaccccactaaaatgacccctgattcatcaaaagtgaggcctagaattaccctaagaccctgttccacagtcctgtattccatcctagatatctactcaaaataattgagacaagtgttcaaacagaaagacgcttgtgcgtgaatgttcatggcagccctattcacagtagccaaacgatgaaaacaaccccaagctatatattaccagatgaaaggataaacaaaatatggtccatccatacaatggagtattacacagccataaaaaggaatgaagcagtgatccccactacactgtggatgaaccttgaatgcatgatactgaatgaaagacatcagatgcaaaaggtcacatagtgtactgtccttttatatgaaatttccagaacaggccaatctgaagagatgtatagtggattggtggctttcagcagctgtggggaggtgggactgaggagcgactgctaatcaggatggggtttcctcctgggatggtgaaaatgttccggacctagatagtgatgaaggtagcacgacactgtgagtgcactaaatgctattgaattggacactttagaatggttgaaatagtgatttttatgtgaattctacctaaacatgctattacagctcatatatactttttccatctggattcttcacaaaagaatatgttgtgagcatctttccatgatattaaatcatcttaggaaacattattttgtgttcttcaaaatgtgcatgttaagtattcaaatcagtcttaaatttttaaaaatatgtaattttagaaaataatttaaaaggttttgtttcagtttgtaagatttcttttctggcactttaatggcttgaggtatcattatcagttacaaattgagttattcttcatcaaatgacttttggagtagagattttatttttatagcaatagatgcacagatattcctgtaagatacaggtgtggttagacacttttctagaacaggcatgccctgcaaactccacagacactgactgtttttgtcctattaagaagtagaccactgagaagggagaaggtgacattttagctttcccaggtaaaagtggttttcatcctcacaccaattttatggactggacgttaactctcttgctcaaggtcactctgagtggaagagtggggataaatctggttcgtttggcatcagaggccatgacttttcctaccacagaagtaattttcaaagtaagtctctgccctaggcacatcagatcacctggggaccactccagagtgagtagacaagactttgacaggggtgcctaatttttttttttttttgagatggagtctcgctctgttgcccaggctggagtgcagtggcatgatctcagttcactgcaacctccgcctcctgcgttcaagtgattgtcctgtctcagcctcccaagtagctgggattacaggcacccaccaccacatccagctaattgttgtatttttaatagaggcggggtttcgccatgttgcactggctggtgttgaactcctaacctcaggtgatccacccgcctcggcctcccaaagtgctgggattacaggcccggtccagtttgatagtttgttatcatgttatacgtacacttagaataatgatccagccatctcattctaacagcaatgagaacttaggctcccctctctactaaaatacaaaagttagctggtcatggtggtgcgggcctgtaatcccagctactcgggaggctgatgcgggagaatcacttgaaacccacaggcggaggttgcagtgagctgaggtggtgccactacgctccagcctgggggagggggacatagcgagactcggtctcaaaaacaaaacaaaacaaaacaaaacaaaacaaaaacaaaacaaaacaaaacaaaacactgccaaactgtttccaaagcatctgcatcgtgtttaatttccataagtaacgtatgagaattctaggtcctccaaataattagcagtccttcgtagtgtcagtttttgtttcagccttccttatgggtatgctgtggcatatccctgagattttaattcgcattttccagtgactaagggtgttgaaccactcgtgccttcctgtgcctatttgacactcctatattttctttggtgaagtgtctgttcaatcatctgctcattaaattttccttcggttgtttgccttcttattgttggattttgagagttctatgtacaagtcctttgtcagtcgtgtgatttgcaagtcttcttcctagtctctgaagtttctttctttcatagagcaaacgttttaaatttttatgaagtaagacttctcagttttatttttggtgaattatgtttatactgccatatataggaactctttgcttaactggaggtcatggagattttctcctacattttcttttaaaagttttatagtttcagagtttacatgtaattccataatctccatttagttaaattttgtatggggtgtgaactgtggtttgactgttttcttgtatatggatatccaattgtttcacacaatttttttgaaaagaatatccttggcagggcacggtagctcacacctgtaatcccagcactttaggaggtcaaggtgggcagatcatgaggtcaggagtttgagaccagcctggccaatatggtgaaaccacgtctctattaaaaatagaaaaattagccaggcgtggtggtgtgtgcctgtattcacagctgcttggatggctgaggcaggagaatcgcttgaacccaggagtcagaggtttcagtgagccgagattgtgccactgcactccagcctgggtgaaagagctagattctctctctcaaaaaaaaaaaaaaaaaaaaggaaagaaagaaagaaaagaaaagaaaatcctttttgctttaacttgccttgcaggtttgtagaaaactcaattgttgaaatttgggtggatatatttctggattttctattctattccatgttggaccaataccacactgccctagtcactgttgcattatagtatatctttaaaggagtaatgggaatccttcaactacattttttccccaataatttttggctattctgcttcctttgtgtttctatgtaaattttatcatcagtgtgtctatttctacaaatagtcctgatagggtttgaattgggatttctgtgaatctatagatcaatctgaggagacttaataatgatattgattctcccaattcatgaatatagtatacccctgtatttatttgttttcttgaatttcttttatcattgttttgtagttttcaccatgacagtcttgcacatattttgttaaatgtacagctgagaatttaattttttctggtgtacaatgctaataaaatggtgctttaaaag

SEQ ID NO: 7483 - DNA, 1881 bp, Homo sapiens
  source 1..1881: mol_type = unassigned DNA
aaaaaacctcccagaagaaggggagaggaggttgtgtgggacaaggtgctcctggctcctggcccgcatcctggcctggacctataccttctatgacaactgctgccgcctccggtgtttcccgcaacccccgaaacggaattggttcttgggtcacctgggcctggtcacccccacggagcagggcatgagggtcctgactcagctggtggccacctacccccagggctttaaggtctggatgggccccatcttccccgtcatccgtttttgccaccccaacatcatccggtctgtcatcaacgcctcagctgccattgtaccaaaggacaaggtcttctacagcttcctgaagccctggctgggggatgggctcctgctgagtgctggtgaaaagtggagccgccaccgtcggatgctgacgcctgccttccatttcaacatcctgaagccctatatgaagattttcaatgagagtgtgaacatcatgcatgccaagtggcagctcctggcctcagagggtagtgcccgtctggacatgtttgagcacatcagcctcatgaccttggacagtctgcagaaatgtgtcttcagctttgacagccattgccaggagaagcccagtgaatatattgccgccatcttggagctcagtgcccttgtgacaaaaagacaccagcagatcctcctgtacatagacttcctgtattatctcacccctgatgggcagcgtttccgcagggcctgccgcctggtgcacgacttcacagatgccgtcatccaggagcggcgccgcaccctccctagccagggtgttgatgacttcctccaagccaaggccaaatccaagactttggacttcattgatgtactcctgctgagcaaggatgaagatgggaagaagttgtccgatgaggacataagagcagaagctgacacctttatgtttgagggccatgacaccacagccagtggtctctcctgggtcctgtaccaccttgcaaagcacccggaataccaggagcgctgtcggcaggaggtgcaagagcttctgaaggaccgtgagcctaaagagattgaatgggacgacctggcccagctgcccttcctgaccatgtgcattaaggagagcctgaggctgcatcccccagtccctgccgtctctcgctgctgcacccaagacattgtgctcccagacggccgggtcatccccaaaggcattatctgcctcatcagtgtttttggaacccatcacaacccagccgtgtggccggaccctgaggtctatgacccctttcgctttgacccaaagaacatcaaggagaggtcacctctggcttttattcccttctcagcagggcccaggaactgcatcgggcaggcgttcgcgatggcggagatgaaggtggtcctggggctcacgctgctgcgcttccgcgtcctgcctgaccacaccgagccccgcaggaagccggagctggtcctgcgcgcagagggcggactttggctgcgggtggagcccctgagctgagttctgcagagacccactctgaccccactaaaatgacccctgattcatcaaaagtgaggcctagaattaccctaagaccctgttccacagtcctgtattccatcctagatatctactcaaaataattgagacaagtgttcaaacagaaagacgcttgtgcgtgaatgttcatggcagccctattcacagtagccaaacgatgaaaacaaccccaagctatatattaccagatgaaaggataaacaaaatatggtccatccatacaatggagtattacacagccataaaaaggaatgaagcagtgatccccactacactgtggatgaaccttgaatgcatgatactgaatg

SEQ ID NO: 7484 - DNA, 1292 bp, Homo sapiens
  source 1..1292: mol_type = unassigned DNA
agcaaaaacctcctggcaaaggaggagaggaggttgtgcgggacaaccttctcctgacagaaggatgtcgctgctgagcctgtcttggctgggcctcaggccggtggcagcatccccgtggctgctcctgctggtggtcggggcctcctggctcctggcccgcatcctggcctggacctatgccttctatcacaacggccgccgcctccggtgtttcccgcagccccggaaacagaactggttcttgggtcacctgggcctggaagcccagtgaatatattactgcgatcatggagctcagtgcccttgtagtgaaacggaataaccagttcttccggtacaaggacttcctgtacttcctcactccctgtggacggcgcttccacagggcctgcagactggtgcacgacttcacagatgccgtcatccaggagcggcgccgcaccctcactagccagggtgttgatgacttcctccaagccaaggccaagtccaagactttggactttattgatgtgctcctgctgagcgaggataaaaatggtaaagagttgtcagatgaggacataagagcagaagctgacactttcatgtttggaggccatgacaccacggccagtggcctctcctgggtcttgtacaacctcgcgaggcacccagaataccaagaacgctgccggcaggaggtgcaagagcttctgaaggaccgtgagcctaaagagattgaatgggacgacctggcccagttgcccttcctgaccatgtgcctgaaggagagcctgcggttgcatcccccaatccctacattcgcccgcggctgcacccaggacgtggtgctcccagacagccgagtcatccccaaagggaatgtctgtaacatcaacatcttcgcaatccatcacaacccctcagtctggccagaccctgaggtctatgaccccttccgcttcgacccagaaaacgcccagaagaggtcacctatggcttttattcctttctcggcggggcccaggaactgcatcgggcagaagttcgcgatggcagagatgaaggtggtcctggcgctcacgctgctgcgcttccgcatcctgcccgaccacagggagccacgcaggacgccggagattgttttgcgtgcggaggacggactttggctgcgagtagaacccctgggctgaggcctgcagtgacccacccacctacctttgcatcacctacctttgcaccaactaccttttcagatttccggtaataaatctgtgttggcccctgtgcctcagtcccgcggatgg

SEQ ID NO: 7485 - DNA, 1904 bp, Homo sapiens
  source 1..1904: mol_type = unassigned DNA
agcaaaaacctcctggcaaaggaggagaggaggttgtgcgggacaaccttctcctgacagaaggatgtcgctgctgagcctgtcttggctgggcctcaggccggtggcagcatccccgtggctgctcctgctggtggtcggggcctcctggctcctggcccgcatcctggcctggacctatgccttctatcacaacggccgccgcctccggtgtttcccgcagccccggaaacagaactggttcttgggtcacctgggcctggtcactcccacagaggagggcttgagggtcctgacccagctggtggccacctacccccagggctttgtgaggtggttgggccccatcactcccatcatcaacttgtgccaccctgacatcgtccgatctgtcatcaatacctcagatgccattacagacaaggacatagtcttctacaagaccctgaagccctggctgggggatgggctcttgttaagtgttggtgacaagtggagacaccaccgtcgcttgacgcctgccttccatttcaacatcctgaagccctatataaagattttcagcaagagtgcaaacatcatgcatgccaagtggcaacgcctggccatggagggcagcacctgtctggatgtgtttgagcacatcagccttatgaccctggacagtctgcagaaatgcatcttcagctttgacagcaattgtcaggagaagcccagtgaatatattactgcgatcatggagctcagtgcccttgtagtgaaacggaataaccagttcttccggtacaaggacttcctgtacttcctcactccctgtggacggcgcttccacagggcctgcagactggtgcacgacttcacagatgccgtcatccaggagcggcgccgcaccctcactagccagggtgttgatgacttcctccaagccaaggccaagtccaagactttggactttattgatgtgctcctgctgagcgaggataaaaatggtaaagagttgtcagatgaggacataagagcagaagctgacactttcatgtttggaggccatgacaccacggccagtggcctctcctgggtcttgtacaacctcgcgaggcacccagaataccaagaacgctgccggcaggaggtgcaagagcttctgaaggaccgtgagcctaaagagattgaatgggacgacctggcccagttgcccttcctgaccatgtgcctgaaggagagcctgcggttgcatcccccaatccctacattcgcccgcggctgcacccaggacgtggtgctcccagacagccgagtcatccccaaagggaatgtctgtaacatcaacatcttcgcaatccatcacaacccctcagtctggccagaccctgaggtctatgaccccttccgcttcgacccagaaaacgcccagaagaggtcacctatggcttttattcctttctcggcggggcccaggaactgcatcgggcagaagttcgcgatggcagagatgaaggtggtcctggcgctcacgctgctgcgcttccgcatcctgcccgaccacagggagccacgcaggacgccggagattgttttgcgtgcggaggacggactttggctgcgagtagaacccctgggctgaggcctgcagtgacccacccacctacctttgcatcacctacctttgcaccaactaccttttcagatttccggtaataaatctgtgttggcccctgtgcctcagtcccgcggatggccagtagggggcgctggaggactgcggggatctagggcctggctgggaagaggcggggagatgtctctgtgcccaagatactcactgcctctctgggtgagcacaggagccccgtgctgagggtgggatctcccagagtctaagtaaagactttttcccccccaaa

SEQ ID NO: 7486 - DNA, 1519 bp, Homo sapiens
  source 1..1519: mol_type = unassigned DNA
agcaaaaacctcctggcaaaggaggagaggaggttgtgcgggacaaccttctcctgacagaaggatgtcgctgctgagcctgtcttggctgggcctcaggccggtggcagcatccccgtggctgctcctgctggtggtcggggcctcctggctcctggcccgcatcctggcctggacctatgccttctatcacaacggccgccgcctccggtgtttcccgcagccccggaaacagaactggttcttgggtcacctgggcctggtcactcccacagaggagggcttgagggtcctgacccagctggtggccacctacccccagggctttgtgaggtggttgggccccatcactcccatcatcaacttgtgccaccctgacatcgtccgatctgtcatcaatacctcagatgccattacagacaaggacatagtcttctacaagaccctgaagccctggctgggtaagtaactgtaggtggacgggacggggaccaacttttgtggccaggggaagattctgcccttgcccacagcctttggctgccgtactaggggatgggctcttgttaagtgttggtgacaagtggagacaccaccgtcgcttgtgacgcctgccttccatttcaacatcctgaagccctatataaagattttcagcaagagtgcaaacatcatgcatgccaagtggcaacgcctggccatggagggcagcacctgtctggatgtgtttgagcacatcagccttatgaccctggacagtctgcagaaatgcatcttcagctttgacagcaattgtcaggagaagcccagtgaatatattactgcgatcatggagctcagtgcccttgtagtgaaacggaataaccagttcttccggtacaaggacttcctgtacttcctcactccctgtggacggcgcttccacagggcctgcagactggtgcacgacttcacagatgccgtcatccaggagcggcgccgcaccctcactagccagggtgttgatgacttcctccaagccaaggccaagtccaagactttggactttattgatgtgctcctgctgagcgaggataaaaatggtaaagagttgtcagatgaggacataagagcagaagctgacactttcatgtttggaggccatgacaccacggccagtggcctctcctgggtcttgtacaacctcgcgaggcacccagaataccaagaacgctgccggcaggaggtgcaagagcttctgaaggaccgtgagcctaaagagattgaatgggacgacctggcccagttgcccttcctgaccatgtgcctgaaggagagcctgcggttgcatcccccaatccctacattcgcccgcggctgcacccaggacgtggtgctcccagacagccgagtcatccccaaaggtctatgaccccttccgcttcgacccagaaaacgcccagaagaggtcacctatggcttttattcctttctcggcggggcccaggaactgcatcgggcagaagttcgcgatggcaga

SEQ ID NO: 7487 - DNA, 4333 bp, Homo sapiens
  source 1..4333: mol_type = unassigned DNA
atggcggggctctggctggggctcgtgtggcagaagctgctgctgtggggcgcggcgagtgccctttccctggccggcgccagtctggtcctgagcctgctgcagagggtggcgagctacgcgctgctgatgaagccggacgggcgagaattttttcagcagatcattgagtacacagaggaataccgccacatgccgctgctgaagctctgggtcgggccagtgcccatggtggccctttataatgcagaaaatgtggaggtaattttaactagttcaaagcaaattgacaaatcctctatgtacaagtttttagaaccatggcttggcctaggacttcttacaagtactggaaacaaatggcgctccaggagaaagatgttaacacccactttccattttaccattctggaagatttcttagatatcatgaatgaacaagcaaatatattggttaagaaacttgaaaaacacattaaccaagaagcatttaactgctttttttacatcactctttgtgccttagatatcatctgtgaaacagctatggggaagaatattggtgctcaaagtaatgatgattccgagtatgtccgtgcagtttatagaatgagtgagatgatatttcgaagaataaagatgccctggctttggcttgatctctggtaccttatgtttaaagaaggatgggaacacaaaaagagccttcagatcctacatacttttaccaacagtgtcatcgctgaacgggccaatgaaatgaacgccaatgaagactgtagaggtgatggcaggggctctgccccctccaaaaataaacgcagggcctttcttgacttgcttttaagtgtgactgatgacgaagggaacaggctaagtcatgaagatattcgagaagaagttgacaccttcatgtttgaggggcacgatacaactgcagctgcaataaactggtccttatacctgttgggttctaacccagaagtccagaaaaaagtggatcatgaattggatgacgtgtttgggaagtctgaccgtcccgctacagtagaagacctgaagaaacttcggtatctggaatgtgttattaaggagacccttcgcctttttccttctgttcctttatttgcccgtagtgttagtgaagattgtgaagtggcaggttacagagttctaaaaggcactgaagccgtcatcattccctatgcattgcacagagatccgagatacttccccaaccccgaggagttccagcctgagcggttcttccccgagaatgcacaagggcgccatccatatgcctacgtgcccttctctgctggccccaggaactgtataggtcaaaagtttgctgtgatggaagaaaagaccattctttcgtgcatcctgaggcacttttggatagaatccaaccagaaaagagaagagcttggtctagaaggacagttgattcttcgtccaagtaatggcatctggatcaagttgaagaggagaaatgcagatgaacgctaactatattattgggttgtgcctttatcatgagaaaggtctttattttaagagatccttgtcatttacaatttacagatcatgagttcaatatgcttgaatcccctagacctaatttttccttgatcccactgatcttgacatcaagtctaacaaagaaaaagttttgagttttgtattttcttttttcttttttctttattttttttttttgaaaccgtgtctcactctgtcgcccaggctggaggagtgcagtggtgtgatctcagctcactgcaacctccacctcccaggttcaagcaattcttctgcctcagcctcccaagtagctgggattacaggtgcctgccaccatgcctggctaatttttttgtatttttagtagaaacagggtgtcaccatgttggccagactggtctcaaactcctgacctcaagtgatccacctgcctcagcctcccaaagtgctgggattatagtcgtgagccaccacgcctggccagagttttttatttttatcaccaccatagatgttacagttggctgtggtcacaaaagtagttaattgtgtcagcacccaaataaacatctaacaggtttctcaacagaggaatccacagtccaattccacttcaattgatagacccaaaaaatataatttaatcaaagttctagagtttttgtttgtttgtttgagatggagtcttgctctgtcgcccaggctggaacgcagtggtgacatctcggctcactgcaacctccacctcccaggttcaagtgattctcctgcctcagcctcctgagtagctgggactacaggcgcctgccaccacgcccagctaatttttgtatttttagtagagatggggtttcaccatgttggccaggatggtcttgatctcttgacctcgtgatctgcctgcctcggcctcccaaagtgctggcattacaggcatgagccaccatgcctggcccaaagttctagaattttttaaaggtattcatggtgactcaggaatacacacatacacacacacacacacacacacacacacacacatacacacatataatttgaaagaggtgagtatgtactctgacttcagctctcaggttttaaaaattatattagtgggaccagttatgacaagaataatcattatagtacttttcagattttataacctggagcagattattttaagttgattagtaggttctgttacagtttttcttttgatcgtgcacttatagtcttcatttaattcctcatagaatcccagtcacctttatatatcatattattggaagagattcatcttcataatctccagttttttcacagtgcctcacagagttaatcatgccttttggagctagaaggactttagaacttatctagttatgctcctttatattataagtaagggaatagaatcaataagacagtttctgcccaaagtcatgttaccagttggtgacagagctggaaatacgtagagatctatacccttaaatctctccactcacatgctgatatactttctactacaatatgctatagctttatggaactcagggtgatgatcagacgtgtcattagaacatgagtcctctgcttctgattcaggcatacttttgggattcttccatctttaaaggaaaaaggaagccattcatctatatttagtaacccagtaatatctcacttagtttagggttagatctttagttaattcaaccttatagatcatacttatgaaggtgataactgacacgtgttcactgaattttaatttgataggcaatacatctacccactccattattttttaaaacttcatttaatagtttaaacaagattggttttgttttcaatttttattcactcttcatagaatcacaattacctttatatatcatatgttattggaagagattcctcagtaatctccaatctctcatagtgcctcacagggttggtcaatggcttttggaactggaaggaccttagaacttatctgttatgctcctgatagccaatagcagatagaagcttgcaatcaagagggtaggacatgtgttcttcaatggatatcaaaggaagaggttgcaaaccaaagccatttggcaagccctgtagcctgggccatttaagacaggggcggtctcagccaaattgcacccatttaactatcccaaagagccacagtgcctacaacccaggccctaagttgatgaagaaaaagtcaaggaaggaggtgatacaattggaaatattcccatcaaatggttaatcttatttagaaaatgggcatattagaaaaagtccttccaagatgattttggataataaaagttgtatttgtggaaattggtattatctctgttttatgcacttacatttatcccttacattttgtttttagtgaccctacatgacattaaatttaaagtaaaacattgtttaatgttaccttttggcttgagaatgtctttcagctccagaattattgttactcatattttaatcagtaagtcatttaagctatgacagagtaggaattgagaaattatttcatatgctacagtattgaaatgtggatgctgccttgttttataagaagatgatcaaggtttgtgtgcccattacctttcctctgcctgaaagacgtgtctcaagaaaaataaattctattttagatgcaggtactgcattttattctaagaattgatatcaattcaaaacatagaaaactgtaaaagataaatcaggagatggctgattcataatgggtaataaaataaatagcactttcgagctg

SEQ ID NO: 7488 - DNA, 2042 bp, Homo sapiens
  source 1..2042: mol_type = unassigned DNA
gggcctccagtgcaatcactacgccctggggcccggaaaccgttttccggtctttcgctttcggctggggcgtggaggccgcggtgctgcgtaggccgggccgggcgcaggaacagccccgtggcgccctctctggccgccgcccgggcgggaaacgtcgttccggggaccgggcgaccccgcagcggggagcgcgccaggtccgcgcggggaagtgggcggtgtgcggccggcaccgcctcgcaccacgcccccgcgggcccgcactttcccggagtgcaccccgcggccgccagccggggcgatggcggggctctggctggggctcgtgtggcagaagctgctgctgtggggcgcggcgagtgccctttccctggccggcgccagtctggtcctgagcctgctgcagagggtggcgagctacgcgcggaaatggcagcagatgcggcccatccccacggtggcccgcgcctacccactggtgggccacgcgctgctgatgaagccggacgggcgagaattttttcagcagatcattgagtacacagaggaataccgccacatgccgctgctgaagctctgggtcgggccagtgcccatggtggccctttataatgcagaaaatgtggaggtaattttaactagttcaaagcaaattgacaaatcctctatgtacaagtttttagaaccatggcttggcctaggacttcttacaagtactggaaacaaatggcgctccaggagaaagatgttaacacccactttccattttaccattctggaagatttcttagatatcatgaatgaacaagcaaatatattggttaagaaacttgaaaaacacattaaccaagaagcatttaactgctttttttacatcactctttgtgccttagatatcatctgtgaaacagctatggggaagaatattggtgctcaaagtaatgatgattccgagtatgtccgtgcagtttatagaatgagtgagatgatatttcgaagaataaagatgccctggctttggcttgatctctggtaccttatgtttaaagaaggatgggaacacaaaaagagccttcagatcctacatacttttaccaacagtgtcatcgctgaacgggccaatgaaatgaacgccaatgaagactgtagaggtgatggcaggggctctgccccctccaaaaataaacgcagggcctttcttgacttgcttttaagtgtgactgatgacgaagggaacaggctaagtcatgaagatattcgagaagaagttgacaccttcatgtttgaggggcacgatacaactgcagctgcaataaactggtccttatacctgttgggttctaacccagaagtccagaaaaaagtggatcatgaattggatgacgtgtttgggaagtctgaccgtcccgctacagtagaagacctgaagaaacttcggtatctggaatgtgttattaaggagacccttcgcctttttccttctgttcctttatttgcccgtagtgttagtgaagattgtgaagtggcaggttacagagttctaaaaggcactgaagccgtcatcattccctatgcattgcacagagatccgagatacttccccaaccccgaggagttccagcctgagcggttcttccccgagaatgcacaagggcgccatccatatgcctacgtgcccttctctgctggccccaggaactgtataggtcaaaagtttgctgtgatggaagaaaagaccattctttcgtgcatcctgaggcacttttggatagaatccaaccagaaaagagaagagcttggtctagaaggacagttgattcttcgtccaagtaatggcatctggatcaagttgaagaggagaaatgcagatgaacgctaactatattattgggttgtgcctttatcatgagaaaggtctttattttaagagatccttgtcatttacaatttacagatcatgagttcaatatgcttgaatcccctagacctaatttttccttgatcccactgatcttgacatcaagtctaacaaagaaaaa

SEQ ID NO: 7489 - DNA, 2181 bp, Homo sapiens
  source 1..2181: mol_type = unassigned DNA
ggggccgaggcggcgcgcggcgctgacagctgagtcggctcgcggcctcccggccccctcggcgcccggcccgaccctggcctggcctgccctgccccggagccatgagccccgggctgctgctgctcggcagcgccgtcctgctcgccttcggcctctgctgcaccttcgtgcaccgcgctcgcagccgctacgagcacatccccgggccgccgcggcccagtttccttctaggacacctcccctgcttttggaaaaaggatgaggttggtggccgtgtgctccaagatgtgtttttggattgggctaagaagtatggacctgttgtgcgggtcaacgtcttccacaaaacctcagtcatcgtcacgagtcctgagtcggttaagaagttcctgatgtcaaccaagtacaacaaggactccaagatgtaccgtgcgctccagactgtgtttggtgagagactcttcggccaaggcttggtgtccgaatgcaactatgagcgctggcacaagcagcggagagtcatagacctggccttcagccggagctccttggttagcttaatggaaacattcaacgagaaggctgagcagctggtggagattctagaagccaaggcagatgggcagaccccagtgtccatgcaggacatgctgacctacaccgccatggacatcctggccaaggcagcttttgggatggagaccagtatgctgctgggtgcccagaagcctctgtcccaggcagtgaaacttatgttggagggaatcactgcgtcccgcaacactctggcaaagttcctgccagggaagaggaagcagctccgggaggtccgggagagcattcgcttcctgcgccaggtgggcagggactgggtccagcgccgccgggaagccctgaagaggggcgaggaggttcctgccgacatcctcacacagattctgaaagctgaagagggagcccaggacgacgagggtctgctggacaacttcgtcaccttcttcattgctggtcacgagacctctgccaaccacttggcgttcacagtgatggagctgtctcgccagccagagatcgtggcaaggctgcaggccgaggtggatgaggtcattggttctaagaggtacctggatttcgaggacctggggagactgcagtacctgtcccaggtcctcaaagagtcgctgaggctgtacccaccagcatggggcacctttcgcctgctggaagaggagaccttgattgatggggtcagagtccccggcaacaccccgctcttgttcagcacctatgtcatggggcggatggacacatactttgaggacccgctgactttcaaccccgatcgcttcggccctggagcacccaagccacggttcacctacttccccttctccctgggccaccgctcctgcatcgggcagcagtttgctcagatggaggtgaaggtggtcatggcaaagctgctgcagaggctggagttccggctggtgcccgggcagcgcttcgggctgcaggagcaggccacactcaagccactggaccccgtgctgtgcaccctgcggccccgcggctggcagcccgcacccccaccacccccctgctgagggggcctccaggcaggacgagactcctcgggcaagggccgtgcccgcccacctctgctgcccacggccacccacccttctcccctgccccgtcccctgggccacccttcacgctggcttccagcgggccctctgccgaccgcctgcttcacacccctcagcgctccctgtcgcctgcggactccatggcccttcctggactggcccttgcccaactcccagccaccaccactgtccctaccactgagcccttgcacaggccacttgctcagacgagacaccctaactcttgctcactccctaaagccctcttcaggggtcacctcctccaagaagccctccttgccaccccccgccggcaggggcccctcctctgtgctccctcggtcacctgtgctacctctaacaccacactgaccacactgtatcgtgagtgtccgttgacgtgaccaattgccctgccaggctgtcagcgcctcaagggtagggtctgcgtgtgatttgtctctgagccccctgtgcccacccagggcccggcacagagtcgatgctcaataaatgtgtgttgactgca

SEQ ID NO: 7490 - DNA, 1599 bp, Homo sapiens
  source 1..1599: mol_type = unassigned DNA
ctcacagccgcagcagctgctgggcgcccaccgcgcacagctgggccccacaaacgtgatggcagccacagccctttcagtttccttctaggacacctcccctgcttttggaaaaaggatgaggttggtggccgtgtgctccaagatgtgtttttggattgggctaagaagtatggacctgttgtgcgggtcaacgtcttccacaaaacctcagtcatcgtcacgagtcctgagtcggttaagaagttcctgatgtcaaccaagtacaacaaggactccaagatgtaccgtgcgctccagactgtgtttggtgagagactcttcggccaaggcttggtgtccgaatgcaactatgagcgctggcacaagcagcggagagtcatagacctggccttcagccggagctccttggttagcttaatggaaacattcaacgagaaggctgagcagctggtggagattctagaagccaaggcagatgggcagaccccagtgtccatgcaggacatgctgacctacaccgccatggacatcctggccaaggcagcttttgggatggagaccagtatgctgctgggtgcccagaagcctctgtcccaggcagtgaaacttatgttggagggaatcactgcgtcccgcaacactctggcaaagttcctgccagggaagaggaagcagctccgggaggtccgggagagcattcgcttcctgcgccaggtgggcagggactgggtccagcgccgccgggaagccctgaagaggggcgaggaggttcctgccgacatcctcacacagattctgaaagctgaagagggagcccaggacgacgagggtctgctggacaacttcgtcaccttcttcattgctggtcacgagacctctgccaaccacttggcgttcacagtgatggagctgtctcgccagccagagatcgtggcaaggctgcaggccgaggtggatgaggtcattggttctaagaggtacctggatttcgaggacctggggagactgcagtacctgtcccaggtcctcaaagagtcgctgaggctgtacccaccagcatggggcacctttcgcctgctggaagaggagaccttgattgatggggtcagagtccccggcaacaccccgctcttgttcagcacctatgtcatggggcggatggacacatactttgaggacccgctgactttcaaccccgatcgcttcggccctggagcacccaagccacggttcacctacttccccttctccctgggccaccgctcctgcatcgggcagcagtttgctcagatggaggtgaaggtggtcatggcaaagctgctgcagaggctggagttccggctggtgcccgggcagcgcttcgggctgcaggagcaggccacactcaagccactggaccccgtgctgtgcaccctgcggccccgcggctggcagcccgcacccccaccacccccctgctgagggggcctccaggcaggacgagactcctcgggcaagggccgtgcccgcccacctctgctgcccacggccacccacccttctcccctgccccgtcccctgggccacccttcacgctggcttccagcgggccctctg

SEQ ID NO: 7491 - DNA, 3210 bp, Homo sapiens
  source 1..3210: mol_type = unassigned DNA
ttctgtgacgcacggggtggcgcgcgtgggacccgaggggtggggctgggtttagtaggagacctggggcaaggccccctgtggacgaccatctgccagcttctctcgttccgtcgattgggaggagcggtggcgacctcggccttcagtgtttccgacggagtgaatggcggcggcggctgggatgctgctgctgggcttgctgcaggcgggtgggtcggtgctgggccaggcgatggagaaggtgacaggcggcaacctcttgtccatgctgctgatcgcctgcgccttcaccctcagcctggtctacctgatccgtctggccgccggccacctggtccagctgcccgcaggggtgaaaagtcctccatacattttctccccaattccattccttgggcatgccatagcatttgggaaaagtccaattgaatttctagaaaatgcatatgagaagtatggacctgtatttagttttaccatggtaggcaagacatttacttaccttctggggagtgatgctgctgcactgctttttaatagtaaaaatgaagacctgaatgcagaagatgtctacagtcgcctgacaacacctgtgtttgggaagggagttgcatacgatgtgcctaatccagttttcttggagcagaagaaaatgttaaaaagtggccttaacatagcccactttaaacagcatgtttctataattgaaaaagaaacaaaggaatactttgagagttggggagaaagtggagaaaaaaatgtgtttgaagctctttctgagctcataattttaacagctagccattgtttgcatggaaaggaaatcagaagtcaactcaatgaaaaggtagcacagctgtatgcagatttggatggaggtttcagccatgcagcctggctcttaccaggttggctgcctttgcctagtttcagacgcagggacagagctcatcgggaaatcaaggatattttctataaggcaatccagaaacgcagacagtctcaagaaaaaattgatgacattctccaaactttactagatgctacatacaaggatgggcgtcctttgactgatgatgaagtagcagggatgcttattggattactcttggcagggcagcatacatcctcaactactagtgcttggatgggcttctttttggccagagacaaaacacttcaaaaaaaatgttatttagaacagaaaacagtctgtggagagaatctgcctcctttaacttatgaccagctcaaggatctaaatttacttgatcgctgtataaaagaaacattaagacttagacctcctataatgatcatgatgagaatggccagaactcctcagactgtggcagggtataccattcctccaggacatcaggtgtgtgtttctcccactgtcaatcaaagacttaaagactcatgggtagaacgcctggactttaatcctgatcgctacttacaggataacccagcatcaggggaaaagtttgcctatgtgccatttggagctgggcgtcatcgttgtattggggaaaattttgcctatgttcaaattaagacaatttggtccactatgcttcgtttatatgaatttgatctcattgatggatactttcccactgtgaattatacaactatgattcacacccctgaaaacccagttatccgttacaaacgaagatcaaaatgaaaaaggttgcaaggaacgaatatatgtgattatcactgtaagccacaaaggcattcgaagagaatgaagtgtacaaaacaactcttgtagtttactgtttttttaagtgtgtaattctaaaagccagtttatgatttaggattttgttaactgaatggttctatcaaatataatagcatttgaaacattttctaatagttatgatacttatacatgtgctttcaggaagttccttggtgaaacaattgttgaggggggatctaggtaattggcagattctaaataatataatttccagatagtaattttaagagtactcatcgctcttgccaaataagttcagggtattcaaatcttggactagtcctgcaaggtataaagaataaaaatcccagtgagatacttggaaaccacagtttattattatttatctgggcaattattgtgtgtgtgaggatggaagggtagggaataatcgaacatctaaagccttgaataagagaatactaattgttttggtatgatgatactcagaaatggagatattataggaaaaagaaatcctttggaattttaactaaaatcactgcatatgggaaattaagagatccaggaccatatttgataagagttcctaaaaataatgtaattattaatgctaaagactgctcatgtatcttgatctaattactaaataattacatatttatttacctgataaatatgtatctagttctacaaggtcacatttatgtggaagtccaaagtcaagtccttaggggataattttgttttggctcagttgttccctgcttcctttttttttttttttttttgagatggagtctcgctctgttgcccaggctggagtgcagtggtgcgatctcagctcactgcatcctctgcctcccgggttcaagcaattctctgcctcagcctcccaagtagttgggattacaggcacctgccaccatgcctggctaattttttgtatttttagtagagacgggggtttcactatgttggctaggctggtcttgaactcctgacctcgtgatccacccgccttggcctcccaaagtgctgggattacaggcatgagccaccgcacctggccttccctgcttcctctctagaatccaattagggatgtttgttactactcatattgattaaaacagttaacaaacttttttctttttaaaatgtgagatcagtgaactctggttttaagataatctgaaacaaggtccttgggagtaataaaattggtcacattctgtaaagcacattctgtttaggaatcaacttatctcaaattgtaactcggggcctaactatatgagatggctgaaaaaataccacatcgtctgttttcactaggtgatgccaaaatattttgctttatgtatattacagttctttttaaaacactggaagactcatgttaaactctaattgtgaaggcagaatctctgctaatttttcagattaaaattctctttgaaaaaata

SEQ ID NO: 7492 - DNA, 1729 bp, Homo sapiens
  source 1..1729: mol_type = unassigned DNA
acagagcgcgccgtcgccgctcgagctcgccctgagatccctccgctcagcgccttcaacgccgtgtcccggcaccccgcacccgggcacacaaaaaacgggtcgcccgcgattctcagggattgatcgcctcttcagaaaagtcctccatacattttctccccaattccattccttgggcatgccatagcatttgggaaaagtccaattgaatttctagaaaatgcatatgagaagtatggacctgtatttagttttaccatggtaggcaagacatttacttaccttctggggagtgatgctgctgcactgctttttaatagtaaaaatgaagacctgaatgcagaagatgtctacagtcgcctgacaacacctgtgtttgggaagggagttgcatacgatgtgcctaatccagttttcttggagcagaagaaaatgttaaaaagtggccttaacatagcccactttaaacagcatgtttctataattgaaaaagaaacaaaggaatactttgagagttggggagaaagtggagaaaaaaatgtgtttgaagctctttctgagctcataattttaacagctagccattgtttgcatggaaaggaaatcagaagtcaactcaatgaaaaggtagcacagctgtatgcagatttggatggaggtttcagccatgcagcctggctcttaccaggttggctgcctttgcctagtttcagacgcagggacagagctcatcgggaaatcaaggatattttctataaggcaatccagaaacgcagacagtctcaagaaaaaattgatgacattctccaaactttactagatgctacatacaaggatgggcgtcctttgactgatgatgaagtagcagggatgcttattggattactcttggcagggcagcatacatcctcaactactagtgcttggatgggcttctttttggccagagacaaaacacttcaaaaaaaatgttatttagaacagaaaacagtctgtggagagaatctgcctcctttaacttatgaccagctcaaggatctaaatttacttgatcgctgtataaaagaaacattaagacttagacctcctataatgatcatgatgagaatggccagaactcctcagactgtggcagggtataccattcctccaggacatcaggtgtgtgtttctcccactgtcaatcaaagacttaaagactcatgggtagaacgcctggactttaatcctgatcgctacttacaggataacccagcatcaggggaaaagtttgcctatgtgccatttggagctgggcgtcatcgttgtattggggaaaattttgcctatgttcaaattaagacaatttggtccactatgcttcgtttatatgaatttgatctcattgatggatactttcccactgtgaattatacaactatgattcacacccctgaaaacccagttatccgttacaaacgaagatcaaaatgaaaaaggttgcaaggaacgaatatatgtgattatcactgtaagccacaaaggcattcgaagagaatgaagtgtacaaaacaactcttgtagtttactgtttttttaagtgtgtaattctaaaagccagtttatgatttaggattttgttaactgaatggttctatcaaatataatagcatttgaaacattttctaatagttatgatacttatacatgtgctttcaggaagttccttggtgaaacaattgttgag

SEQ ID NO: 7493 - DNA, 2856 bp, Homo sapiens
  source 1..2856: mol_type = unassigned DNA
atgaaacacgaaaaaagtcctccatacattttctccccaattccattccttgggcatgccatagcatttgggaaaagtccaattgaatttctagaaaatgcatatgagaagtatggacctgtatttagttttaccatggtaggcaagacatttacttaccttctggggagtgatgctgctgcactgctttttaatagtaaaaatgaagacctgaatgcagaagatgtctacagtcgcctgacaacacctgtgtttgggaagggagttgcatacgatgtgcctaatccagttttcttggagcagaagaaaatgttaaaaagtggccttaacatagcccactttaaacagcatgtttctataattgaaaaagaaacaaaggaatactttgagagttggggagaaagtggagaaaaaaatgtgtttgaagctctttctgagctcataattttaacagctagccattgtttgcatggaaaggaaatcagaagtcaactcaatgaaaaggtagcacagctgtatgcagatttggatggaggtttcagccatgcagcctggctcttaccaggttggctgcctttgcctagtttcagacgcagggacagagctcatcgggaaatcaaggatattttctataaggcaatccagaaacgcagacagtctcaagaaaaaattgatgacattctccaaactttactagatgctacatacaaggatgggcgtcctttgactgatgatgaagtagcagggatgcttattggattactcttggcagggcagcatacatcctcaactactagtgcttggatgggcttctttttggccagagacaaaacacttcaaaaaaaatgttatttagaacagaaaacagtctgtggagagaatctgcctcctttaacttatgaccagctcaaggatctaaatttacttgatcgctgtataaaagaaacattaagacttagacctcctataatgatcatgatgagaatggccagaactcctcagactgtggcagggtataccattcctccaggacatcaggtgtgtgtttctcccactgtcaatcaaagacttaaagactcatgggtagaacgcctggactttaatcctgatcgctacttacaggataacccagcatcaggggaaaagtttgcctatgtgccatttggagctgggcgtcatcgttgtattggggaaaattttgcctatgttcaaattaagacaatttggtccactatgcttcgtttatatgaatttgatctcattgatggatactttcccactgtgaattatacaactatgattcacacccctgaaaacccagttatccgttacaaacgaagatcaaaatgaaaaaggttgcaaggaacgaatatatgtgattatcactgtaagccacaaaggcattcgaagagaatgaagtgtacaaaacaactcttgtagtttactgtttttttaagtgtgtaattctaaaagccagtttatgatttaggattttgttaactgaatggttctatcaaatataatagcatttgaaacattttctaatagttatgatacttatacatgtgctttcaggaagttccttggtgaaacaattgttgaggggggatctaggtaattggcagattctaaataatataatttccagatagtaattttaagagtactcatcgctcttgccaaataagttcagggtattcaaatcttggactagtcctgcaaggtataaagaataaaaatcccagtgagatacttggaaaccacagtttattattatttatctgggcaattattgtgtgtgtgaggatggaagggtagggaataatcgaacatctaaagccttgaataagagaatactaattgttttggtatgatgatactcagaaatggagatattataggaaaaagaaatcctttggaattttaactaaaatcactgcatatgggaaattaagagatccaggaccatatttgataagagttcctaaaaataatgtaattattaatgctaaagactgctcatgtatcttgatctaattactaaataattacatatttatttacctgataaatatgtatctagttctacaaggtcacatttatgtggaagtccaaagtcaagtccttaggggataattttgttttggctcagttgttccctgcttcctttttttttttttttttttgagatggagtctcgctctgttgcccaggctggagtgcagtggtgcgatctcagctcactgcatcctctgcctcccgggttcaagcaattctctgcctcagcctcccaagtagttgggattacaggcacctgccaccatgcctggctaattttttgtatttttagtagagacgggggtttcactatgttggctaggctggtcttgaactcctgacctcgtgatccacccgccttggcctcccaaagtgctgggattacaggcatgagccaccgcacctggccttccctgcttcctctctagaatccaattagggatgtttgttactactcatattgattaaaacagttaacaaacttttttctttttaaaatgtgagatcagtgaactctggttttaagataatctgaaacaaggtccttgggagtaataaaattggtcacattctgtaaagcacattctgtttaggaatcaacttatctcaaattgtaactcggggcctaactatatgagatggctgaaaaaataccacatcgtctgttttcactaggtgatgccaaaatattttgctttatgtatattacagttctttttaaaacactggaagactcatgttaaactctaattgtgaaggcagaatctctgctaatttttcagattaaaattctctttg

SEQ ID NO: 7494 - DNA, 2950 bp, Homo sapiens
  source 1..2950: mol_type = unassigned DNA
gctttgtcaaccaagctcaagttaatggatctggatactatgtatataaaaagcctagcttgagtctcttttcagtggcatccttccctttctaatcagagattttcttcctcagagattttggcctagatttgcaaaatgatgaccacatctttgatttgggggattgctatagcagcatgctgttgtctatggcttattcttggaattaggagaaggcaaacgggtgaaccacctctagagaatggattaattccatacctgggctgtgctctgcaatttggtgccaatcctcttgagttcctcagagcaaatcaaaggaaacatggtcatgtttttacctgcaaactaatgggaaaatatgtccatttcatcacaaatcccttgtcataccataaggtgttgtgccacggaaaatattttgattggaaaaaatttcactttgctacttctgcgaaggcatttgggcacagaagcattgacccgatggatggaaataccactgaaaacataaacgacactttcatcaaaaccctgcagggccatgccttgaattccctcacggaaagcatgatggaaaacctccaacgtatcatgagacctccagtctcctctaactcaaagaccgctgcctgggtgacagaagggatgtattctttctgctaccgagtgatgtttgaagctgggtatttaactatctttggcagagatcttacaaggcgggacacacagaaagcacatattctaaacaatcttgacaacttcaagcaattcgacaaagtctttccagccctggtagcaggcctccccattcacatgttcaggactgcgcacaatgcccgggagaaactggcagagagcttgaggcacgagaacctccaaaagagggaaagcatctcagaactgatcagcctgcgcatgtttctcaatgacactttgtccacctttgatgatctggagaaggccaagacacacctcgtggtcctctgggcatcgcaagcaaacaccattccagcgactttctggagtttatttcaaatgattaggaacccagaagcaatgaaagcagctactgaagaagtgaaaagaacattagagaatgctggtcaaaaagtcagcttggaaggcaatcctatttgtttgagtcaagcagaactgaatgacctgccagtattagatagtataatcaaggaatcgctgaggctttccagtgcctccctcaacatccggacagctaaggaggatttcactttgcaccttgaggacggttcctacaacatccgaaaagatgacatcatagctctttacccacagttaatgcacttagatccagaaatctacccagaccctttgacttttaaatatgataggtatcttgatgaaaacgggaagacaaagactaccttctattgtaatggactcaagttaaagtattactacatgccctttggatcgggagctacaatatgtcctggaagattgttcgctatccacgaaatcaagcaatttttgattctgatgctttcttattttgaattggagcttatagagggccaagctaaatgtccacctttggaccagtcccgggcaggcttgggcattttgccgccattgaatgatattgaatttaaatataaattcaagcatttgtgaatacatggctggaataagaggacactagatgatattacaggactgcagaacaccctcaccacacagtccctttggacaaatgcatttagtggtggtagaaatgattcaccaggtccaatgttgttcaccagtgcttgcttgtgaatcttaacattttggtgacagtttccagatgctatcacagactctgctagtgaaaagaactagtttctaggagcacaataatttgttttcatttgtataagtccatgaatgttcatatagccagggattgaagtttattattttcaaaggaaaacacctttattttattttttttcaaaatgaagatacacattacagccaggtgtggtagcaggcacctgtagtcttagctactcgagaggccaaagaaggaggatggcttgagcccaggagttcaagaccagcctggacagcttagtgagatcccgtctccgaagaaaagatatgtattctaattggcagattgttttttcctaaggaaactgctttatttttataaaactgcctgacaattatgaaaaaatgttcaaattcacgttctagtgaaactgcattatttgttgactagatggtggggttcttcgggtgtgatcatatatcataaaggatatttcaaatgattatgattagttatgtcttttaataaaaaggaaatatttttcaacttcttctatatccaaaattcagggctttaaacatgattatcttgatttcccaaaaacactaaaggtggttttattttcccttcatgttttaacttattgttgctgaaaactctatgtccggctttaactatcttctctatatttttatttcattcacattaatgagaagagttttctcagagattaaaaaaggtagtttttctgtcattgttaaatacacattatcactgaaaaaatgtagcttttatgtgatatgttttaaagttaaaactggatggaaatagccatttggaagctttggttatgaaacatgtggagtgtattaagtgcagcttgacattatgttttatttaaatgctttttatcgctaaatgacttgcagatgaaaaaaactaaggtgactcgagtgtttaaatgctgtgtacaacaatgctttgataaaatattttaagtatgagttatcagctctatgtcaattgatatttctgtgtagtatttatatttaaattatatttacctttttgcttattttacaaatattaagaaaatattctaacatttgataattttgaaatgattcatctttcagaaataaaagtatgaatcta

SEQ ID NO: 7495 - DNA, 2202 bp, Homo sapiens
  source 1..2202: mol_type = unassigned DNA
tcattcagcctgggagaccacggtgacattcctgtctgcgctgcgggcaggccagcctctccggccctggactagggggcgccgccgagagaagccgccgcaggctgcagagtcgccgaccgcgctgttcgcaggcagaccccgggctgcccaccgcggcctagcgcgcgccggatggcaggagaagtgtccgcggccacgggccgcttttcgctggagcggttgggcctcccgggcctggccctcgccgcggccctgctgctcctggccctctgcttgcttgtccggcgcaccaggagacccggtgagcctccattgataaaaggttggcttccttatcttggagtggtcctgaacttacgaaaagaccccttaaggttcatgaaaacacttcaaaagcaacatggtgacactttcacagttcttcttggtggaaagtacataacatttatcctggaccccttccagtaccagctagtgataaaaaatcataaacaattaagctttcgagtattttctaataaattattagagaaagcatttagcatcagtcagttgcaaaaaaatcatgacatgaatgatgagcttcacctctgctatcaatttttgcaaggcaaatctttggacatactcttggaaagcatgatgcagaatctaaaacaagtttttgaaccccagctgttaaaaaccacaagttgggacacggcagaactgtatccattctgcagctcaataatatttgagatcacatttacaactatatatggaaaagttattgtttgtgacaacaacaaatttattagtgagctaagagatgattttttaaaatttgatgacaagtttgcatatttagtatccaacatacccattgagcttctaggaaatgtcaagtctattagagagaaaattataaaatgcttctcatcagaaaagttagccaagatgcaaggatggtcagaagtttttcaaagcaggcaagatgtcctggagaaatattatgtgcacgaggaccttgaaataggagcacatcatttaggctttctctgggcctctgtggcaaacactattccaactatgttctgggcaatgtattatcttctgcggcacccagaagctatggcagcagtgcgtgacgaaattgaccgtttgctgcagtcaacaggtcaaaagaaagggtctggatttcccatccacctcaccagagaacaattggacagcctaatctgcctagaaagcagcatttttgaagctttacgactgtcctcatattcaaccaccattcgttttgttgaggaggatttgactctcagttcagagaccggggactactgtgtgcgaaagggagacttggtagccatctttcctccagtcctacatggtgaccctgaaatctttgaagctccagaggagtttagatatgatcgttttatagaagatggtaagaagaaaaccacctttttcaaaagagggaaaaagctgaagtgttacctaatgccgtttggaactggaaccagcaaatgtccaggccgattttttgcacttatggaaataaaacaattgttggttatacttttaacttattttgatttagaaataattgatgataagcccataggactaaactacagccgcttgttgtttggtattcagtatccagattctgatgttttatttagatacaaagtgaaatcttagagaagctaaaaggaaagaaaataaatctatcaaaattaccctaaacatcctaagctcatctatttctttttaatttctgcaaatgtaattgatttatttgtttaaaaagcgctaatttctatttgatctgatatcagtccagtttgtccttagtcacaaagcccatcataatataaaacaggatggtggcaggaaaatggacatcaaaatcaacttaagggtaggctcaaaacagggttgttgttgtttttttagtttctccttgttgtgattttcacctgttataataaatgtaccttcacaccaatagattgggcactgtggaatttaaatcactcaaattgttctctaatatgtaaaattacactttgaactactagaaaattgtgctggaaatggacacagtctaacaaattccaaattctcacagaagaaggaaattgaatttccatgagttacactggatgaaaatgttcccttcaagtataatattaataatacctatat

SEQ ID NO: 7496 - DNA, 3950 bp, Homo sapiens
  source 1..3950: mol_type = unassigned DNA
gaaggtgcaagagctgtctgaaaaggtcagagcaaagcatgaagctggtgagcagctgtgaccatagctggaagcttctctctgagctttctcctggttacctcctcctcccctacgtgaccagtcagccaagtgttaagtccaggggaacattttgctgcttccaagtactgtctcactagtgttatttgccataacttgcggccacagggcaaggtccaggtgctcagacctttacatcctggactttccaaggcctcccaaagctctctggcacccagggaacagtgtgcgtgtcgagagcttaatccgcaggagcatagccatggttctctggggtccagtgctgggagctctgctggtggtcattgctggatacctgtgcctgccagggatgctccgacaacgcaggccatgggagccccctctggacaagggtaccgtgccctggcttggccatgccatggctttccggaagaatatgtttgaatttctgaagcgcatgaggaccaagcatggggatgtgttcacagtgcagctagggggccagtacttcaccttcgtcatggaccccctctcctttggctccatcctcaaggacacacagagaaaactagactttgggcaatatgcaaaaaaactggtgctgaaggtatttggataccgttcagtgcaaggggaccatgagatgatacactcagccagcaccaagcatctgaggggggatggcttgaaggatcttaatgagaccatgctggacagcctgtcctttgtaatgctgacgtccaaaggctggagtctggatgccagttgctggcatgaggacagcctctttcgcttctgctattacatcttgttcacagctggctacctgagcttgttcggctacacgaaggacaaggagcaggacctgctacaggcaggagagttattcatggagttccgcaagtttgaccttcttttcccaaggtttgtctactccctgctgtggccccgggagtggctagaagtgggccgactccagcgtctctttcacaagatgctctccgtgagccacagccaggagaaggagggcatcagcaactggctgggcaacatgcttcagtttctgagggagcagggggtaccctcagctatgcaggacaagttcaacttcatgatgctctgggcctcccaggggaacacggggcctacctctttctgggccctcttgtacctcctgaagcacccagaagctattcgggctgtgagggaggaagctacccaggtcctgggtgaggccaggctggagaccaagcagtcctttgccttcaaactcggtgccctgcaacacaccccagttctagacagcgtggtggaggagacgctgcggctgagggctgcacccaccctcctcaggttggttcatgaagactataccctgaagatgtccagtgggcaggagtatctgttccgccatggagacatcctggccctctttccctacctctcagtgcacatggaccctgacatccaccctgagcccaccgtcttcaagtacgatcgcttcctcaaccctaatggcagccggaaagtggacttcttcaagacaggcaagaagatccaccactacaccatgccctggggttcgggcgtttccatctgccctgggaggttctttgcactcagtgaggtgaagctctttatcctgcttatggtcacacactttgacttagagttggtggaccctgacacaccactaccccatgttgacccgcagcgctggggttttggcaccatgcagcccagccacgatgtgcgcttccgctaccgcctgcatcctacagagtgagcttggccaagccagctgcaaacctggccagaggagttctattgcatctctcacctgttctcacccctctgcagccccaagaccccactggccacccctccctctggtcctgtggcaccccctacctctgttctgcctgtcctcgctctctccccgcctagtcatctgacaggcttatcattctctttaaaataccatctctcagagtgggttctgccgaaccctcctctcacaggaagtccagaggaagggggagtatctgtgggcaacttggtttgggagatgatgcctgccttgagaagtcctgagtacagagactggttccccccagacacgagtaacatggcatcttgcaaacatcagcctccactctcccagcttgctttagttttttcagcaacacttatcccacatcctatggaattcaggttctagaacagtgtcatccaacataaatatgaagcaagctacatgagtagtggggttttttggttttgtttgtttgttttgagacagagtcttgctctgtcgccgaggctgcagtgcagcggtgcgatctctgctcactgcaacctctgcctcctgggtttaagcaattctcctgcctcagcctccccagtagctgggattacaggcacctaccaccttgcccagctaatttagtttcctggtaaacacatttttaaaaagtaaaatgaaacaattcatttttataatatactttacttaatccaatatatccaaaatattggcatttcaacgtgatcactattaaaaattttaacgtaatagtttttaccttccctttttcatcctgtcttcaaagtctggtatgtactgtacttttgcagttcttcccagttcagactagccacattccaagtgcttaattgccgtgtgtggcaggtggctgccctattggatagcacaggtctagagaaatgatacctttttttttttttgagacagagtctcactctgttgcccaggctgcagtgcagtggtgtgatcttggctcactacaacctctgcctcccgggttcaagtaattctcctgcctcaggcttctgagtagctgggattataggtgcgcaccaccacacccggctagtttctgtatttttagtagagacggcgtttcaccattttggccggcctcctcggcctcccaaagttctgggattacaggcatgagccactgtgcccagtcaggatgtctttaatgtaggaatcattcaagatccctcctcagtgcccatgtctcccccacctcagggtgctgtcaaccctcccttggtttccatgatcattgctgaactcagagctttcttctatccccagacccacatgggagtctcccagcacctctgactcagcttggccaatgcagaacttggcatctgaacccctgcctcttccctgaaccactcctcctcctgatttccctgctctctctgctcagaacactaccattcaccccatctcccagagacactctccctcctcctctttcaccttcatacaagcaggcccccgtcctatcagtacacccccctgtgatgcctctgaaatatgtaccctcctcccctctcctactgtcattcttatacctgtgatctctgcgtttctcttctacactgctgccagaggcctttttgccaaaagcactgctgattgtcactcttttactttcctggttcccctttgacttcacacacttgacgtttacattttgtcacagttggtcccccttgccttcacatacctgatgtttaaattttgtcacggttagtctccaaacttctcaactttgccagctttctccaatgaaaccatcagtagagacattgctgttcctgcccatcccagtgccagctactccttcctggaagccttcctggatttcacgcatcccatcctctggccagaaatggcctccgaactgtgcagctcctgcagcaccatttgtatcatagcatatctgttatgtgtcgttgctttctgtgtcttggtttctgcctgctgcccacttccctagactggagcctactggggcatggtattttattcatttctgacctccaattccctaagtggagattaaatgttagaaacctga

SEQ ID NO: 7497 - DNA, 1951 bp, Homo sapiens
  source 1..1951: mol_type = unassigned DNA
cccggcgcgcacagacacacgctccctccctccgcgctctacccctcgcccgcccgccgcgcacgcagccggccccggctcccggcgccccgcgccccgcgccccgcgccccgccaccgccgccgccgagcaaagccgggctgggcttggagctgctcatggagaaagtgccaggcgagatggagatcgagcgcagggagcggagcgaggagctgtccgaggcggagaggaaggcggtgcaggctatgtgggcccggctctatgccaactgcgaggacgtgggggtggccatcctggtgaggttctttgtgaacttcccctcggccaagcagtacttcagccagttcaagcacatggaggatcccctggagatggagcggagcccccagctgcggaagcacgcctgccgagtcatgggggccctcaacactgtcgtggagaacctgcatgaccccgacaaggtgtcctctgtgctcgcccttgtggggaaagcccacgccctcaagcacaaggtggaaccggtgtacttcaagatcctctctggggtcattctggaggtggtcgccgaggaatttgccagtgacttcccacctgagacgcagagagcctgggccaagctgcgtggcctcatctacagccacgtgaccgctgcctacaaggaagtgggctgggtgcagcaggtccccaacgccaccaccccaccggccacactgccctcttcggggccgtaggacccctaactccacccccctccctggcagcacctcgagcagaaggccgagttctgaagaccctccttgacgctccatttctgggtgccaaggaagctggaggaatccctgactcaacttccccgaaggaggcctctgtggcggccagggtccccccctggagctgctgggaggcggcgctggctgcctggatgctgaccccagcgcggcgggcagagcggggcccactcttcttagcttttctactcactgttagagagagacctagctgagcggctggcaggaagcgggacaggtctaggagtcccttagggaataaaccagccccgtttctatcagcccggccagcatgcaggtctccacatcaccatctagagtatcacgcacacatctaccatatatacagatatattctatatacgagctatatataaatatatatatacatatatatatacacacatacatatctagaatgtgtatccgcggcgcccagaagcctcggtttggcccacctgtgagtggggcagggaggggttccggttgtgcagagaacagagtgttctggcaaagaggaaatcccacagcagcgcagaggacctgggcctggaggggcagggctggggcaacccggcttggcggcaaagcccagccccttctcagaccagctccccacattcctgaattccacttccaggcagaaaggagtgggctccccctactccctcagaggaactgactcaccggctgtcctagaatgggcaggggcagagcgaagttctgggtgggatgaccgcactgggggaggggcctcagtccagaaacctcgaccgctagctccacctgccttggccaccagggcagccccgggggatccgggctgctgggcagcaggtcggcgggaccacatgcctgggtctcaccctcagctccgagggccgagggctttccccaccccaccctcctcctggccggcagtcggccctgtctattcatctgcgtcaggcttgccaggggggccccccgtgtgtgccccttggtcacgtgtgtcgtcttcaaggatgttttgctgctgtggctcctgctgtgtcccctcctggcccatcctcatcctcatcttcatcctcatcctcatctgtgcaaccgcccgtcctccttttctagtttctgatgtttgtaaccagacccagctgtgtcattaaacagacccgttcttgctg

SEQ ID NO: 7498 - DNA, 1298 bp, Homo sapiens
  source 1..1298: mol_type = unassigned DNA
cggcgggacgcgagcggcgagccggagcgcggagcccggctcccgcaccatggaggaggacgacagctacgttcccagtgacctgacagcagaggagcgtcaagaactggagaacatccgacggagaaaacaggagctgctggctgacattcagaggctgaaggatgagatagcagaagtagctaatgaaattgaaaacctgggatccacagaggaaaggaaaaacatgcagaggaacaaacaggtagccatgggcaggaaaaaatttaatatggaccctaaaaaggggatccagttcttaatagagaacgacctcctgaagaacacttgtgaagacattgcccagttcttatataaaggcgaagggctcaacaagacagccatcggcgactacctaggggagagagatgagtttaatatccaggttcttcatgcatttgtggagctgcatgagttcactgatcttaatctcgtccaggcactacggcagttcctgtggagcttccggctacccggagaggcccagaagatcgaccggatgatggaggcgtttgcccagcgatattgtcagtgcaataatggcgtgttccagtccacggatacttgttacgtcctctcctttgccatcatcatgttgaacaccagtctgcacaaccccaatgtcaaagataagcccactgtggagaggttcattgccatgaaccgaggcatcaatgatgggggagacctgccggaggagctcctccggaatctctatgagagcataaaaaatgaaccctttaaaatcccagaagacgacgggaatgacctcactcacactttcttcaatccagaccgagaaggctggctattgaaactcggtggcagggtaaagacttggaagagacgctggttcattctgactgacaactgcctttactactttgagtataccacggataaggagccccgtggaatcatccctttagagaatctgagtatccgggaagtggaggactccaaaaaaccaaactgctttgagctttatatccccgacaataaagaccaagttatcaaggcctgcaagaccgaggctgacgggcgggtggtggaggggaaccacactgtttaccggatctcagctccgacgcccgaggagaaggaggagtggattaagtgcattaaagcagccatcagcagggaccctttctacgaaatgctcgcagcacggaaaaagaaggtctcctccacgaagcgacactgagcgtgcagccaagggcgttggtctgcgggggccttggagctcctgctcttctccc

SEQ ID NO: 7499 - DNA, 3311 bp, Homo sapiens
  source 1..3311: mol_type = unassigned DNA
gcgagcgggggcgcgggtggcgcggcgggacgcgagcggcgagccggagcgcggagcccggctcccgcaccatggaggaggacgacagctacgttcccagtgacctgacagcagaggagcgtcaagaactggagaacatccgacggagaaaacaggagctgctggctgacattcagaggctgaaggatgagatagcagaagtagctaatgaaattgaaaacctgggatccacagaggaaaggaaaaacatgcagaggaacaaacaggtagccatgggcaggaaaaaatttaatatggaccctaaaaaggggatccagttcttaatagagaacgacctcctgaagaacacttgtgaagacattgcccagttcttatataaaggcgaagggctcaacaagacagccatcggcgactacctaggggagagagatgagtttaatatccaggttcttcatgcatttgtggagctgcatgagttcactgatcttaatctcgtccaggcactacggcagttcctgtggagcttccggctacccggagaggcccagaagatcgaccggatgatggaggcgtttgcccagcgatattgtcagtgcaataatggcgtgttccagtccacggatacttgttacgtcctctcctttgccatcatcatgttgaacaccagtctgcacaaccccaatgtcaaagataagcccactgtggagaggttcattgccatgaaccgaggcatcaatgatgggggagacctgccggaggagctcctccggaatctctatgagagcataaaaaatgaaccctttaaaatcccagaagacgacgggaatgacctcactcacactttcttcaatccagaccgagaaggctggctattgaaactcggaggtggcagggtaaagacttggaagagacgctggttcattctgactgacaactgcctttactactttgagtataccacggataaggagccccgtggaatcatccctttagagaatctgagtatccgggaagtggaggactccaaaaaaccaaactgctttgagctttatatccccgacaataaagaccaagttatcaaggcctgcaagaccgaggctgacgggcgggtggtggaggggaaccacactgtttaccggatctcagctccgacgcccgaggagaaggaggagtggattaagtgcattaaagcagccatcagcagggaccctttctacgaaatgctcgcagcacggaaaaagaaggtctcctccacgaagcgacactgagcgtgcagccaagggcgttggtctgcgggggccttggagctcctgctcttctcccgcacctccatggatgcactgctgccgagcagagcgtcctctgccaggccccgccctggattcctagagactagcttcagcttttgctattttttttaagtgggagaagggtgggcagttatcactggggaagagaggaccggccacctgtccagcatgggctccagagccttcctctctcacagggcagagctcttgtcggcagggcagcctcctggccagtttctctgctcagtgttctggtagcagagctcagagccaactgtttacctcttggttgtccccgtgaagaagccttcaaaccctgcaccataaatacatgtgtccatatattattatatgttaagagaaaaaggtggaaaggaagagaagccacatactataaagatctatttttttttttttaagagagaacgtagggctgttcaggtgcattctgccctggctgcgctggggagcttctccctggagaagagcacctggggctgcggccaaggggcatcagcctgggcccgcggcagggcctggcctgcctctcctgtgctgtgggagctcgctgcctggtgcttgtctgggcgagatggacaggtgaggtcgaggacgcagagggcagaggcccagtggagcctcagacggcacagtcagagtcgggggcctgccctggccggggtcgcagtcggcagcagcgtgcagtccggcatctcccgcggatgcttttccatcccaagtgcctgcggagcgccgaggagaggagagagctgactggacgcttacgttattttcctccttcagaatccaagttcttgttgggctttaaagtagaaagtcagcattttccttgagctaaatacctaataaccaaaactgtgaggaaggttatcgggacagaggttccggataacctgtttcattttgggttttcttcctcttccccagactccagtcctcgttctagaggaaggagtaggacttccccgatccccgtagggcttcagctttttctgcctcaaaaccagccctaactggactactctggatgcattttgtggtgggccccctagaggggaagatgggcctttatctgctccgtggggtgcactggagtgaggggggtggccgggctgcctctcgcatctctgtcttcccctgcaggcgctgtgtgagctggccctgcccctcctcattacagtatgaagggagccgtgacacgcagcattttcctgccgttctctcagggactctcagggcagctcctgccactccgccagggccagcatgccagtccaggcagagcaggtggctggctgtctggccgtctcgccccgcccctccacaggaccctggaccagggcggtgcagggcgcagccctgaggaggcaggtggaggagctgcgggttttcacagggccgcgtcgccacggctcctctgatcctttagggttggcgagcatctctggaaatagcttttgcagaggagtggtgggaggaatagagggggacagtctgtcacctccctccccgccactttgtgtagatcctacctggagggaatggctttaggcacttttgtgccagagcttgtgagggtgacagaagagggtccaggctggaaacctgaactttctgggtgggagaaccaggtggtgcctgccgaggtctgggcgtgtttgggccggtgctggagcctgtccagctggcccgggccctggcctggttctcaagtgtttcctagacagagaggcacctgggtcagtattagtctatttatcagaggtgtaaataatctatgtatagtttttctccttttagattattttgtatttgtttaaaagaagttttgtcaaaatacaaaaatataaagaaatgactgaaagttgttgacagggtttttaagaaataattattctaattgtttttgtttgtttgtttttgccttgtaaactagcgccaaggaactgcagcaaataaactccaactctgcccaagcca

SEQ ID NO: 7500 - DNA, 1217 bp, Homo sapiens
  source 1..1217: mol_type = unassigned DNA
gcgagcgggggcgcgggtggcgcggcgggacgcgagcggcgagccggagcgcggagcccggctcccgcaccatggaggaggacgacagctacgttcccagtgacctgacagcagaggagcgtcaagaactggagaacatccgacggagaaaacaggagctgctggctgacattcagaggctgaaggatgagatagcagaagtagctaatgaaattgaaaacctgggatccacagaggaaaggaaaaacatgcagaggaacaaacaggtagccatgggcaggaaaaaatttaatatggaccctaaaaaggggatccagttcttaatagagaacgacctcctgaagaacacttgtgaagacattgcccagttcttatataaaggcgaagggctcaacaagacagccatcggcgactacctaggggagagagatgagtttaatatccaggttcttcatgcatttgtggagctgcatgagttcactgatcttaatctcgtccaggcactacggcagttcctgtggagcttccggctacccggagaggcccagaagatcgaccggatgatggaggcgtttgcccagcgatattgtcagtgcaataatggcgtgttccagtccacggatacttgttacgtcctctcctttgccatcatcatgttgaacaccagtctgcacaaccccaatgtcaaagataagcccactgtggagaggttcattgccatgaaccgaggcatcaatgatgggggagacctgccggaggagctcctccggaatctctatgagagcataaaaaatgaaccctttaaaatcccagaagacgacgggaatgacctcactcacactttcttcaatccagaccgagaaggctggctattgaaactcgcaggtggcagggtaaagacttggaagagacgctggttcattctgactgacaactgcctttactactttgagtataccacggataaggagccccgtggaatcatccctttagagaatctgagtatccgggaagtggaggactccaaaaaaccaaactgctttgagctttatatccccgacaataaagaccaagttatcaaggcctgcaagaccgaggctgacgggcgggtggtggaggggaaccacactgtttaccggatctcagctccgacgcccgaggagaaggaggagtggattaagtgcattaagttccaggtcagcccaggagagccatag

SEQ ID NO: 7501 - DNA, 3311 bp, Homo sapiens; identical to SEQ ID NO: 7499
  source 1..3311: mol_type = unassigned DNA

SEQ ID NO: 7502 - DNA, 1510 bp, Homo sapiens
  source 1..1510: mol_type = unassigned DNA
agtttaaccctaatggctacacaggagagaagcggcatgaatagacgggtttcccagggtgcggacggtgctttcccagaaactcccgggctgtgagttcccagtgacctgacagcagaggagcgtcaagaactggagaacatccgacggagaaaacaggagctgctggctgacattcagaggctgaaggatgagatagcagaagtagctaatgaaattgaaaacctgggatccacagaggaaaggaaaaacatgcagaggaacaaacaggtagccatgggcaggaaaaaatttaatatggaccctaaaaaggggatccagttcttaatagagaacgacctcctgaagaacacttgtgaagacattgcccagttcttatataaaggcgaagggctcaacaagacagccatcggcgactacctaggggagagagatgagtttaatatccaggttcttcatgcatttgtggagctgcatgagttcactgatcttaatctcgtccaggcactacggcagttcctgtggagcttccggctacccggagaggcccagaagatcgaccggatgatggaggcgtttgcccagcgatattgtcagtgcaataatggcgtgttccagtccacggatacttgttacgtcctctcctttgccatcatcatgttgaacaccagtctgcacaaccccaatgtcaaagataagcccactgtggagaggttcattgccatgaaccgaggcatcaatgatgggggagacctgccggaggagctcctccggaatctctatgagagcataaaaaatgaaccctttaaaatcccagaagacgacgggaatgacctcactcacactttcttcaatccagaccgagaaggctggctattgaaactcggaggtggcagggtaaagacttggaagagacgctggttcattctgactgacaactgcctttactactttgagtataccacggataaggagccccgtggaatcatccctttagagaatctgagtatccgggaagtggaggactccaaaaaaccaaactgctttgagctttatatccccgacaataaagaccaagttatcaaggcctgcaagaccgaggctgacgggcgggtggtggaggggaaccacactgtttaccggatctcagctccgacgcccgaggagaaggaggagtggattaagtgcattaaagcagccatcagcagggaccctttctacgaaatgctcgcagcacggaaaaagaaggtctcctccacgaagcgacactgagcgtgcagccaagggcgttggtctgcgggggccttggagctcctgctcttctcccgcacctccatggatgcactgctgccgagcagagcgtcctctgccaggccccgccctggattcctagagactagcttcagcttttgctattttttttaagtgggagaagggtgggcagttatcactggggaagagaggaccggccacctgtccagcatgggctccagagccttcctctctcaca

SEQ ID NO: 7503 - DNA, 1551 bp, Homo sapiens
  source 1..1551: mol_type = unassigned DNA
acactcggagcgtctgctagggctgcagctctgcgcgtccatctctgcgctctgcgccagccttccccaccgggcccagcgagtttccacctgcagggccggtgctctcagcttttgttttctctggacaccttcttctctacccctgctgtgctggctgacattcagaggctgaaggatgagatagcagaagtagctaatgaaattgaaaacctgggatccacagaggaaaggaaaaacatgcagaggaacaaacaggtagccatgggcaggaaaaaatttaatatggaccctaaaaaggggatccagttcttaatagagaacgacctcctgaagaacacttgtgaagacattgcccagttcttatataaaggcgaagggctcaacaagacagccatcggcgactacctaggggagagagatgagtttaatatccaggttcttcatgcatttgtggagctgcatgagttcactgatcttaatctcgtccaggcactacggcagttcctgtggagcttccggctacccggagaggcccagaagatcgaccggatgatggaggcgtttgcccagcgatattgtcagtgcaataatggcgtgttccagtccacggatacttgttacgtcctctcctttgccatcatcatgttgaacaccagtctgcacaaccccaatgtcaaagataagcccactgtggagaggttcattgccatgaaccgaggcatcaatgatgggggagacctgccggaggagctcctccggaatctctatgagagcataaaaaatgaaccctttaaaatcccagaagacgacgggaatgacctcactcacactttcttcaatccagaccgagaaggctggctattgaaactcggaggtggcagggtaaagacttggaagagacgctggttcattctgactgacaactgcctttactactttgagtataccacggataaggagccccgtggaatcatccctttagagaatctgagtatccgggaagtggaggactccaaaaaaccaaactgctttgagctttatatccccgacaataaagaccaagttatcaaggcctgcaagaccgaggctgacgggcgggtggtggaggggaaccacactgtttaccggatctcagctccgacgcccgaggagaaggaggagtggattaagtgcattaaagcagccatcagcagggaccctttctacgaaatgctcgcagcacggaaaaagaaggtctcctccacgaagcgacactgagcgtgcagccaagggcgttggtctgcgggggccttggagctcctgctcttctcccgcacctccatggatgcactgctgccgagcagagcgtcctctgccaggccccgccctggattcctagagactagcttcagcttttgctattttttttaagtgggagaagggtgggcagttatcactggggaagagaggaccggccacctgtccagcatgggctccagagccttcctctctcacagggcagagctcttgtcggcagggcagcctcctggccagtttctctgctcagtg

SEQ ID NO: 7504 - DNA, 2260 bp, Homo sapiens
  source 1..2260: mol_type = unassigned DNA
agaggtcacatgggctctttctgctttgctacttttgattacttgtcacagttgtacttttagcttcccccatcctgcaaggccactcaaccatgtgctagctggagtgatctttattcacaatgtctttacaaaggctcctgcaacacagcagcaatggcaatttggcggacttctgcgctgggccagcgtatagctcttactccacactcaccggcagccttacgatggacgataatagaaggattcaaatgctagcagacacggtggctactctgcctcggggacgaaagcagcttgctttgaccagatcaagttctttaagtgacttttcctggtctcaaagaaagcttgttactgtggagaagcaggataatgaaacatttggatttgaaattcagtcttacaggccccagaatcagaatgcctgctcctcggaaatgttcactttgatatgcaaaatacaggaggacagcccagctcactgtgctggcctgcaagctggtgatgtccttgcaaatatcaatggtgtgagcacagaaggttttacctacaaacaagtcgttgacctgatcagatcgtccggaaacctgctaacgatagagactcttaatggaacaatgattctgaaaagaacggagcttgaagcaaagctgcaggttttaaagcaaactttgaaacaaaaatgggtggagtacagatctctgcagttacaggaacatcgtctgcttcatggtgatgcagctaattgccccagtttggaaaacatggacttggatgaattgtctttgtttggacccctgcctgggccaggcccagcccttgtggaccggaatcgattatccagtgagagcagctgtaagagctggctgagctccatgacgatggacagtgaagatggctaccagacgtgtgtgtctgaggactccagcaggggtgccttcagtcggcagacgagtacagatgatgagtgctttatccccaaggagggggatgattttctgaggaggtcatcttcaaggaggaaccggagcatcagtaacaccagcagcggatccatgtctcccttgtgggagggcaacttatcaagcatgtttgggaccctgccccggaagagcagaaagggaagtgtccgaaagcaactcttgaaatttatccctggccttcatcgtgctgtggaagaggaagaaagtcgcttttgacggattgtggtgtcctttcaaattagcttatttcacaaatatctctagactcacccagatcccagcttggtgggaaagtgcagaagaattgcaaaactgacatcccatttcacagcaatagtgacctttatttaaattgttgtgttatagtttatgcttcttaaatcatttttcaacctaaacagccaatttctaagcagacaggaaaactaaataataagttaattaatataacaaagatgcaggttcctgctcattccagtaatgtctttgaaagcaaaactaatatttattttctagattatccctgtgaataattgagaactttttggagtcaagtatgaataaaggtgtggcagaatataataatctggactattttctataggataattgctgggttataaaatcttaggtttgcttatgcccagtagctcctgcggaggcttaataataggcaattttgaatttgttcaaacctgtaatggcttgtaaacaaagatgaccatcagctgtttctcacatctatagtgacaataaagcgggaagtataagatttaataggaggggttaaggttcatgagaaccatggaaagatgtggtctgagatgggtgctgcaaagatcataataaagtcatttttatagacagtctaaacaaaatgggtggggatgtcgtgttttttgcccaattcagcttttgttctgcctgaacattaatggcaagtctagaactctccgaatcctacagctttgtaattttttttctacaaatgtctaacatccaaaactgagggttgggaaaaggacttccctcctgtagtttttttcatattacttctcactttatatcttatattctaaatagctatcacctcagcagtcttttgcctattggttatgttagtatcacattacttctagcctttcaattactccatgttttatttaatatccattgaagtctatgaattctctgttctggtggcacagctattcataacctatattctagagtagacaatctggactatgtaataaatagtctgctgattttaa

SEQ ID NO: 7505 - DNA, 1464 bp, Homo sapiens
  source 1..1464: mol_type = unassigned DNA
ctttactgcctctctccagccagctccagcactacaggacagagattggaattaaatgtcacgtggaaaaaagccaacatggcattctgttaagaagatagacaacctaagtgacgtctatcctgcttcaaagacaaaactcaggaggctgtacattcatttagagcagagtagacgaaacctcctattctctggcttgggaaccaggaggaatcactgactgagatttgccaaccagacctctatgaagtgagctctatcacatggtacgtttatgagaagaggaaccagcaatgtttccttccatcttcaactatactaacaagatccatctgatgtcttgctttgaccagatcaagttctttaagtgacttttcctggtctcaaagaaagcttgttactgtggagaagcaggataatgaaacatttggatttgaaattcagtcttacaggccccagaatcagaatgcctgctcctcggaaatgttcactttgatatgcaaaatacaggaggacagcccagctcactgtgctggcctgcaagctggtgatgtccttgcaaatatcaatggtgtgagcacagaaggttttacctacaaacaagtcgttgacctgatcagatcgtccggaaacctgctaacgatagagactcttaatggaacaatgattctgaaaagaacggagcttgaagcaaagctgcaggttttaaagcaaactttgaaacaaaaatgggtggagtacagatctctgcagttacaggaacatcgtctgcttcatggtgatgcagctaattgccccagtttggaaaacatggacttggatgaattgtctttgtttggacccctgcctgggccaggcccagcccttgtggaccggaatcgattatccagtgagagcagctgtaagagctggctgagctccatgacgatggacagtgaagatggctaccagacgtgtgtgtctgaggactccagcaggggtgccttcagtcggcagacgagtacagatgatgagtgctttatccccaaggagggggatgattttctgaggaggtcatcttcaaggaggaaccggagcatcagtaacaccagcagcggatccatgtctcccttgtgggagggcaacttatcaagcatgtttgggaccctgccccggaagagcagaaagggaagtgtccgaaagcaactcttgaaatttatccctggccttcatcgtgctgtggaagaggaagaaagtcgcttttgacggattgtggtgtcctttcaaattagcttatttcacaaatatctctagactcacccagatcccagcttggtgggaaagtgcagaagaattgcaaaactgacatcccatttcacagcaatagtgacctttatttaaattgttgtgttatagtttatgcttcttaaatcatttttcaacctaaacagccaatttctaagcagacaggaaaactaaataata

SEQ ID NO: 7506 - DNA, 4607 bp, Homo sapiens
  source 1..4607: mol_type = unassigned DNA
atacctacaccggctttttgtacgactgttggccctggagaacgatcctttggtggcgagggcggggaggacgaaagcgcccactgtggattggacagtgtcaaaaagaggggcggtccctactgaaggggcggttgggcgacgaagggaagagtcttttcagcgctgaggactggcgctgaggaggcggcggtggctcccggggcgtttgagcgggctcacccgagcccgcgggccaacgcggatccaggcccgactggcgggaccgccccggattccccgcgggccttcctagccgccatggaggacggcgtctatgaacccccagacctgactccggaggagcggatggagctggagaacatccggcggcggaagcaggagctgctggtggagattcagcgcctgcgggaggagctcagtgaagccatgagcgaggtggaggggctggaggccaatgagggcagtaagaccttgcaacggaaccggaagatggcaatgggcaggaagaagttcaacatggaccccaagaaggggatccagttcttggtggagaatgaactgctgcagaacacacccgaggagatcgcccgcttcctgtacaagggcgaggggctgaacaagacagccatcggggactacctgggggagagggaagaactgaacctggcagtgctccatgcttttgtggatctgcatgagttcaccgacctcaatctggtgcaggccctcaggcagtttctatggagctttcgcctacccggagaggcccagaaaattgaccggatgatggaggccttcgcccagcgatactgcctgtgcaaccctggggttttccagtccacagacacgtgctatgtgctgtccttcgccgtcatcatgctcaacaccagtctccacaatcccaatgtccgggacaagccgggcctggagcgctttgtggccatgaaccggggcatcaacgagggcggggacctgcctgaggagctgctcaggaacctgtacgacagcatccgaaatgagcccttcaagattcctgaggatgacgggaatgacctgacccacaccttcttcaacccggaccgggagggctggctcctgaagctggcagggggccgggtgaagacgtggaagcggcgctggtttatcctcacagacaactgcctctactactttgagtacaccacggacaaggagccccgaggaatcatccccctggagaatctgagcatccgagaggtggacgacccccggaaaccgaactgctttgaactttacatccccaacaacaaggggcagctcatcaaagcctgcaaaactgaggcggacggccgagtggtggagggaaaccacatggtgtaccggatctcggcccccacgcaggaggagaaggacgagtggatcaagtccatccaggcggctgtgagtgtggaccccttctatgagatgctggcagcgagaaagaagcggatttcagtcaagaagaagcaggagcagccctgaccccctgcccccaactccattatttattacggagctgccccgcctgggtggccggacccctgggccttggggctgtggatcctggttccctgtttggaaaattcaccacctctagctcctcactgttctttgtaattaacacgctgttggtaatcttattaattatttaaccacttggcctgctgaccccctcatttcttggggttgacagagtcgaggtgctccgtggagccagcctgtttccctggacaggggcctggacccgcctgtctctgggtgctgcctgggctgtcccggtgggtctgttctggtttcaccccgagcccagcaggagtggagtaaagggagaaggttaatatggtgggagtctggagttggaattggccggggacagagtttagaatgcagggattcagggtcaaggtctagcattcattctagaagttacttgacagccatcagccagttacgctacagccatcagctagttcccatcgttgctttcatggggcttgaggtctttgaggggcaggagatgaagctggtgaggttgtgagctgggccagggctttgaggacaacctggagctggaagaacatgcgaccacctcagggagggtcagggaaggatgagtggggaggtggcccatgtcctgcaagggccttgctgatgggatgtcctgaagggctgggcagccttagatcgggctaagagggcaggactgtgggccagtgccagagccaggcttgtctgttctcaaaggatcagcctcctttggaggacattttgtgtcaaggatagggctgaggacctgcgttctgaacgtctttcctgggattcttgacagccaaagaaattcgaggatcgcctctatgaaggtgaagtcttggcatgtggggtacccctgaatcctgggctaaggtctgtgaccttttgccctccagttggggtatgtgtggtgtccccaaagaacaagggctcgtggatcccgagcagggtgcgatggcggattgggaggtcccatgtcactctcccatgcccgcctttgaagctgaggcgctctttagttaacaaactacaagtcccagcagggaccgggacgcgggtgggagaggcgcctgtggccccgaggcgtgccgcgagttgtagtccctcctgcccgctgtgttcgcttttgagctctccgatgggatgcggcgcttcggaatttcgggctttgatccctgtcccgcccttggccacaggcacctgccggcctgaaggcccccgcggtgggggtaccctgcgcccctccgcgggaaggtggactacagttatcggcaggctgtgcggcgccaaagccacggtgacccagacccgaggtttttccgggcgtcgcagtttcccgagactccgtggcggcgtttgtcttctttttcttagtcagatcccgtacttttgtggagggtagaggaggctttgaccgccgcggccccgggggctggtgggaaatggagttccaaatgagaaaatagaattccccacttctctttcccacaggtgccagggaaacggagtcatcgacccaagaaggtcgtgggagatgaggtcccagggtaaacagcgggtcccgccactatgtcaccctttcctgccgcctccccggatgaactgcatgcagggcggccggctccgtggcaggcagaggcaggaagaggcgcggagcccgctggtggcgaagaggggagtgcggcgggaggggagggcagaggcaggcggccggtcgcgtggggcctgggccgccccaggagggcctctggctggattcttagcagatggaagccgtgcaagggcaggaggcaggggcctgacgtgtttggattgaggttgcaggaggggcccctggctgcttcagggagaataatttggaggcgagcggggaggtgagaggaagctgtgcggtgcaggatggcgtggctgtggaggtggagaacgttgggccacgctaggagtcttgaaagaggagccaaaaggacttgctgagagccgccgcagctggtgaatgacggtgccatgactgaggtggtcgaaagggagtatttaaggggaaatcaggcattccgttttgaccaaattaagctggagatgcctgtggaacattccagccaggctgcatcacgtcacactgaccttcagcattgcccacagtccatcttcccccaggacctgaggattttgcgtccggctccctcctcgcccaggacccccaagctcccagcacgcttctgattttttttgtaggtttttttttttgttttttgttttgttttgttttgtttttgagagggagtctcactttgtgccctagactggagtgcaatggcgccatctcggcttactgcaacctccacctcccaggtgcaagcgattcccctgcctcagcttcccgagtagctgggattacagatgtgagccaccgtacccagctaatttttgtatttttagtagagacggggtttcaccatattggccaagctggtctcgaactcctgacctcaggcgatccatctgtctcagcctcccaaagtgctgggattacaggtgtgagccaccgcgccaggcctcagcccacttcttttgggtggcaatggtttggatatcgtttgtcctcactaaaattcatgttgagattcgagccccagtgtggcaggtgttgggatgtggggcctcataaggagctgtgtggtcttggaggtggagtcctcatggatagattaatgcctgccttaaggggtgagtgagtgctcacccttgggaatttgggaatttggttttctctcccttgcttccttcagcaccatgtgatctctgtgcacacagctgcatccttctgccctcccccagaagcagcagcagcctcagggatgagggaggtcctcagtgagtgcacctgcccagtcttgaaccttccagccatcagaatctgagccaaatcaacctcttcctttataaagacccagcctcaggtcttctgtcagagcaacacaaaatggactcagcacggatcaaattgtgtctcccccacccccacaaaaaactttatattaaaatcctaacccccagca

SEQ ID NO: 7507 - DNA, 1848 bp, Homo sapiens
  source 1..1848: mol_type = unassigned DNA
cctttgagcaggcgcagaggtggctgtaccgcgtggctccgcctccgcgcgacacttttccggggcttctcattggagagcaagcctgtcaagtgctttctgttgtttcggaggcggggcctgctgccctgcctgcactccgattggccccgcgggccgtctacctctggccggacatacctacaccggctttttgtacgactgttggccctggagaacgatcctttggtggcgagggcggggaggacgaaagcgcccactgtggattggacagtgtcaaaaagaggggcggtccctactgaaggggcggttgggcgacgaagggaagagtcttttcagcgctgaggactggcgctgaggaggcggcggtggctcccggggcgtttgagcgggctcacccgagcccgcgggccaacgcggatccaggcccgactggcgggaccgccccggattccccgcgggccttcctagccgccatggaggacggcgtctatgaacccccagacctgactccggaggagcggatggagctggagaacatccggcggcggaagcaggagctgctggtggagattcagcgcctgcgggaggagctcagtgaagccatgagcgaggtggaggggctggaggccaatgagggcagtaagaccttgcaacggaaccggaagatggcaatgggcaggaagaagttcaacatggaccccaagaaggggatccagttcttggtggagaatgaactgctgcagaacacacccgaggagatcgcccgcttcctgtacaagggcgaggggctgaacaagacagccatcggggactacctgggggagagggaagaactgaacctggcagtgctccatgcttttgtggatctgcatgagttcaccgacctcaatctggtgcaggccctcaggcagtttctatggagctttcgcctacccggagaggcccagaaaattgaccggatgatggaggccttcgcccagcgatactgcctgtgcaaccctggggttttccagtccacagacacgtgctatgtgctgtccttcgccgtcatcatgctcaacaccagtctccacaatcccaatgtccgggacaagccgggcctggagcgctttgtggccatgaaccggggcatcaacgagggcggggacctgcctgaggagctgctcaggaacctgtacgacagcatccgaaatgagcccttcaagattcctgaggatgacgggaatgacctgacccacaccttcttcaacccggaccgggagggctggctcctgaagctggggggccgggtgaagacgtggaagcggcgctggtttatcctcacagacaactgcctctactactttgagtacaccacggacaaggagccccgaggaatcatccccctggagaatctgagcatccgagaggtggacgacccccggaaaccgaactgctttgaactttacatccccaacaacaaggggcagctcatcaaagcctgcaaaactgaggcggacggccgagtggtggagggaaaccacatggtgtaccggatctcggcccccacgcaggaggagaaggacgagtggatcaagtccatccaggcggctgtgagtgtggaccccttctatgagatgctggcagcgagaaagaagcggatttcagtcaagaagaagcaggagcagccctgaccccctgcccccaactccattatttattacggagctgccccgcctgggtggccggacccctgggccttggggctgtggatcctggttccctgtttggaaaattcaccacctctagctcctcactgttctttgtaattaacacgctgttggtaatcttattaattatttaacc

SEQ ID NO: 7508 - DNA, 4505 bp, Homo sapiens
  source 1..4505: mol_type = unassigned DNA
ggaggaggcccggccgcgacccgggccgcgcgctgaggagccgcccggtcgcctgcgcgctccctccggcggcgtccccagcccgcggcccctctgctgccggcccccggctcgccggctgcgggagtggcctcaagatggatgaagacggcggcggcgagggtggtggcgtgcctgaagacctctcattagaagagagagaagaacttctagacattcgtcgaagaaaaaaggaacttattgatgacattgagaggctgaaatatgaaattgcagaggtgatgacagagatcgacaatctaacttccgtagaggagagcaaaacgactcagaggaacaaacagatagccatgggaagaaagaaattcaacatggatcccaaaaagggaattcagtttctaatagaaaatgacctgctacagagttccccagaagacgtcgcccagttcctttataaaggagaaggcctaaataagaccgtcattggggactacctgggtgaaagggatgaatttaatattaaagttcttcaagcctttgttgaactccatgagtttgctgatctcaaccttgtacaagccttaaggcagttcttatggagcttcaggctgcccggggaggcgcagaagattgatcgcatgatggaggctttcgcttctcgctactgcctgtgcaaccccggggtcttccagtccacagacacgtgctacgtgctgtcattcgccatcatcatgctcaacaccagcctccacaaccacaacgtgcgtgacaagcccacggcagaacggttcatcgccatgaaccgcggcatcaacgagggcggggacctccctgaggagctgctgaggaatttgtatgagagcattaagaacgagccatttaagatcccggaggacgacgggaacgacctgacccacaccttcttcaaccccgaccgcgagggctggctcctgaagctgggagggcgtgtgaagacctggaagcgccggtggttcatcctgaccgataactgcctctattactttgaatacacaacagataaggagcccaggggaatcatcccgttggaaaacctcagcatcagggaggtggaggacccccggaaacccaactgttttgagctctacaatcccagccacaaagggcaggtcatcaaggcctgtaagactgaggccgacggccgcgtggtagaggggaaccatgtggtgtaccggatctcagccccgagcccggaggagaaggaggagtggatgaaatccatcaaagccagtatcagcagagatcccttctatgacatgttggcaacgaggaaacgaaggattgccaataaaaaatagctttcctggctaaaagacccaggtaaaagacccaaccccagcagaaagacaccgcgggcggcccctccgcggaaggcgtggcagggaggcagtcgccctgcggtgcaagctgctgctccagagcataccgtggcccaggtggtatccccaaggcctcgtgccgtggctggggtcctgggaggtggtcgccctgcagtgcaagctgctgctccagagcgtaccgtggcccagactgatcctcgaggcctcctgccgtggctggggtcatggtcggctgcgcatgtccagaagcatttccttcctgcgaccatcccggcgcccctagggggagaagccaggacagcagcttccgctgtctccacagcagacacgggacggattccacagacgggagcctcattcgtaccatgccaaacgcattcactcggggcagtattaaccgttctagaaagccactgttttatagcaaaacaggaaaggaaaagctaccagttttttattcagaatttttctcagatatataggattatagcttttatatgcctttttatattctgaaattataacaaaagatactttctaacagtagtatttttagaatggcagctataaagttaactcctggacacaagtatatactgtgcactgaaaaaatatccatctacacagcacccaaggggagggctgggggcaccggcacgggggcagcgtgcagccctgccctgtcaggctgtcagacaagccccggggggcagcaggtgggctcgggacgggctgggggagggacggccatggcacttgggggctccagggtgactcccatgaggcctcccttcaaccaggctttttggccccacaaatactttaagcaaatcattaaaattataacagttaatggtttgggggtgtttaggctgtaactgctaactcctaggaaacagccttttccctggacacagatggtccatacgctgagccacgtgaaactgctgatgttttgtttagatgcacacacatggcagcgtttcatacaggtcagcaggttagaccggcttttgaccatattcatcgctatttaaaacctgtggcaaaatgaacgcttattttacagactttctaatttgaccagatttcttaatgaatagacacagaattaactaaaaacagtctcaccccatgtagtgcgccgtgtcctgagagaggtgccctccctacgaggagggaagaacaggccctggggtgcagaggcccggcacgtagagaacccagatagacgccggtggtggaactggtcaaactccacgcccgcctgggaggttgtcaggttgctgtggatgtaaggataggaggtgcccagtgctccgctcaaggaaggctggatctgggccccacctacagagagggctcagggctggaccgggggcattgtgtgcttgggccgacccgggccggtggcagacgctgttctctgtcgggagatttgcgtccccaggaccctgttacacagtgggctgttgggttggtggctggcttttcctctatggacttcctcttcctgccccacctgcataggcacacacaccttgaatctgcaccctctggagggcatctgtactcctgtgcaaaatgcccagtccagagacaaaacctcagactttgtgcacctaggtttccttctcagcagcggagactgttctttgagttgccttgaagtggaggccgagcggctgcgggcccttcgcctccctgcggctgaccttgatgtagctttaagtcacactagactgcagaggggtccgaggccagaaacccctgtcctgcatcagactttcattcccacgttcttaggctttgttactgatacctcaaatcggaagttttagttctgagaaaggcaagtcagcgttcttgaaatgcctgactggtagatatgcaactctggcctccagtcttccatgaaaataaatgctgcctggacccccacccagaccacacactgacggccggctccggcggtgcccacccctcaggctggcccggcacccaagactggccacagccagctctgtcagcatgttgtgctcggacaagctgtttccttcttctgaccaacccaggtgtgacctggggatgcagagctttctgttttgggtgttgggagaagcagcaggaaggagtcgccagatgatcaagctccccctttgctgtcatctgtgaatgagcttcgccaggtggtgggcacctgggagccatgcagaggctgtggtgctgagttagactccaggtactttgtggtcaaaggaaatcgcctagctccaggctgtgttaggacagtattagcatgaaggctgtgcgaccatcatgcctgctgatccttgaggcaggcctggtccagaaaactctgggtcagtgactgcgcagggccagccgctaccaggacggccctgaaacaggacacatctgttttttgtccctcaccctgggcaggccgcgtcacaatcacagtcctcctcctccccaccctgacgtctgagcgcagggcttgaattgttagtcccaactctggccaaagatacttttttccagagacagaggccaggaggcagtgaggggagccccgcggggaggcggcggcgactgccacagcccttccagcctgtcttgctggccgccctggttcatatttgagtttaattgtactgaccctggacccagataagcagcaactttgtgtctttggggtcacagaacattttggggcagtttaatgtggtaccaaactgaaaataggagctatttatagatggagcagcacttagtgcttcatagaaagcaatgcctatttttaaagttacaaacgcagatatctacatagatatgctttgctgagaagttaggtctgtggtagaccagaaaccacaaattgactttttttcttagaaaatatttctatttgcggtaaatatagtaatatgtaaataatgtacatctgttgatttctggagtgtctgttattcaatgatgtatatactcccacagctcgcatgaaggaacagcctctattgatacttggttgtaaagtgaagtaagattggagggtggatggctgtcagagctcttgcagatactgtgttcactaaataaaaatcacatgtattgttaaaacaa

SEQ ID NO: 7509 - DNA, 1171 bp, Homo sapiens
  source 1..1171: mol_type = unassigned DNA
agcactcagcagcatccgggggagaggaggcagggcttctggtgggagtcgcctcagccggcccttggactaagaaaatcaggccgcacctcgtcatcttctcaaatcttcggcttcataccttgttctcgtttacgtggactgtttgctcatggccttacctcaactgcagactgcaatgttggcagcgtttttgtgggaccctcgtgatgttgtgctcacagcgcagcctggggctgaacagtgcgctgagagttcgcaacatataagaatcctgcagccgcagttcaggcttatcagattgcgtttctggaagctgtacatccagagaagggtgcaggcctggcagttcttatggagcttcaggctgcccggggaggcgcagaagattgatcgcatgatggaggctttcgcttctcgctactgcctgtgcaaccccggggtcttccagtccacagacacgtgctacgtgctgtcattcgccatcatcatgctcaacaccagcctccacaaccacaacgtgcgtgacaagcccacggcagaacggttcatcgccatgaaccgcggcatcaacgagggcggggacctccctgaggagctgctgaggaatttgtatgagagcattaagaacgagccatttaagatcccggaggacgacgggaacgacctgacccacaccttcttcaaccccgaccgcgagggctggctcctgaagctgggagggcgtgtgaagacctggaagcgccggtggttcatcctgaccgataactgcctctattactttgaatacacaacagataaggagcccaggggaatcatcccgttggaaaacctcagcatcagggaggtggaggacccccggaaacccaactgttttgagctctacaatcccagccacaaagggcaggtcatcaaggcctgtaagactgaggccgacggccgcgtggtagaggggaaccatgtggtgtaccggatctcagccccgagcccggaggagaaggaggagtggatgaaatccatcaaagccagtatcagcagagatcccttctatgacatgttggcaacgaggaaacgaaggattgccaataaaaaatagctttcctggctaaaagacccaggtaaaagacccaaccccagcagaaagacaccgcgggcggcccctccgcggaag

SEQ ID NO: 7510 - DNA, 3202 bp, Homo sapiens
  source 1..3202: mol_type = unassigned DNA
tgtcaaaagcctgcacacgagacccccgtgggccaggactgacttcctccccacacagggctgggcggggcaagcaggaaggagcctgttacagtcaaggtgacgcatccttgccgggccagcccgaacagcagctgggtcggcaagcgacaggagcacgggtcatcttttccccagaggcgtcggaatggacctgtgccacccagagcccgcggagctgagcagcggggagacggaagagttacagaggatcaagtggcaccgaaagcagctcctggaggacatccagaagctgaaggatgagattgcagatgtgtttgcccaaatcgactgcttcgagagtgcggaggagagccggatggcccagaaggagaaggagctgtgtattgggcgcaagaagttcaacatggaccccgccaagggtatccagtatttcattgagcacaagctgctgacccctgacgtccaggacattgcacggttcctgtataaaggcgagggcctcaacaagacagccattggtacctacctgggggagagggatcccatcaacctgcaggtcctccaggccttcgtggactgccacgagttcgccaacctcaacctcgtccaggccctcaggcagttcctgtggagcttccggctgccgggcgaggcccagaagatagaccggatgatggaggcctttgccactcgatactgcctctgcaacccaggcgtcttccagtccacagacacctgctacgtgttgtccttctccatcatcatgctcaacaccagcctccacaatcccaacgtccgggacaggccgccttttgagcgctttgtgtccatgaaccgcggcatcaacaatggtagcgacctgcccgaggaccagctgcggaacctcttcgacagcatcaagagtgagccattctccatccctgaggacgacggcaatgacctcactcacaccttcttcaatccagaccgggagggttggctgctcaagctagggggccgcgtgaagacgtggaaacggcgctggttcatcctgaccgacaactgcctctactacttcgagttcaccactgacaaggagccacggggaattatacctcttgagaacctctcggtgcagaaggtggatgaccccaagaagccattctgcctggagctctacaaccctagctgccgaggccagaaaatcaaggcctgcaagaccgatggcgacggcagggtggtggagggcaagcacgaatcgtaccgcatctcagccaccagtgccgaggaacgtgaccagtggatcgagtccatccgagccagcatcacccgtgtccccttctacgacctggtctctactcggaagaagaagattgccagcaagcagtgagattcctggaggtggcactgggggctggtcaccctgagagtcccatcgcctgcagcacctggagacccacctcccaccccagtgcactcttttgggccacagacatcattgctgttccccgttacctcgagctgactctagaggggaaggcagagctcaggagggtgggtgggagctgcagtgggctcagagtccagcaatgaggccccctggcctgggcacccagctgcaggcccctgccctacgtgcactacaggaaggggtgaggagagcagccagaggaaaaccagccccagaatgctgcaacttctcttctctctggacttcggtgtcctcggctctgaaggcgctctctgcacttagatgctgtcagccctcaacgtaggaggggccgtggggtccctaagtgattcttctccctggcaaggctcttccttttcagggatatctctgccaacccctcccctgtcctcgggttgggcttggccctctctgcctgagagagctcagcacacacacagctcagacccacggacaggaccccgggacagaaccccgggagcactgccctaggagcccggaccccacgagctcagtcccagctctgcctctgactcgctgtgtgccctctgccaagtcatgcccattctctagttcttgcaaaactgcagtgtttggactagaaacgtattggcccctgctagccctgtgctccagcttccagctggagatggcagccgttgtttgcggagcccaggctgactccggattcaacgttgctggggagagaaaagcagtatagactccaccttccaggatgtccatttcggggagaggagcaggtgggaccctcaagaaaatgacggagaacatcccagacagatgggactcaagcaggatgggtgctatatccaagaagccaagaagggagagtttcgtgcactgtggttaacaggagggctgcctggaggcagtggctgagccagaaagtaacacagagctcatgcttggagagagagagtcttggccatggctttcctgcaagaccactgacgagcagtcccatggtgataaagggcagcccggcgggtcccagcatctcgagaccctctgcagaagtattatcagagtagagctgacttccagtacccgggcagccagctctgtctccagggaggcctggcctggaggaggagtccactaacaggaaacacttctcaccccctcacacaggcccaggggagcccctggagggaaattccttggcaggggaacaggaaatgtggccgcctctgccccactgccagcctgagtgggcaaggaagcaggtggatcccccagaaggaaccgcagctcgcgaggcacctctcctcgtccccacccacccccacatttgcacaccttccacagggtcaggatggagtagctgccttgcgaggtggtgagactcctgtctctggaggtctgcaagcactggtagtgatattgcagcagacaaggtctgggttgggcgtctgcaggaggacaccttgtgggacatctgaggacatccgcagattcttgtcagcctgtgaactaggccctgcctctgtcacctcattggtccatgaaggagcagccaggggtggtggaaggagcactgggctaggggtcaggggtcagagattctgtcctgctcctgggatgcactggctactcccttagtctactcccttcccctctctggtcctcagcttcctccatcatggaggagatgggatcatggattttctgggcataagtggctgttctgggagtcattccaaagagagaataaaactcctgatccaa

SEQ ID NO: 7511 - DNA, 636 bp, Homo sapiens
  source 1..636: mol_type = unassigned DNA
gcatccttgccgggccagcccgaacagcagctgggtcggcaagcgacaggagcacgggtcatcttttccccagaggcgtcggaatggacctgtgccacccagagcccgcggagctgagcagcggggagacggaagagttacagaggatcaagtggcaccgaaagcagctcctggaggacatccagaagctgaaggatgagattgcagatgtgtttgcccaaatcgactgcttcgagagtgcggaggagagccggatggcccagaaggagaaggagctgtgtattgggcgcaagaagttcaacatggaccccgccaagggtatccagtatttcattgagcacaagctgctgacccctgacgtccaggacattgcacggttcctgtataaaggcgagggcctcaacaagacagccattggtacctacctgggggagagggatcccatcaacctgcaggtcctccaggccttcgtggactgccacgagttcgccaacctcaacctcgtccaggccctcagattccgagaaggagcatctgatctgggctttggagggtgagtaggagttcacaatacagagaaggaagaagccaccaccatccagtgttctctaactcccagctctttaagggagaggg

SEQ ID NO: 7512 - DNA, 3253 bp, Homo sapiens
  source 1..3253: mol_type = unassigned DNA
aagcaggaaggagcctgttacagtcaaggtgacgcatccttgccgggccagcccgaacagcagctgggtcggcaagcgacaggagcacgggtcatcttttccccagaggcgtcggaatggacctgtgccacccagagcccgcggagctgagcagcggggagacggaagagttacagaggatcaagtggcaccgaaagcagctcctggaggacatccagaagctgaaggatgagattgcagatgtgtttgcccaaatcgactgcttcgagagtgcggaggagagccggatggcccagaaggagaaggagctgtgtattgggcgcaagaagttcaacatggaccccgccaagggtatccagtatttcattgagcacaagctgctgacccctgacgtccaggacattgcacggttcctgtataaaggcgagggcctcaacaagacagccattggtacctacctgggggagagggatcccatcaacctgcaggtcctccaggccttcgtggactgccacgagttcgccaacctcaacctcgtccaggccctcaggcagttcctgtggagcttccggctgccgggcgaggcccagaagatagaccggatgatggaggcctttgccactcgatactgcctctgcaacccaggcgtcttccagtccacagacacctgctacgtgttgtccttctccatcatcatgctcaacaccagcctccacaatcccaacgtccgggacaggccgccttttgagcgctttgtgtccatgaaccgcggcatcaacaatggtagcgacctgcccgaggaccagctgcgggttacatgggagtgctcccagaggagaagccgggaaaggacatttcaaaaagaagaagtggccagaacggaggcgtgtcctgattgggaaaggagaggtgtccagtgtggccgagaacctcttcgacagcatcaagagtgagccattctccatccctgaggacgacggcaatgacctcactcacaccttcttcaatccagaccgggagggttggctgctcaagctagggggccgcgtgaagacgtggaaacggcgctggttcatcctgaccgacaactgcctctactacttcgagttcaccactgacaaggagccacggggaattatacctcttgagaacctctcggtgcagaaggtggatgaccccaagaagccattctgcctggagctctacaaccctagctgccgaggccagaaaatcaaggcctgcaagaccgatggcgacggcagggtggtggagggcaagcacgaatcgtaccgcatctcagccaccagtgccgaggaacgtgaccagtggatcgagtccatccgagccagcatcacccgtgtccccttctacgacctggtctctactcggaagaagaagattgccagcaagcagtgagattcctggaggtggcactgggggctggtcaccctgagagtcccatcgcctgcagcacctggagacccacctcccaccccagtgcactcttttgggccacagacatcattgctgttccccgttacctcgagctgactctagaggggaaggcagagctcaggagggtgggtgggagctgcagtgggctcagagtccagcaatgaggccccctggcctgggcacccagctgcaggcccctgccctacgtgcactacaggaaggggtgaggagagcagccagaggaaaaccagccccagaatgctgcaacttctcttctctctggacttcggtgtcctcggctctgaaggcgctctctgcacttagatgctgtcagccctcaacgtaggaggggccgtggggtccctaagtgattcttctccctggcaaggctcttccttttcagggatatctctgccaacccctcccctgtcctcgggttgggcttggccctctctgcctgagagagctcagcacacacacagctcagacccacggacaggaccccgggacagaaccccgggagcactgccctaggagcccggaccccacgagctcagtcccagctctgcctctgactcgctgtgtgccctctgccaagtcatgcccattctctagttcttgcaaaactgcagtgtttggactagaaacgtattggcccctgctagccctgtgctccagcttccagctggagatggcagccgttgtttgcggagcccaggctgactccggattcaacgttgctggggagagaaaagcagtatagactccaccttccaggatgtccatttcggggagaggagcaggtgggaccctcaagaaaatgacggagaacatcccagacagatgggactcaagcaggatgggtgctatatccaagaagccaagaagggagagtttcgtgcactgtggttaacaggagggctgcctggaggcagtggctgagccagaaagtaacacagagctcatgcttggagagagagagtcttggccatggctttcctgcaagaccactgacgagcagtcccatggtgataaagggcagcccggcgggtcccagcatctcgagaccctctgcagaagtattatcagagtagagctgacttccagtacccgggcagccagctctgtctccagggaggcctggcctggaggaggagtccactaacaggaaacacttctcaccccctcacacaggcccaggggagcccctggagggaaattccttggcaggggaacaggaaatgtggccgcctctgccccactgccagcctgagtgggcaaggaagcaggtggatcccccagaaggaaccgcagctcgcgaggcacctctcctcgtccccacccacccccacatttgcacaccttccacagggtcaggatggagtagctgccttgcgaggtggtgagactcctgtctctggaggtctgcaagcactggtagtgatattgcagcagacaaggtctgggttgggcgtctgcaggaggacaccttgtgggacatctgaggacatccgcagattcttgtcagcctgtgaactaggccctgcctctgtcacctcattggtccatgaaggagcagccaggggtggtggaaggagcactgggctaggggtcaggggtcagagattctgtcctgctcctgggatgcactggctactcccttagtctactcccttcccctctctggtcctcagcttcctccatcatggaggagatgggatcatggattttctgggcataagtggctgttctgggagtcattccaaagagagaataaaactcctgatccaactcgtga

SEQ ID NO: 7513 - DNA, 569 bp, Homo sapiens
  source 1..569: mol_type = unassigned DNA
cacacacacttccggaagcctctccagcagggacagccaagccggggacagcgcctccagggcagggggccgcgtgaagacgtggaaacggcgctggttcatcctgaccgacaactgcctctactacttcgagttcaccactgacaaggagccacggggaattatacctcttgagaacctctcggtgcagaaggtggatgaccccaagaagccattctgcctggagctctacaaccctagctgccgaggccagaaaatcaaggcctgcaagaccgatggcgacggcagggtggtggagggcaagcacgaatcgtaccgcatctcagccaccagtgccgaggaacgtgaccagtggatcgagtccatccgagccagcatcacccgtgtccccttctacgacctggtctctactcggaagaagaagattgccagcaagcagtgagattcctggaggtggcactgggggctggtcaccctgagagtcccatcgcctgcagcacctggagacccacctcccaccccagtgcactcttttgggccacagacatcattgctgttccccgttacct

SEQ ID NO: 7514 - DNA, 652 bp, Homo sapiens
  source 1..652: mol_type = unassigned DNA
aagtgggagttggaagagagcttgtggggtggaacacagggggccctgctaggactgtccaagttgggcgctcctatggcatatatgtgaggaggctgccacgtgaatgcccatggtcccctggaaaatgttcgtcctcagtgaacatcgccctcggtgtctgtgcatgtggctgggcggggcaagcaggaaggagcctgttacagtcaaggtgacgcatccttgccgggccagcccgaacagcagctgggtcggcaagcgacaggagcacgggtcatcttttccccagaggcgtcggaatggacctgtgccacccagagcccgcggagctgagcagcggggagacggaagagttacagaggatcaagtggcaccgaaagcagctcctggaggacatccagaagctgaaggatgagattgcagatgtgtttgcccaaatcgactgcttcgagagtgcggaggagagccggatggcccagaaggagaaggagctgtgtattgggcgcaagaagttcaacatggaccccgccaagggtatccagtatttcattgagcacaagctgctgacccctgacgtccaggacattgcacggttcctgtataaaggcgagggcctcaacaagacagccattggtacctacctgggggagag

SEQ ID NO: 7515 - DNA, 2043 bp, Homo sapiens
  source 1..2043: mol_type = unassigned DNA
cccgctcgtctggcccgcccccctcgccctcgcaggcggtccgcgccactgcctctcagtccctgtcctgcgcccgcgcgccccgggagcctacccagcacgcgctccgcgcccactggttccctccagccgccgccgtccagccgagtccccactccggagtcgccgctgccgcggggacatggtcctctgcgttcagggacctcgtcctttgctggctgtggagcggactgggcagcggcccctgtgggccccgtccctggaactgcccaagccagtcatgcagcccttgcctgctggggccttcctcgaggaggtggcagagggtaccccagcccagacagagagtgagccaaaggtgctggacccagaggaggatctgctgtgcatagccaagaccttctcctaccttcgggaatctggctggtattggggttccattacggccagcgaggcccgacaacacctgcagaagatgccagaaggcacgttcttagtacgtgacagcacgcaccccagctacctgttcacgctgtcagtgaaaaccactcgtggccccaccaatgtacgcattgagtatgccgactccagcttccgtctggactccaactgcttgtccaggccacgcatcctggcctttccggatgtggtcagccttgtgcagcactatgtggcctcctgcactgctgatacccgaagcgacagccccgatcctgctcccaccccggccctgcctatgcctaaggaggatgcgcctagtgacccagcactgcctgctcctccaccagccactgctgtacacctaaaactggtgcagccctttgtacgcagaagcagtgcccgcagcctgcaacacctgtgccgccttgtcatcaaccgtctggtggccgacgtggactgcctgccactgccccggcgcatggccgactacctccgacagtaccccttccagctctgactgtacggggcaatctgcccaccctcacccagtcgcaccctggaggggacatcagccccagctggacttgggcccccactgtccctcctccaggcatcctggtgcctgcatacctctggcagctggcccaggaagagccagcaagagcaaggcatgggagaggggaggtgtcacacaacttggaggtaaatgcccccaggccgcatgtggcttcattatactgagccatgtgtcagaggatggggagacaggcaggaccttgtctcacctgtgggctgggcccagacctccactcgcttgcctgccctggccacctgaactgtatgggcactctcagccctggtttttcaatccccagggtcgggtaggacccctactggcagccagcctctgtttctgggaggatgacatgcagaggaactgagatcgacagtgactagtgaccccttgttgaggggtaagccaggctaggggactgcacaattatacactatttatttatttattctccttggggttggtgtcaggggcgagccaaccccacctctatgccctgagccctggtagtccagagaccccaactctgccctggcttctctggttcttccctgtggaaagcccatcctgagacatcttgctggaaccaaggcaatcctggatgtcctggtactgacccacccgtctgtgaatgtgtccactctcttctgcccccagccatatttggggaggatggacaactacaataggtaagaaaatgcagccggagcctcagtccccagcagagcctgtgtctcaccccctcacaggacagagctgtatctgcatagagctggtctcactgtggcgcaggccccggggggagtgcctgtgctgtcaggaagagggggtgctggtttgagggccgccactgcagttctgctaggtctgcttcctgcccaggaaggtgcctgcacatgagaggagagaaatacacgtctgataagacttcatgaaataataattatagcaaagaacagtttggtggtcttttctcttccactgatttttctgtaatgacattatacctttattacctctttatttta

SEQ ID NO: 7516 - DNA, 2167 bp, Homo sapiens
  source 1..2167: mol_type = unassigned DNA
tccctgtcctgcgcccgcgcgccccgggagcctacccagcacgcgctccgcgcccactggttccctccagccgccgccgtccagccgagtccccactccggagtcgccgctgccgcggggacatggtcctctgcgttcaggggtgagcacccccttgtaagctcagggctactgttgggtgtcagggaacaaagttttagactgctgcgctccaaagcgggcacacacatgtacctagaacacaccagccactgtccccaccatgatgatgacacagccatggacacacccctgcccagacctcgtcctttgctggctgtggagcggactgggcagcggcccctgtgggccccgtccctggaactgcccaagccagtcatgcagcccttgcctgctggggccttcctcgaggaggtggcagagggtaccccagcccagacagagagtgagccaaaggtgctggacccagaggaggatctgctgtgcatagccaagaccttctcctaccttcgggaatctggctggtattggggttccattacggccagcgaggcccgacaacacctgcagaagatgccagaaggcacgttcttagtacgtgacagcacgcaccccagctacctgttcacgctgtcagtgaaaaccactcgtggccccaccaatgtacgcattgagtatgccgactccagcttccgtctggactccaactgcttgtccaggccacgcatcctggcctttccggatgtggtcagccttgtgcagcactatgtggcctcctgcactgctgatacccgaagcgacagccccgatcctgctcccaccccggccctgcctatgcctaaggaggatgcgcctagtgacccagcactgcctgctcctccaccagccactgctgtacacctaaaactggtgcagccctttgtacgcagaagcagtgcccgcagcctgcaacacctgtgccgccttgtcatcaaccgtctggtggccgacgtggactgcctgccactgccccggcgcatggccgactacctccgacagtaccccttccagctctgactgtacggggcaatctgcccaccctcacccagtcgcaccctggaggggacatcagccccagctggacttgggcccccactgtccctcctccaggcatcctggtgcctgcatacctctggcagctggcccaggaagagccagcaagagcaaggcatgggagaggggaggtgtcacacaacttggaggtaaatgcccccaggccgcatgtggcttcattatactgagccatgtgtcagaggatggggagacaggcaggaccttgtctcacctgtgggctgggcccagacctccactcgcttgcctgccctggccacctgaactgtatgggcactctcagccctggtttttcaatccccagggtcgggtaggacccctactggcagccagcctctgtttctgggaggatgacatgcagaggaactgagatcgacagtgactagtgaccccttgttgaggggtaagccaggctaggggactgcacaattatacactatttatttatttattctccttggggttggtgtcaggggcgagccaaccccacctctatgccctgagccctggtagtccagagaccccaactctgccctggcttctctggttcttccctgtggaaagcccatcctgagacatcttgctggaaccaaggcaatcctggatgtcctggtactgacccacccgtctgtgaatgtgtccactctcttctgcccccagccatatttggggaggatggacaactacaataggtaagaaaatgcagccggagcctcagtccccagcagagcctgtgtctcaccccctcacaggacagagctgtatctgcatagagctggtctcactgtggcgcaggccccggggggagtgcctgtgctgtcaggaagagggggtgctggtttgagggccgccactgcagttctgctaggtctgcttcctgcccaggaaggtgcctgcacatgagaggagagaaatacacgtctgataagacttcatgaaataataattatagcaaagaacagtttggtggtcttttctcttccactgatttttctgtaatgacattatacctttattacctctttattttattacctctataataaaatgatacctt

SEQ ID NO: 7517 - DNA, 1802 bp, Homo sapiens
  source 1..1802: mol_type = unassigned DNA
ggggccgggcggggccagcggcgcattagcgccttgtcaattcggctgctcagacttgctccggcctccgcgtccgcgcccagcgacgtgcgggcggcctggcccgcgccctcccgcgcccggcctgcgtcccgcgccctgcgccaccgccgccgagccgcagcccgccgcgcgcccccggcagcgccggccccatgcccgccggccgccggggccccgccgcccaatccgcgcggcggccgccgccgttgctgcccctgctgctgctgctctgcgtcctcggggcgccgcgagccggatcaggagcccacacagctgtgatcagtccccaggatcccacgcttctcatcggctcctccctgctggccacctgctcagtgcacggagacccaccaggagccaccgccgagggcctctactggaccctcaacgggcgccgcctgccccctgagctctcccgtgtactcaacgcctccaccttggctctggccctggccaacctcaatgggtccaggcagcggtcgggggacaacctcgtgtgccacgcccgtgacggcagcatcctggctggctcctgcctctatgttggcctgcccccagagaaacccgtcaacatcagctgctggtccaagaacatgaaggacttgacctgccgctggacgccaggggcccacggggagaccttcctccacaccaactactccctcaagtacaagcttaggtggtatggccaggacaacacatgtgaggagtaccacacagtggggccccactcctgccacatccccaaggacctggctctctttacgccctatgagatctgggtggaggccaccaaccgcctgggctctgcccgctccgatgtactcacgctggatatcctggatgtggtgaccacggaccccccgcccgacgtgcacgtgagccgcgtcgggggcctggaggaccagctgagcgtgcgctgggtgtcgccacccgccctcaaggatttcctctttcaagccaaataccagatccgctaccgagtggaggacagtgtggactggaaggtggtggacgatgtgagcaaccagacctcctgccgcctggccggcctgaaacccggcaccgtgtacttcgtgcaagtgcgctgcaacccctttggcatctatggctccaagaaagccgggatctggagtgagtggagccaccccacagccgcctccactccccgcagtgagcgcccgggcccgggcggcggggcgtgcgaaccgcggggcggagagccgagctcggggccggtgcggcgcgagctcaagcagttcctgggctggctcaagaagcacgcgtactgctccaacctcagcttccgcctctacgaccagtggcgagcctggatgcagaagtcgcacaagacccgcaaccaggacgaggggatcctgccctcgggcagacggggcacggcgagaggtcctgccagataagctgtaggggctcaggccaccctccctgccacgtggagacgcagaggccgaacccaaactggggccacctctgtaccctcacttcagggcacctgagccaccctcagcaggagctggggtggcccctgagctccaacggccataacagctctgactcccacgtgaggccacctttgggtgcaccccagtgggtgtgtgtgtgtgtgtgagggttggttgagttgcctagaacccctgccagggctgggggtgagaaggggagtcattactccccattacctagggcccctccaaaagagtccttttaaataaatgagctatttaggtgctgtgattgtg

SEQ ID NO: 7518 - DNA, 702 bp, Homo sapiens
  source 1..702: mol_type = unassigned DNA
atggggcggctggttctgctgtggggagctgccgtctttctgctgggaggctggatggctttggggcaaggaggagcagcagaaggagtacagattcagatcatctacttcaatttagaaaccgtgcaggtgacatggaatgccagcaaatactccaggaccaacctgactttccactacagattcaacggtgatgaggcctatgaccagtgcaccaactaccttctccaggaaggtcacacttcggggtgcctcctagacgcagagcagcgagacgacattctctatttctccatcaggaatgggacgcaccccgttttcaccgcaagtcgctggatggtttattacctgaaacccagttccccgaagcacgtgagattttcgtggcatcaggatgcagtgacggtgacgtgttctgacctgtcctacggggatctcctctatgaggttcagtaccggagccccttcgacaccgagtggcagacacagtcccgctctgtcacccaggctggagtgcagtggtgcgatctctgcttgctacaaccttcgcctcccaggttcaagcgattctcctgcctcagcctcccaagtagctgggattacaggcacccgccaccacgcctggctaatttttgtattatcagtagagacggggtttctccatgttggccaggctggtctcgaacttgcgacctcaggtga

SEQ ID NO: 7519 - DNA, 771 bp, Homo sapiens
  source 1..771: mol_type = unassigned DNA
atggggcggctggttctgctgtggggagctgccgtctttctgctgggaggctggatggctttggggcaaggaggagcagcagaaggagtacagattcagatcatctacttcaatttagaaaccgtgcaggtgacatggaatgccagcaaatactccaggaccaacctgactttccactacagattcaacggtgatgaggcctatgaccagtgcaccaactaccttctccaggaaggtcacacttcggggtgcctcctagacgcagagcagcgagacgacattctctatttctccatcaggaatgggacgcaccccgttttcaccgcaagtcgctggatggtttattacctgaaacccagttccccgaagcacgtgagattttcgtggcatcaggatgcagtgacggtgacgtgttctgacctgtcctacggggatctcctctatgaggttcagtaccggagccccttcgacaccgagtggcagtccaaacaggaaaatacctgcaacgtcaccatagaaggcttggatgccgagaagtgttactctttctgggtcagggtgaaggctatggaggatgtatatgggccagacacatacccaagcgactggtcagaggtgacatgctggcagagaggcgagattcgggatgcctgtgcagagacaccaacgcctcccaaaccaaagctgtccaaatttattttaatttccagcctggccatccttctgatggtgtctctcctccttctgtctttatggaaattatggaggtaa

SEQ ID NO: 7520 - DNA, 770 bp, Homo sapiens
  source 1..770: mol_type = unassigned DNA
ggcatggggcggctggttctgctgtggggagctgccgtctttctgctgggaggctggatggctttggggcaaggaggagcagcagaaggagtacagattcagatcatctacttcaatttagaaaccgtgcaggtgacatggaatgccagcaaatactccaggaccaacctgactttccactacagattcaacggtgatgaggcctatgaccagtgcaccaactaccttctccaggaaggtcacacttcggggtgcctcctagacgcagagcagcgagacgacattctctatttctccatcaggaatgggacgcaccccgttttcaccgcaagtcgctggatggtttattacctgaaacccagttccccgaagcacgtgagattttcgtggcatcaggatgcagtgacggtgacgtgttctgacctgtcctacggggatctcctctatgaggttcagtaccggagccccttcgacaccgagtggcagtccaaacaggaaaatacctgcaacgtcaccatagaaggcttggatgccgagaagtgttactctttctgggtcagggtgaaggctatggaggatgtatatgggccagacacatacccaagcgactggtcagaggtgacatgctggcagagaggcgagattcgggatgcctgtgcagagacaccaacgcctcccaaaccaaagctgtccaaatttattttaatttccagcctggccatccttctgatggtgtctctcctccttctgtctttatggaaattatggag

SEQ ID NO: 7521 - DNA, 1003 bp, Homo sapiens
  source 1..1003: mol_type = unassigned DNA
ggcgaggctgcaccagcgcctggcaccatgaggacgcctgggcctctgcccgtgctgctgctgctcctggcgggagcccccgccgcgcggcccactcccccgacctgctactcccgcatgcgggccctgagccaggagatcacccgcgacttcaacctcctgcaggtctcggagccctcggagccatgtgtgagatacctgcccaggctgtacctggacatacacaattactgtgtgctggacaagctgcgggactttgtggcctcgcccccgtgttggaaagtggcccaggtagattccttgaaggacaaagcacggaagctgtacaccatcatgaactcgttctgcaggagagatttggtattcctgttggatgactgcaatgccttggaatacccaatcccagtgactacggtcctgccagatcgtcagcgctaagggaactgagaccagagaaagaacccaagagaactacagttatgtcagctacccagacttaatgggccagagccatgaccctcacaggtcttgtgttagttgtatctgaaactgttatgtatctctctaccttctggaaaacagggctggtattcctacccaggaacctcctttgagcatagagttagcaaccatgcttctcattcccttgactcatgtcttgccaggatggttagatacacagcatgttgatttggtcactaaaaagaagaaaaggactaacaagcttcacttttatgaacaactattttgagaacttgcacaatagtatgtttttattactggtttaatggagtaatggtacttttattctttcttgatagaaacctgcttacatttaaccaagcttctattatgcctttttctaacacagactttcttcactgtctttcatttaaaaagaaattaatgctcttaagatatatattttacgtagtgctgacaggacccactctttcattgaaaggtgatgaaaatcaaataaagaatctcttcacatgagaaa

SEQ ID NO: 7522 - DNA, 6863 bp, Homo sapiens
  source 1..6863: mol_type = unassigned DNA
cgggaggaaggggaggaggccgagtgtttcctggcgcattcccggccagcccgagtgactcactcggccaaggaaactcccagggcccgcccaggacccccaagccgccgcggacgcagcccaggatggcggcccaggtgactctggaggacgcgctgtccaacgtggacctcctggaggagctgcccctgcccgaccagcagccctgcatcgagcccccgccatcctcgctgctctaccagccaaatttcaacactaactttgaagacagaaatgcatttgttactggcatcgcaagatacattgaacaagccaccgtccactctagcatgaacgagatgctggaggagggccaagaatatgctgtcatgctgtacacctggaggagctgctcccgggccatcccacaggtgaaatgtaacgagcagcctaacagagtggaaatctacgagaaaaccgtggaggttctggagcctgaggtcacaaaactgatgaatttcatgtacttccagagaaatgccattgagcgtttctgcggggaagtgaggcgcctgtgccatgccgagaggaggaaggacttcgtgtcagaagcctacctgatcacactgggcaaattcatcaacatgttcgctgtgctggacgagctgaagaacatgaagtgcagtgtgaagaacgaccactcagcgtacaagagggccgctcagtttttacgtaaaatggcagatccacagtccatccaggaatcgcagaatctgtccatgttcctggccaatcataacaagatcacacagtctctgcagcagcagctcgaagtgatttctggctacgaagagctcctggcagatattgtgaatctgtgtgtggattactacgagaacaggatgtatttgacgcccagtgagaaacacatgcttctcaaagtcatgggatttggtctgtacctgatggatgggagtgtcagtaacatctataagttggatgccaagaaaagaataaacttatccaaaatcgacaagtacttcaagcaactccaggtggttccgctatttggggacatgcaaatagaactggcaagatatatcaagaccagcgcccactacgaggaaaataaatctcgatggacgtgcacatcctccggcagcagccctcagtacaacatctgcgagcagatgatccagatccgcgaggaccacatgcgcttcatttcggagctggcgcgctacagcaacagcgaggtggtcacgggctcgggccgccaggaggcccagaagacggacgcggagtaccgcaagctcttcgacctggcgctgcagggcctgcagctgttgtcgcagtggagcgcgcacgtgatggaagtgtattcctggaagcttgtgcaccccaccgacaagtactccaacaaggactgccccgacagcgctgaagagtacgagcgtgccacgcgctacaactacaccagcgaggagaagtttgccctagtggaggtgatcgccatgatcaaaggcctgcaggtgctgatgggcaggatggagagcgtgttcaaccacgccatccggcacaccgtctatgccgcactgcaggacttctcccaggtgacccttagggagccgctgcggcaggccatcaagaagaagaagaacgtcatccagagtgtcctgcaggccatcaggaagaccgtgtgtgactgggagacggggcatgagcccttcaatgacccagccttgcggggcgagaaggaccccaagagcggcttcgacataaaagtaccacgccgcgccgtgggaccctccagcactcagctttacatggtgagaaccatgctagagtccctcattgcagacaaaagtggttccaagaaaaccttgagaagtagccttgaggggcccaccatattggacatagaaaaatttcatcgagagtcattcttctacactcacttgataaatttcagtgaaacgctgcagcagtgctgtgacctttcgcagctgtggttccgagagttcttcctggagctgaccatgggcaggaggatccagttccccattgagatgtcgatgccctggatcctgacggaccacatcctggagaccaaggaggcatcgatgatggagtacgtgctctactccctggacctgtacaatgacagcgcccactacgcgctcaccaggttcaacaagcagttcctgtacgacgaaattgaggccgaggtgaatctatgttttgaccaatttgtttacaagctagcagaccagatatttgcctattataaggttatggcaggaagtttgcttcttgataaacggttacgatcagaatgcaagaatcagggagccacgatccacctcccgccgtctaaccgctacgagacgctgctgaagcagaggcatgtgcagctcctcggcagatcaatagacctcaatcgtctgatcacccagcgcgtctcagcagccatgtataagtccctagaactggcgattggacgatttgaaagtgaagatttgacctccatagttgagctggatggcctgttggaaatcaaccgcatgacccacaagctgctgagccggtacctgacgctggacggcttcgacgccatgttccgggaggccaaccacaacgtgtcagcgccctacgggaggatcaccctgcacgtcttctgggagctcaactatgacttcctgcccaactactgctacaacggctctaccaaccggtttgttcggacagtgttaccattttctcaggaatttcaaagagataagcagcctaatgcacagcctcagtatctgcatggatccaaggctttgaacttggcctactccagcatttacggcagctaccggaacttcgtgggacctccacactttcaagtcatctgccggcttctcggctaccagggtatcgccgtggtcatggaggagctgctgaaggtcgtcaagagcctgctgcaaggcacaatcctgcagtacgtgaagacgctgatggaggtgatgcccaagatctgccgcctgccccggcacgagtacggctctcctggtatcctggagttcttccaccaccagctgaaggacatcgtggagtacgcagagctgaagacggtgtgcttccagaacctgcgggaggtggggaacgccatcctcttctgcctgctcatcgagcagagcctgtctttagaagaagtgtgtgacctgctgcacgcggctcctttccagaacatcttgccgcgagtccatgtgaaagagggggagagacttgatgccaaaatgaaaagactagaatcaaagtacgccccgctgcatcttgtcccactgattgaaagactggggacccctcagcaaattgccatcgcaagagagggggacctgctgacaaaggagcgcctctgctgcggcctgtccatgtttgaggtcatcctgacacggatccggagctttctggatgaccccatctggcgcgggcctctgcccagcaatggggtcatgcatgtggacgagtgtgtggagtttcacagactgtggagtgccatgcagtttgtctactgcattcccgtggggacacacgagttcacagtcgagcagtgctttggtgatgggctacactgggctggctgtatgatcatcgtacttcttgggcagcagcggcgttttgctgtgctggatttctgctaccatctacttaaagtccagaaacatgatggcaaagatgagattattaaaaatgtgcctttgaagaagatggtggagagaattcgcaagttccagattctcaatgatgagatcatcaccatcctggataagtacctgaagtcaggcgacggggagggcacgccagtggagcatgtgcgctgcttccagccgcccatccaccagtccctcgccagcagctgagggcacgcgctgcactccgtaactcaacatggcatgcctttctctccgtaaactatttagtgagatttttagggactatttttcagtatctctgtacctgttaaagggggtgcttttcgatctaaaaacttaattttataaaattgacttatttttctagactaaaattgtatatgcttttggtaattaggaactcttgagaatattggctgctgattgttgccatcacgttcctacaaaattgtttttctatgggatgttctggcagctgtgtcataaaatgctgctgggttcattcattcattccataagaaacttaataccagcaaatgcattaaatcccttgccagttaccattaactgtaactatttagcttttgtttagggatctttctgatggtcttttatgagcaatcttagttctaagtcattgttcccatcccttttttgtgtgtttcagaaaatagtgaacttgattcccctgcttccactaaatccagttgtgacaaaatctaacgtgacatcagatcgaaaggttatagaaataaaactaatgagatctatttgtgttcatttatttactctaaccctgtgctgcctggcttggcaaggaactctaacctgaactcacataccaggccagctgggatggaggtcacctctaaggctgaggtgggatgggaccgtgacaccatcccatataccgctcacctcagcacaggtttagctttatatttagggttccgcaggcaaatgaggtgtaaaacggccgtgttggctgctccaatctggatatgaagaggctactcagtgcctctctgttacctgtgcccatgacctggaggaagccagcaatgtgggaggagatcagtcaggcccagtgggtgctgcacaaagggaccgggagcaccgagtccagccttcagctgtccccgatccacagggctcacatggctggagctggttcacatgatctgtcagaatgaaaaacaatcggtctagactaccagtagagtcacgaacatgtttgagaaactaaagccatattttaaaaagtactaaggcaatgaggttctgaaaatcctaactaactgaatggaaaaagatgctatgcctgtttattgtagatgaatactacagataaacacaagtccagcatgattaactgaactcactttatattgtagcctggcagtcattttacattatttggagtattgcaaccttcaccaattttaaaattttctatggatgccaagttgccataaaaagcaggcctcgcctacttttccggaggcctttggaaactgtccagaagcatatgatgcacggcacagaaaagtagtaagtgtacgaaccatcctgttacactgccaaactcactcaagtgacatgaagcctaacaaacaattattctttctttataaaaagttccctaaaaatgcttttggtaatgtgaattaataaccctggggccagcattctgctgcagatttagaggtggtagctgtgcttatcttagaaactacagaataggatgaaaaattatggtaaaacttaatcaattaccaagttttataaggcttaattatataccaaatatgtaataccttaggtataagacaatctcaagtgctacaaaatgttaaataagaatttattatttattaacctatgcatgttcaaatgagtctctgtcctcaagggggagaaaactggttcttttatgtacaaagcacagatgtaggtacagtatataaacagatacgtagtacatctgtagtattaaaatggcatgggaggaggcagttagaaaaaacatctaaaacagctccttagaaggccaataataaagttggaaaaaagggagtttccacgcagccagtggtgagctgcatgggataccagcaccattggcaggggaggccctcggggagtgatggcttggcgctggcgcaccactgggtaacctccaggcaggagccacaggctggaacaggcgaacactttcttcccatcacctaggtggaaattaattctgccaatacttttttttaaaggccagtcaatggttatgagtggataggttcaaagctgaatggagttcattagaccttttttattattctaccttttctgcatatgtttgcagttttccatcgacttcttcataaacaaacattttctagaaaccaaaatatgtagtggcccaaaggagctcttaagcaaagtacttggtacaaagagaccatattctataaacatgttaagtttgttctaagcattcagacttttagaataagaacttcatttcaactttttattataacatgagctaaatttaagaaacaaccctagtcttctatttcccagagctgttcaaagtctaaatgacaatataactcattatgaaaatatactgaaaagtacaagagctgatgtaaaacggtaatcaaggttccaggcatcatgggattagggtaactgaagaataaacccagccaggctgcaacagcaggcaggatgtgctggcttgatgaggtgctaaggccatcgaatgctcagaggaagccggattcacggtgatcatctcaacctgagaaatcgttccttggggtgatttctgcccttttttttgttttgtaagaaagaggttccttcattcagtaacttagttttcccttaataaatatttcaaaaataaaaccaatcatcatcaaacaaacaggagccacttttgtaggtaaggtaaatcacaggataatgtattgggataactctgtttttttaaaataaaaaagccttacatggtcagggattgatggagtggggatgacaaatgcacatttcagactttcatcaccaatgaaaaaataaagcattttcatagacttaaaactgtcattagtgcattcggcttttggagaagggatgaaaatgtaaaatacttctacaacaataaaatgttaatagaaa

SEQ ID NO: 7523 - DNA, 4460 bp, Homo sapiens
  source 1..4460: mol_type = unassigned DNA
gttgacccgcgtggggcccgggcatgactggacacgcccccaggcctctcctggcactatctgggttcaggccgcagaaagggcagactgcgggactctgggctggagtcgcaggacacgggcagcccctatggggccgaagcacgtcctcaggcagcctggcccctccgagcggcatcaccctgaggtgcctgcgtggacaccaagggcaggccccccatgctggctctgcaggcagcgctggggctggaccctgcacccacccggccggggctgccctgcactgctcctttctgagcccaggatggcggcccaggtgactctggaggacgcgctgtccaacgtggacctcctggaggagctgcccctgcccgaccagcagccctgcatcgagcccccgccatcctcgctgctctaccagaacgagatgctggaggagggccaagaatatgctgtcatgctgtacacctggaggagctgctcccgggccatcccacaggtgaaatgtaacgagcagcctaacagagtggaaatctacgagaaaaccgtggaggttctggagcctgaggtcacaaaactgatgaatttcatgtacttccagagaaatgccattgagcgtttctgcggggaagtgaggcgcctgtgccatgccgagaggaggaaggacttcgtgtcagaagcctacctgatcacactgggcaaattcatcaacatgttcgctgtgctggacgagctgaagaacatgaagtgcagtgtgaagaacgaccactcagcgtacaagagggccgctcagtttttacgtaaaatggcagatccacagtccatccaggaatcgcagaatctgtccatgttcctggccaatcataacaagatcacacagtctctgcagcagcagctcgaagtgatttctggctacgaagagctcctggcagatattgtgaatctgtgtgtggattactacgagaacaggatgtatttgacgcccagtgagaaacacatgcttctcaaagtcatgggatttggtctgtacctgatggatgggagtgtcagtaacatctataagttggatgccaagaaaagaataaacttatccaaaatcgacaagtacttcaagcaactccaggtggttccgctatttggggacatgcaaatagaactggcaagatatatcaagaccagcgcccactacgaggaaaataaatctcgatggacgtgcacatcctccggcagcagccctcagtacaacatctgcgagcagatgatccagatccgcgaggaccacatgcgcttcatttcggagctggcgcgctacagcaacagcgaggtggtcacgggctcgggccgccaggaggcccagaagacggacgcggagtaccgcaagctcttcgacctggcgctgcagggcctgcagctgttgtcgcagtggagcgcgcacgtgatggaagtgtattcctggaagcttgtgcaccccaccgacaagtactccaacaaggactgccccgacagcgctgaagagtacgagcgtgccacgcgctacaactacaccagcgaggagaagtttgccctagtggaggtgatcgccatgatcaaaggcctgcaggtgctgatgggcaggatggagagcgtgttcaaccacgccatccggcacaccgtctatgccgcactgcaggacttctcccaggtgacccttagggagccgctgcggcaggccatcaagaagaagaagaacgtcatccagagtgtcctgcaggccatcaggaagaccgtgtgtgactgggagacggggcatgagcccttcaatgacccagccttgcggggcgagaaggaccccaagagcggcttcgacataaaagtaccacgccgcgccgtgggaccctccagcactcagctttacatggtgagaaccatgctagagtccctcattgcagacaaaagtggttccaagaaaaccttgagaagtagccttgaggggcccaccatattggacatagaaaaatttcatcgagagtcattcttctacactcacttgataaatttcagtgaaacgctgcagcagtgctgtgacctttcgcagctgtggttccgagagttcttcctggagctgaccatgggcaggaggatccagttccccattgagatgtcgatgccctggatcctgacggaccacatcctggagaccaaggaggcatcgatgatggagtacgtgctctactccctggacctgtacaatgacagcgcccactacgcgctcaccaggttcaacaagcagttcctgtacgacgaaattgaggccgaggtgaatctatgttttgaccaatttgtttacaagctagcagaccagatatttgcctattataaggttatggcaggaagtttgcttcttgataaacggttacgatcagaatgcaagaatcagggagccacgatccacctcccgccgtctaaccgctacgagacgctgctgaagcagaggcatgtgcagctcctcggcagatcaatagacctcaatcgtctgatcacccagcgcgtctcagcagccatgtataagtccctagaactggcgattggacgatttgaaagtgaagatttgacctccatagttgagctggatggcctgttggaaatcaaccgcatgacccacaagctgctgagccggtacctgacgctggacggcttcgacgccatgttccgggaggccaaccacaacgtgtcagcgccctacgggaggatcaccctgcacgtcttctgggagctcaactatgacttcctgcccaactactgctacaacggctctaccaaccggtttgttcggacagtgttaccattttctcaggaatttcaaagagataagcagcctaatgcacagcctcagtatctgcatggatccaaggctttgaacttggcctactccagcatttacggcagctaccggaacttcgtgggacctccacactttcaagtcatctgccggcttctcggctaccagggtatcgccgtggtcatggaggagctgctgaaggtcgtcaagagcctgctgcaaggcacaatcctgcagtacgtgaagacgctgatggaggtgatgcccaagatctgccgcctgccccggcacgagtacggctctcctggtatcctggagttcttccaccaccagctgaaggacatcgtggagtacgcagagctgaagacggtgtgcttccagaacctgcacgcggctcctttccagaacatcttgccgcgagtccatgtgaaagagggggagagacttgatgccaaaatgaaaagactagaatcaaagtacgccccgctgcatcttgtcccactgattgaaagactggggacccctcagcaaattgccatcgcaagagagggggacctgctgacaaaggagcgcctctgctgcggcctgtccatgtttgaggtcatcctgacacggatccggagctttctggatgaccccatctggcgcgggcctctgcccagcaatggggtcatgcatgtggacgagtgtgtggagtttcacagactgtggagtgccatgcagtttgtctactgcattcccgtggggacacacgagttcacagtcgagcagtgctttggtgatgggctacactgggctggctgtatgatcatcgtacttcttgggcagcagcggcgttttgctgtgctggatttctgctaccatctacttaaagtccagaaacatgatggcaaagatgagattattaaaaatgtgcctttgaagaagatggtggagagaattcgcaagttccagattctcaatgatgagatcatcaccatcctggataagtacctgaagtcaggcgacggggagggcacgccagtggagcatgtgcgctgcttccagccgcccatccaccagtccctcgccagcagctgagggcacgcgctgcactccgtaactcaacatggcatgcctttctctccgtaaactatttagtgagatttttagggactatttttcagtatctctgtacctgttaaagggggtgcttttcgatctaaaaacttaattttataaaattgacttatttttctagactaaaattgtatatgcttttggtaattaggaactcttgagaatattggctgctgattgttgccatcacgttcctacaaaattgtttttctatgggatgttctggcagctgtgtcataaaatgctgctgggttcattcattcattccataagaaacttaataccagcaaatgcattaaatcccttgccagttaccattaactgtaactatttagcttttgtttagggatctttctgatggtcttttatgagcaatcttagttctaagtcattgttcccatcccttttttgtgtgtttcagaaaatagtgaacttgattcccctgcttccactaaatccagttgtgacaaaatctaacgtgacatcagatcgaaaggttatagaaataaaactaatgagatct

SEQ ID NO: 7524 - DNA, 5674 bp, Homo sapiens
  source 1..5674: mol_type = unassigned DNA
ccggtttaatccacaccgctgcgtctgtcctccgtcctggggctggtcttctccctcatctctgccggaggcttttaatctcttctgccactcttctggaaagtcaccagcaatgcacgctgctggctctgcaggagggtcagggggacggccctcggcctgtgcgtggtgccagccaccctccctgcctccctctgcgtgcgtcccgtgtccctgcctggggtgtgtgtgtcgagtgactaacgtctctctcctgcctctccctcctgtctgtccgtgtctagctctacctggtgcgcaccatggccgagtccttgggctctgccgagctgctcaggcagctcaagtctctgggcatggagaggctcttgcatgcggttaacacgtttctgaggcagtcgtgcacctacctaccccttttaacctttggtggtaagacatcatttgtttctcttgacgtttatggcacggaggcgaactgctccgctacaagttgttctttccccaaagcagcagcaacgtggccgcgtagacaggcacccggacccctcggggagctggtgcggggccctcccgaccagggcgtagcggagcagtccttctctcatgggctttttgagtttggcataactaatgtaccatgtatattttctcccccacaaatgtttccttggataatccagctttacatggtgagaaccatgctagagtccctcattgcagacaaaagtggttccaagaaaaccttgagaagtagccttgaggggcccaccatattggacatagaaaaatttcatcgagagtcattcttctacactcacttgataaatttcagtgaaacgctgcagcagtgctgtgacctttcgcagctgtggttccgagagttcttcctggagctgaccatgggcaggaggatccagttccccattgagatgtcgatgccctggatcctgacggaccacatcctggagaccaaggaggcatcgatgatggagtacgtgctctactccctggacctgtacaatgacagcgcccactacgcgctcaccaggttcaacaagcagttcctgtacgacgaaattgaggccgaggtgaatctatgttttgaccaatttgtttacaagctagcagaccagatatttgcctattataaggttatggcaggaagtttgcttcttgataaacggttacgatcagaatgcaagaatcagggagccacgatccacctcccgccgtctaaccgctacgagacgctgctgaagcagaggcatgtgcagctcctcggcagatcaatagacctcaatcgtctgatcacccagcgcgtctcagcagccatgtataagtccctagaactggcgattggacgatttgaaagtgaagatttgacctccatagttgagctggatggcctgttggaaatcaaccgcatgacccacaagctgctgagccggtacctgacgctggacggcttcgacgccatgttccgggaggccaaccacaacgtgtcagcgccctacgggaggatcaccctgcacgtcttctgggagctcaactatgacttcctgcccaactactgctacaacggctctaccaaccggtttgttcggacagtgttaccattttctcaggaatttcaaagagataagcagcctaatgcacagcctcagtatctgcatggatccaaggctttgaacttggcctactccagcatttacggcagctaccggaacttcgtgggacctccacactttcaagtcatctgccggcttctcggctaccagggtatcgccgtggtcatggaggagctgctgaaggtcgtcaagagcctgctgcaaggcacaatcctgcagtacgtgaagacgctgatggaggtgatgcccaagatctgccgcctgccccggcacgagtacggctctcctggtatcctggagttcttccaccaccagctgaaggacatcgtggagtacgcagagctgaagacggtgtgcttccagaacctgcgggaggtggggaacgccatcctcttctgcctgctcatcgagcagagcctgtctttagaagaagtgtgtgacctgctgcacgcggctcctttccagaacatcttgccgcgagtccatgtgaaagagggggagagacttgatgccaaaatgaaaagactagaatcaaagtacgccccgctgcatcttgtcccactgattgaaagactggggacccctcagcaaattgccatcgcaagagagggggacctgctgacaaaggagcgcctctgctgcggcctgtccatgtttgaggtcatcctgacacggatccggagctttctggatgaccccatctggcgcgggcctctgcccagcaatggggtcatgcatgtggacgagtgtgtggagtttcacagactgtggagtgccatgcagtttgtctactgcattcccgtggggacacacgagttcacagtcgagcagtgctttggtgatgggctacactgggctggctgtatgatcatcgtacttcttgggcagcagcggcgttttgctgtgctggatttctgctaccatctacttaaagtccagaaacatgatggcaaagatgagattattaaaaatgtgcctttgaagaagatggtggagagaattcgcaagttccagattctcaatgatgagatcatcaccatcctggataagtacctgaagtcaggcgacggggagggcacgccagtggagcatgtgcgctgcttccagccgcccatccaccagtccctcgccagcagctgagggcacgcgctgcactccgtaactcaacatggcatgcctttctctccgtaaactatttagtgagatttttagggactatttttcagtatctctgtacctgttaaagggggtgcttttcgatctaaaaacttaattttataaaattgacttatttttctagactaaaattgtatatgcttttggtaattaggaactcttgagaatattggctgctgattgttgccatcacgttcctacaaaattgtttttctatgggatgttctggcagctgtgtcataaaatgctgctgggttcattcattcattccataagaaacttaataccagcaaatgcattaaatcccttgccagttaccattaactgtaactatttagcttttgtttagggatctttctgatggtcttttatgagcaatcttagttctaagtcattgttcccatcccttttttgtgtgtttcagaaaatagtgaacttgattcccctgcttccactaaatccagttgtgacaaaatctaacgtgacatcagatcgaaaggttatagaaataaaactaatgagatctatttgtgttcatttatttactctaaccctgtgctgcctggcttggcaaggaactctaacctgaactcacataccaggccagctgggatggaggtcacctctaaggctgaggtgggatgggaccgtgacaccatcccatataccgctcacctcagcacaggtttagctttatatttagggttccgcaggcaaatgaggtgtaaaacggccgtgttggctgctccaatctggatatgaagaggctactcagtgcctctctgttacctgtgcccatgacctggaggaagccagcaatgtgggaggagatcagtcaggcccagtgggtgctgcacaaagggaccgggagcaccgagtccagccttcagctgtccccgatccacagggctcacatggctggagctggttcacatgatctgtcagaatgaaaaacaatcggtctagactaccagtagagtcacgaacatgtttgagaaactaaagccatattttaaaaagtactaaggcaatgaggttctgaaaatcctaactaactgaatggaaaaagatgctatgcctgtttattgtagatgaatactacagataaacacaagtccagcatgattaactgaactcactttatattgtagcctggcagtcattttacattatttggagtattgcaaccttcaccaattttaaaattttctatggatgccaagttgccataaaaagcaggcctcgcctacttttccggaggcctttggaaactgtccagaagcatatgatgcacggcacagaaaagtagtaagtgtacgaaccatcctgttacactgccaaactcactcaagtgacatgaagcctaacaaacaattattctttctttataaaaagttccctaaaaatgcttttggtaatgtgaattaataaccctggggccagcattctgctgcagatttagaggtggtagctgtgcttatcttagaaactacagaataggatgaaaaattatggtaaaacttaatcaattaccaagttttataaggcttaattatataccaaatatgtaataccttaggtataagacaatctcaagtgctacaaaatgttaaataagaatttattatttattaacctatgcatgttcaaatgagtctctgtcctcaagggggagaaaactggttcttttatgtacaaagcacagatgtaggtacagtatataaacagatacgtagtacatctgtagtattaaaatggcatgggaggaggcagttagaaaaaacatctaaaacagctccttagaaggccaataataaagttggaaaaaagggagtttccacgcagccagtggtgagctgcatgggataccagcaccattggcaggggaggccctcggggagtgatggcttggcgctggcgcaccactgggtaacctccaggcaggagccacaggctggaacaggcgaacactttcttcccatcacctaggtggaaattaattctgccaatacttttttttaaaggccagtcaatggttatgagtggataggttcaaagctgaatggagttcattagaccttttttattattctaccttttctgcatatgtttgcagttttccatcgacttcttcataaacaaacattttctagaaaccaaaatatgtagtggcccaaaggagctcttaagcaaagtacttggtacaaagagaccatattctataaacatgttaagtttgttctaagcattcagacttttagaataagaacttcatttcaactttttattataacatgagctaaatttaagaaacaaccctagtcttctatttcccagagctgttcaaagtctaaatgacaatataactcattatgaaaatatactgaaaagtacaagagctgatgtaaaacggtaatcaaggttccaggcatcatgggattagggtaactgaagaataaacccagccaggctgcaacagcaggcaggatgtgctggcttgatgaggtgctaaggccatcgaatgctcagaggaagccggattcacggtgatcatctcaacctgagaaatcgttccttggggtgatttctgcccttttttttgttttgtaagaaagaggttccttcattcagtaacttagttttcccttaataaatatttcaaaaataaaaccaatcatcatcaaacaaacaggagccacttttgtaggtaaggtaaatcacaggataatgtattgggataactctgtttttttaaaataaaaaagccttacatggtcagggattgatggagtggggatgacaaatgcacatttcagactttcatcaccaatgaaaaaataaagcattttcatagacttaaaactgtc

SEQ ID NO: 7525 - DNA, 4515 bp, Homo sapiens
  source 1..4515: mol_type = unassigned DNA
agtgactcactcggccaaggaaactcccagggcccgcccaggacccccaagccgccgcggacgcagaatgtggctcagctgcccctggtcccatcccagggcagagctcctcctgagtacccttgagactggagcagattcagcagaaggcagattgccccctctccctggagctggctctgaagcccaggatggcggcccaggtgactctggaggacgcgctgtccaacgtggacctcctggaggagctgcccctgcccgaccagcagccctgcatcgagcccccgccatcctcgctgctctaccagccaaatttcaacactaactttgaagacagaaatgcatttgttactggcatcgcaagatacattgaacaagccaccgtccactctagcatgaacgagatgctggaggagggccaagaatatgctgtcatgctgtacacctggaggagctgctcccgggccatcccacaggtgaaatgtaacgagcagcctaacagagtggaaatctacgagaaaaccgtggaggttctggagcctgaggtcacaaaactgatgaatttcatgtacttccagagaaatgccattgagcgtttctgcggggaagtgaggcgcctgtgccatgccgagaggaggaaggacttcgtgtcagaagcctacctgatcacactgggcaaattcatcaacatgttcgctgtgctggacgagctgaagaacatgaagtgcagtgtgaagaacgaccactcagcgtacaagagggccgctcagtttttacgtaaaatggcagatccacagtccatccaggaatcgcagaatctgtccatgttcctggccaatcataacaagatcacacagtctctgcagcagcagctcgaagtgatttctggctacgaagagctcctggcagatattgtgaatctgtgtgtggattactacgagaacaggatgtatttgacgcccagtgagaaacacatgcttctcaaagtcatgggatttggtctgtacctgatggatgggagtgtcagtaacatctataagttggatgccaagaaaagaataaacttatccaaaatcgacaagtacttcaagcaactccaggtggttccgctatttggggacatgcaaatagaactggcaagatatatcaagaccagcgcccactacgaggaaaataaatctcgatggacgtgcacatcctccggcagcagccctcagtacaacatctgcgagcagatgatccagatccgcgaggaccacatgcgcttcatttcggagctggcgcgctacagcaacagcgaggtggtcacgggctcgggccgccaggaggcccagaagacggacgcggagtaccgcaagctcttcgacctggcgctgcagggcctgcagctgttgtcgcagtggagcgcgcacgtgatggaagtgtattcctggaagcttgtgcaccccaccgacaagtactccaacaaggactgccccgacagcgctgaagagtacgagcgtgccacgcgctacaactacaccagcgaggagaagtttgccctagtggaggtgatcgccatgatcaaaggcctgcaggtgctgatgggcaggatggagagcgtgttcaaccacgccatccggcacaccgtctatgccgcactgcaggacttctcccaggtgacccttagggagccgctgcggcaggccatcaagaagaagaagaacgtcatccagagtgtcctgcaggccatcaggaagaccgtgtgtgactgggagacggggcatgagcccttcaatgacccagccttgcggggcgagaaggaccccaagagcggcttcgacataaaagtaccacgccgcgccgtgggaccctccagcactcagctttacatggtgagaaccatgctagagtccctcattgcagacaaaagtggttccaagaaaaccttgagaagtagccttgaggggcccaccatattggacatagaaaaatttcatcgagagtcattcttctacactcacttgataaatttcagtgaaacgctgcagcagtgctgtgacctttcgcagctgtggttccgagagttcttcctggagctgaccatgggcaggaggatccagttccccattgagatgtcgatgccctggatcctgacggaccacatcctggagaccaaggaggcatcgatgatggagtacgtgctctactccctggacctgtacaatgacagcgcccactacgcgctcaccaggttcaacaagcagttcctgtacgacgaaattgaggccgaggtgaatctatgttttgaccaatttgtttacaagctagcagaccagatatttgcctattataaggttatggcaggaagtttgcttcttgataaacggttacgatcagaatgcaagaatcagggagccacgatccacctcccgccgtctaaccgctacgagacgctgctgaagcagaggcatgtgcagctcctcggcagatcaatagacctcaatcgtctgatcacccagcgcgtctcagcagccatgtataagtccctagaactggcgattggacgatttgaaagtgaagatttgacctccatagttgagctggatggcctgttggaaatcaaccgcatgacccacaagctgctgagccggtacctgacgctggacggcttcgacgccatgttccgggaggccaaccacaacgtgtcagcgccctacgggaggatcaccctgcacgtcttctgggagctcaactatgacttcctgcccaactactgctacaacggctctaccaaccggtttgttcggacagtgttaccattttctcaggaatttcaaagagataagcagcctaatgcacagcctcagtatctgcatggatccaaggctttgaacttggcctactccagcatttacggcagctaccggaacttcgtgggacctccacactttcaagtcatctgccggcttctcggctaccagggtatcgccgtggtcatggaggagctgctgaaggtcgtcaagagcctgctgcaaggcacaatcctgcagtacgtgaagacgctgatggaggtgatgcccaagatctgccgcctgccccggcacgagtacggctctcctggtatcctggagttcttccaccaccagctgaaggacatcgtggagtacgcagagctgaagacggtgtgcttccagaacctgcgggaggtggggaacgccatcctcttctgcctgctcatcgagcagagcctgtctttagaagaagtgtgtgacctgctgcacgcggctcctttccagaacatcttgccgcgagtccatgtgaaagagggggagagacttgatgccaaaatgaaaagactagaatcaaagtacgccccgctgcatcttgtcccactgattgaaagactggggacccctcagcaaattgccatcgcaagagagggggacctgctgacaaaggagcgcctctgctgcggcctgtccatgtttgaggtcatcctgacacggatccggagctttctggatgaccccatctggcgcgggcctctgcccagcaatggggtcatgcatgtggacgagtgtgtggagtttcacagactgtggagtgccatgcagtttgtctactgcattcccgtggggacacacgagttcacagtcgagcagtgctttggtgatgggctacactgggctggctgtatgatcatcgtacttcttgggcagcagcggcgttttgctgtgctggatttctgctaccatctacttaaagtccagaaacatgatggcaaagatgagattattaaaaatgtgcctttgaagaagatggtggagagaattcgcaagttccagattctcaatgatgagatcatcaccatcctggataagtacctgaagtcaggcgacggggagggcacgccagtggagcatgtgcgctgcttccagccgcccatccaccagtccctcgccagcagctgagggcacgcgctgcactccgtaactcaacatggcatgcctttctctccgtaaactatttagtgagatttttagggactatttttcagtatctctgtacctgttaaagggggtgcttttcgatctaaaaacttaattttataaaattgacttatttttctagactaaaattgtatatgcttttggtaattaggaactcttgagaatattggctgctgattgttgccatcacgttcctacaaaattgtttttctatgggatgttctggcagctgtgtcataaaatgctgctgggttcattcattcattccataagaaacttaataccagcaaatgcattaaatcccttgccagttaccattaactgtaactatttagcttttgtttagggatctttctgatggtcttttatgagcaatcttagttctaagtcattgttcccatcccttttttgtgtgtttcagaaaatagtgaacttgattcccctgcttccactaaatccagttgtgacaaaatctaacgtgacatcagatcgaaaggttatagaaataaaactaatgagatct

SEQ ID NO: 7526 - DNA, 544 bp, Homo sapiens
  source 1..544: mol_type = unassigned DNA
agttttcctaaacacgcctgtgaccagctgactccactcagcgtttccgtgtgagcccaggatggcggcccaggtgactctggaggacgcgctgtccaacgtggacctcctggaggagctgcccctgcccgaccagcagccctgcatcgagcccccgccatcctcgctgctctaccagccaaatttcaacactaactttgaagacagaaatgcatttgttactggcatcgcaagatacattgaacaagccaccgtccactctagcatgaacgagatgctggaggagggccaagaatatgctgtcatgctgtacacctggaggagctgctcccgggccatcccacaggtgaaatgtaacgagcagcctaacagagtggaaatctacgagaaaaccgtggaggttctggagcctgaggtcacaaaactgatgaatttcatgtacttccagagaaatgccattgagcgtttctgcggggaagtgaggcgcctgtgccatgccgagaggaggaaggacttcgtgtcagaagcctacctgatcacactg

SEQ ID NO: 7527 - DNA, 582 bp, Homo sapiens
  source 1..582: mol_type = unassigned DNA
gtgtttcctggcgcattcccggccagcccgagtgactcactcggccaaggaaactcccagggcccgcccaggacccccaagccgccgcggacgcagaacaggggtccttatgtgttgttccagcccaggatggcggcccaggtgactctggaggacgcgctgtccaacgtggacctcctggaggagctgcccctgcccgaccagcagccctgcatcgagcccccgccatcctcgctgctctaccagccaaatttcaacactaactttgaagacagaaatgcatttgttactggcatcgcaagatacattgaacaagccaccgtccactctagcatgaacgagatgctggaggagggccaagaatatgctgtcatgctgtacacctggaggagctgctcccgggccatcccacaggtgaaatgtaacgagcagcctaacagagtggaaatctacgagaaaaccgtggaggttctggagcctgaggtcacaaaactgatgaatttcatgtacttccagagaaatgccattgagcgtttctgcggggaagtgaggcgcctgtgccatgccgagaggaggaaggac

SEQ ID NO: 7528 - DNA, 6573 bp, Homo sapiens
  source 1..6573: mol_type = unassigned DNA
cggggccggggcggggccgagcgcggcgcagcggagcggggcagagcatcctgcgccccggcgcggggccctgcggtagcctcaggcccctcccctggacccgccgcagagccagtgcagaatacagaaactgcagccatgaccacgcacgtcaccctggaagatgccctgtccaacgtggacctgcttgaagagcttcccctccccgaccagcagccatgcatcgagcctccaccttcctccatcatgtaccaggctaactttgacacaaactttgaggacaggaatgcatttgtcacgggcattgcaaggtacattgagcaggctacagtccactccagcatgaatgagatgctggaggaaggacatgagtatgcggtcatgctgtacacctggcgcagctgttcccgggccattcccagggtgaaatgcaacgagcagcccaaccgagtagagatctatgagaagacagtagaggtgctggagccggaggtcaccaagctcatgaagttcatgtattttcagcgcaaggccatcgagcggttctgcagcgaggtgaagcggctgtgccatgccgagcgcaggaaggactttgtctctgaggcctacctcctgacccttggcaagttcatcaacatgtttgctgtcctggatgagctaaagaacatgaagtgcagcgtcaagaatgaccactctgcctacaagagggcagcacagttcctgcggaagatggcagatccccagtctatccaggagtcgcagaacctttccatgttcctggccaaccacaacaggatcacccagtgtctccaccagcaacttgaagtgatcccaggctatgaggagctgctggctgacattgtcaacatctgtgtggattactacgagaacaagatgtacctgactcccagtgagaaacatatgctcctcaaggtgatgggctttggcctctacctaatggatggaaatgtcagtaacatttacaaactggatgccaagaagagaattaatcttagcaaaattgataaattctttaagcagctgcaggtggtgccccttttcggcgacatgcagatagagctggccagatacattaagaccagtgctcactatgaagagaacaagtccaagtggacgtgcacccagagcagcatcagcccccagtacaatatctgcgagcagatggttcagatccgggatgaccacatccgcttcatctccgagctcgctcgctacagcaacagtgaggtggtgacgggctcagggctggacagccagaagtcagacgaggagtatcgcgagctcttcgacctagccctgcggggtctgcagcttctatccaagtggagcgcccacgtcatggaggtgtactcttggaagctggttcatcccacagacaagttctgcaacaaggactgtcctggcaccgcggaggaatatgagagagccacacgctacaattacaccagtgaggaaaaatttgccttcgttgaggtgatcgccatgatcaaaggcctgcaggtgctcatgggcaggatggagagcgtcttcaaccaggccatcaggaacaccatctacgcggcattgcaggacttcgcccaggtgacgctgcgtgagcccctgcggcaggcggtacggaagaagaagaatgtcctcatcagcgtcctacaggcaattcgaaagaccatctgtgactgggagggagggcgagagccccctaatgacccatgcttgagaggggagaaggaccccaaaggtggatttgatatcaaggtgccccggcgtgctgtggggccatccagcacacaggcctgccagtggtccccgagggctttgtttcaccccactggtggcacacagggccgaagaggctgccgatccctgctgtacatggtgcggaccatgcttgaatcactcattgcagacaaaagcggctccaagaagaccctgaggagcagcctggatggacccattgtcctcgccatagaggactttcacaaacagtccttcttcttcacacatctgctcaacatcagtgaagccctgcagcagtgttgtgacctctcccagctctggttccgagaattcttcctggagttaaccatgggccgacgaatccagttccccatcgagatgtccatgccctggattctaacggaccatatcctggaaaccaaagaaccttccatgatggagtatgtcctctaccctctggatctgtacaacgacagcgcctactatgctctgaccaagtttaaaaagcagttcctgtacgatgagatagaagctgaggtgaacctgtgttttgatcagtttgtctacaagctggcagaccagatctttgcttactacaaagccatggctggcagtgtcctgttggataaacgttttcgagctgagtgtaagaattatggcgtcatcattccgtatccaccgtccaatcgctatgaaacactgctgaagcagagacacgtccagctgttgggtagatcaattgacttgaacagactcattacccagcgcatctctgccgccatgtataaatccttggaccaagctatcagccgctttgagagtgaggacctgacctccattgtggagctggagtggctgctggagattaaccggctcacgcatcggctgctctgtaagcatatgacgctggacagcttcgatgccatgttccgagaggccaatcacaatgtgtccgccccctatggccgtatcaccctgcatgtcttctgggaactgaactttgactttctccccaactactgctacaatgggtccactaaccgttttgtgcggactgccattcctttcacccaagaaccacaacgagacaaacctgccaacgtccagccttattacctctatggatccaagcctctcaacattgcctacagccacatctacagctcctacaggaatttcgtggggccacctcatttcaagactatctgcagactcctgggttatcagggcatcgctgtggtcatggaggaactgctaaagattgtgaagagcttgctccaaggaaccattctccagtatgtgaaaacactgatagaggtgatgcccaagatatgccgcttgccccgacatgagtatggctccccagggatcctggagttcttccaccaccagctgaaggacatcattgagtacgcagagctcaaaacagacgtgttccagagcctgagggaagtgggcaatgccatcctcttctgcctcctcatagagcaagctctgtctcaggaggaggtctgcgatttgctccatgccgcacccttccaaaacatcttgcctagagtctacatcaaagagggggagcgcctggaggtccggatgaaacgtctggaagccaagtatgccccgctccacctggtccctctgatcgagcggctggggacccctcagcaaatcgccattgctcgcgagggtgacctcctgaccaaggagcggctgtgctgtggcctgtccatgttcgaggtcatcctgacccgcattcggagctacctgcaggaccccatctggcggggcccaccgcccaccaatggcgtcatgcacgtcgatgagtgtgtggagttccaccggctgtggagcgccatgcagttcgtgtactgcatccctgtgggaaccaacgagttcacagctgagcagtgtttcggcgatggcttgaactgggctggttgctccatcattgtcctgctgggccagcagcgtcgctttgacctgttcgacttctgttaccacctgctaaaagtgcagaggcaggacgggaaggatgaaatcattaagaatgtgcccctgaagaagatggccgaccggatcaggaagtatcagatcttgaacaatgaggtttttgccatcctgaacaaatacatgaagtccgtggagacagacagttccactgtggagcatgtgcgctgcttccagccacccatccaccagtccttggccaccacttgctaagcagaagatcctgcagacccttatctggaggaggaagagaagcaggagagagaaagccacagccagcctgccataggatccaactggacaacgtgtgggatggacctggaaacaagcacctccccaaacacatcaccactccctagggcggggcctgtgcatgctctcccatgacatctccatgctggtttctccatagcataaatgaaaaaaaaaaaaaaaaagtaaacagggcagtgtgtgctttttcttttctcccccctcaactatattaagaactcctagtttcaccctttctccatcccatcatcccacctatctgtggttgcttcccaagacctcctcccaagatagacatctcctacccagtgcccttgtgtgaccccaggactcaagtctcagactgtgaacagatgtggccatgcccagagacgccagcctggccagaagggcatgcctcagcttactacttcatctctcctggttccctccctgcagtgccccgggtgtcatcttctcccactctgggtaccagggattctaccacataggcttcccaaagccccattctaactcccctctctcagggaagccctagagagaggtccaaaaagcattcacagctgtatcacactctatgcaggtggggtaggagactgatcaggcctgctgtggggaagcagtatgtatgaacacagccagaaatgtcatagtccaaacaggatgctttcaggccatctcagctgcttgatggtgagatggttcccttattccttcaggaaaggcttagcattgggccacataggggaagcagctttgaacaaatcagtcatagcactgcctatagcattagccagtgaccaaattagggacaacgtcttggcacagaattgcttatcaaggaacatttccacaagaaagaaaatattaaggggttatttccacagaagcccaaaacgtcttggaaacacagaggtgaggaggaggaatagtaattgtcaatgagcttttaataccaagatacaccccctgcccccaaagaagagtcctcttttagggaatcagaaccttcattgtcctagaagctgaaagattcttggaacattttagcttttactctcaacttgctgttctctttacattccttaagttagactttcgggtgtggcttctctcccaggggtaacatttacttccattttctagactgaaccaaaagtcttctgcagaatctcccaccgagtgtggtaagaaggaaggacaaaaggctttaggatataaatttcatgttacagagcatgtcattgtcaaaggaaatctgtggccctgagattttaagaacataaaatgtgacatttgatatttctccagcccagggaagtaagatggttagcaatggttgccttaatcaaatggtcccatttttaaccccaaaggaagtgcccacagcaagaggtttgtgtgatgcacttatgtcctccggtgaggaaagggggccacatatgaaaggccccttaggtcagatcctgagagtagcacatttgagtgcagattcctgggccccacctcaaacctactaattctgaatctctgggaatagggccaggaaatctgccctttctacaaactacccaagttgttctgttgcacatcaatgtttgggaaccactgctgtaagggaatcattctggtcaccttgagctttgagctaccactaagccatgaaagaaaatacatcatacagggaagagagaagggaggaggttccaagtagtaactggcagatcctcctgtctggaggtaccaccttctattctggtttctgacttttccttcttgatgaccatagatgtgttccagaggcaaaagagacacattatcccagatggcagaacatgctttcaaaacatataaaatgtcaaagttccagatccttctacatctttagtcctgtctgaggatggtagctggctctctgtagctgatagatggctagagttccatccaaatccttgaccacgacttcatggagatttgaataatctatttgatgagatttctatttcaataacccacctctctcaccccacattcatatccctaaatttgaccctctgggccgagtcacattaccttcaggagacttgatcccagtagactgaggtcttccctttcagcagaaagatttcatttccctggcttgccagtggcactgatttccgaacacccaatgagtttaatattctttcctccttggcattactgccccagcctctttttattttttttgtgtgtgtctaataaccaggaaaaaaataaagcttaggttttaaaaagttttaaaaataatctgtttcagaaactgtcaaatgtaccatatttgtattaagagttgttgggaatttttgtacaatgaatttacatttatttatggtgacatatttacgcttgtgatcaaataatgatgttaaattcttaaatcatatttgctatgcagctgaagatgatattttgatttgtattttgggggtacctgtgttgagttgataaacatttccatcttcattaaaactgcttccaaactagtaaaaccagcaa

SEQ ID NO: 7529 - DNA, 6791 bp, Homo sapiens
  source 1..6791: mol_type = unassigned DNA
ggacccgccgcagagccaggtaagcggccctcgcaggcctcgggccgggcacggggactaggatgccgccggggacggggatgaggccgtgaggatgcgcgaagggccgccccctctcccggcccgcggggggcgctcggcgctgtgcccgggctagcccgaggcccggcctcaggccccacgcggcccctttccccctcggacccaccgtgcgtcccgcggcacggaccctctgcccgggaggcgcgggcacatcgcggagctccggcgcggcggcgggggagccgcagcagcaggtgcgcggcctgggccggagccgccagcccgggaggaggcggtgctaatctcagggaccggagacacctgcagcggccgcgagcccggcagcggcgacatcctcgagtccagtgcagaatacagaaactgcagccatgaccacgcacgtcaccctggaagatgccctgtccaacgtggacctgcttgaagagcttcccctccccgaccagcagccatgcatcgagcctccaccttcctccatcatgtaccaggctaactttgacacaaactttgaggacaggaatgcatttgtcacgggcattgcaaggtacattgagcaggctacagtccactccagcatgaatgagatgctggaggaaggacatgagtatgcggtcatgctgtacacctggcgcagctgttcccgggccattcccaaggtgaaatgcaacgagcagcccaaccgagtagagatctatgagaagacagtagaggtgctggagccggaggtcaccaagctcatgaagttcatgtattttcagcgcaaggccatcgagcggttctgcagcgaggtgaagcggctgtgccatgccgagcgcaggaaggactttgtctctgaggcctacctcctgacccttggcaagttcatcaacatgtttgctgtcctggatgagctaaagaacatgaagtgcagcgtcaagaatgaccactctgcctacaagagggcagcacagttcctgcggaagatggcagatccccagtctatccaggagtcgcagaacctttccatgttcctggccaaccacaacaggatcacccagtgtctccaccagcaacttgaagtgatcccaggctatgaggagctgctggctgacattgtcaacatctgtgtggattactacgagaacaagatgtacctgactcccagtgagaaacatatgctcctcaaggtgatgggctttggcctctacctaatggatggaaatgtcagtaacatttacaaactggatgccaagaagagaattaatcttagcaaaattgataaattctttaagcagctgcaggtggtgccccttttcggcgacatgcagatagagctggccagatacattaagaccagtgctcactatgaagagaacaagtccaagtggacgtgcacccagagcagcatcagcccccagtacaatatctgcgagcagatggttcagatccgggatgaccacatccgcttcatctccgagctcgctcgctacagcaacagtgaggtggtgacgggctcagggctggacagccagaagtcagacgaggagtatcgcgagctcttcgacctagccctgcggggtctgcagcttctatccaagtggagcgcccacgtcatggaggtgtactcttggaagctggttcatcccacagacaagttctgcaacaaggactgtcctggcaccgcggaggaatatgagagagccacacgctacaattacaccagtgaggaaaaatttgccttcgttgaggtgatcgccatgatcaaaggcctgcaggtgctcatgggcaggatggagagcgtcttcaaccaggccatcaggaacaccatctacgcggcattgcaggacttcgcccaggtgacgctgcgtgagcccctgcggcaggcggtacggaagaagaagaatgtcctcatcagcgtcctacaggcaattcgaaagaccatctgtgactgggagggagggcgagagccccctaatgacccatgcttgagaggggagaaggaccccaaaggtggatttgatatcaaggtgccccggcgtgctgtggggccatccagcacacagctgtacatggtgcggaccatgcttgaatcactcattgcagacaaaagcggctccaagaagaccctgaggagcagcctggatggacccattgtcctcgccatagaggactttcacaaacagtccttcttcttcacacatctgctcaacatcagtgaagccctgcagcagtgttgtgacctctcccagctctggttccgagaattcttcctggagttaaccatgggccgacgaatccagttccccatcgagatgtccatgccctggattctaacggaccatatcctggaaaccaaagaaccttccatgatggagtatgtcctctaccctctggatctgtacaacgacagcgcctactatgctctgaccaagtttaaaaagcagttcctgtacgatgagatagaagctgaggtgaacctgtgttttgatcagtttgtctacaagctggcagaccagatctttgcttactacaaagccatggctggcagtgtcctgttggataaacgttttcgagctgagtgtaagaattatggcgtcatcattccgtatccaccgtccaatcgctatgaaacactgctgaagcagagacacgtccagctgttgggtagatcaattgacttgaacagactcattacccagcgcatctctgccgccatgtataaatccttggaccaagctatcagccgctttgagagtgaggacctgacctccattgtggagctggagtggctgctggagattaaccggctcacgcatcggctgctctgtaagcatatgacgctggacagcttcgatgccatgttccgagaggccaatcacaatgtgtccgccccctatggccgtatcaccctgcatgtcttctgggaactgaactttgactttctccccaactactgctacaatgggtccactaaccgttttgtgcggactgccattcctttcacccaagaaccacaacgagacaaacctgccaacgtccagccttattacctctatggatccaagcctctcaacattgcctacagccacatctacagctcctacaggaatttcgtggggccacctcatttcaagactatctgcagactcctgggttatcagggcatcgctgtggtcatggaggaactgctaaagattgtgaagagcttgctccaaggaaccattctccagtatgtgaaaacactgatagaggtgatgcccaagatatgccgcttgccccgacatgagtatggctccccagggatcctggagttcttccaccaccagctgaaggacatcattgagtacgcagagctcaaaacagacgtgttccagagcctgagggaagtgggcaatgccatcctcttctgcctcctcatagagcaagctctgtctcaggaggaggtctgcgatttgctccatgccgcacccttccaaaacatcttgcctagagtctacatcaaagagggggagcgcctggaggtccggatgaaacgtctggaagccaagtatgccccgctccacctggtccctctgatcgagcggctggggacccctcagcaaatcgccattgctcgcgagggtgacctcctgaccaaggagcggctgtgctgtggcctgtccatgttcgaggtcatcctgacccgcattcggagctacctgcaggaccccatctggcggggcccaccgcccaccaatggcgtcatgcacgtcgatgagtgtgtggagttccaccggctgtggagcgccatgcagttcgtgtactgcatccctgtgggaaccaacgagttcacagctgagcagtgtttcggcgatggcttgaactgggctggttgctccatcattgtcctgctgggccagcagcgtcgctttgacctgttcgacttctgttaccacctgctaaaagtgcagaggcaggacgggaaggatgaaatcattaagaatgtgcccctgaagaagatggccgaccggatcaggaagtatcagatcttgaacaatgaggtttttgccatcctgaacaaatacatgaagtccgtggagacagacagttccactgtggagcatgtgcgctgcttccagccacccatccaccagtccttggccaccacttgctaagcagaagatcctgcagacccttatctggaggaggaagagaagcaggagagagaaagccacagccagcctgccataggatccaactggacaacgtgtgggatggacctggaaacaagcacctccccaaacacatcaccactccctagggcggggcctgtgcatgctctcccatgacatctccatgctggtttctccatagcataaatgaaaaaaaaaaaaaaaaagtaaacagggcagtgtgtgctttttcttttctcccccctcaactatattaagaactcctagtttcaccctttctccatcccatcatcccacctatctgtggttgcttcccaagacctcctcccaagatagacatctcctacccagtgcccttgtgtgaccccaggactcaagtctcagactgtgaacagatgtggccatgcccagagacgccagcctggccagaagggcatgcctcagcttactacttcatctctcctggttccctccctgcagtgccccgggtgtcatcttctcccactctgggtaccagggattctaccacataggcttcccaaagccccattctaactcccctctctcagggaagccctagagagaggtccaaaaagcattcacagctgtatcacactctatgcaggtggggtaggagactgatcaggcctgctgtggggaagcagtatgtatgaacacagccagaaatgtcatagtccaaacaggatgctttcaggccatctcagctgcttgatggtgagatggttcccttattccttcaggaaaggcttagcattgggccacataggggaagcagctttgaacaaatcagtcatagcactgcctatagcattagccagtgaccaaattagggacaacgtcttggcacagaattgcttatcaaggaacatttccacaagaaagaaaatattaaggggttatttccacagaagcccaaaacgtcttggaaacacagaggtgaggaggaggaatagtaattgtcaatgagcttttaataccaagatacaccccctgcccccaaagaagagtcctcttttagggaatcagaaccttcattgtcctagaagctgaaagattcttggaacattttagcttttactctcaacttgctgttctctttacattccttaagttagactttcgggtgtggcttctctcccaggggtaacatttacttccattttctagactgaaccaaaagtcttctgcagaatctcccaccgagtgtggtaagaaggaaggacaaaaggctttaggatataaatttcatgttacagagcatgtcattgtcaaaggaaatctgtggccctgagattttaagaacataaaatgtgacatttgatatttctccagcccagggaagtaagatggttagcaatggttgccttaatcaaatggtcccatttttaaccccaaaggaagtgcccacagcaagaggtttgtgtgatgcacttatgtcctccggtgaggaaagggggccacatatgaaaggccccttaggtcagatcctgagagtagcacatttgagtgcagattcctgggccccacctcaaacctactaattctgaatctctgggaatagggccaggaaatctgccctttctacaaactacccaagttgttctgttgcacatcaatgtttgggaaccactgctgtaagggaatcattctggtcaccttgagctttgagctaccactaagccatgaaagaaaatacatcatacagggaagagagaagggaggaggttccaagtagtaactggcagatcctcctgtctggaggtaccaccttctattctggtttctgacttttccttcttgatgaccatagatgtgttccagaggcaaaagagacacattatcccagatggcagaacatgctttcaaaacatataaaatgtcaaagttccagatccttctacatctttagtcctgtctgaggatggtagctggctctctgtagctgatagatggctagagttccatccaaatccttgaccacgacttcatggagatttgaataatctatttgatgagatttctatttcaataacccacctctctcaccccacattcatatccctaaatttgaccctctgggccgagtcacattaccttcaggagacttgatcccagtagactgaggtcttccctttcagcagaaagatttcatttccctggcttgccagtggcactgatttccgaacacccaatgagtttaatattctttcctccttggcattactgccccagcctctttttattttttttgtgtgtgtctaataaccaggaaaaaaataaagcttaggttttaaaaagttttaaaaataatctgtttcagaaactgtcaaatgtaccatatttgtattaagagttgttgggaatttttgtacaatgaatttacatttatttatggtgacatatttacgcttgtgatcaaataatgatgttaaattcttaaatcatatttgctatgcagctgaagatgatattttgatttgtattttgggggtacctgtgttgagttgataaacatttccatcttcattaaaactgcttccaaactagtaaaaccagcaa

SEQ ID NO: 7530 - DNA, 6615 bp, Homo sapiens
  source 1..6615: mol_type = unassigned DNA
ggaagggcctcttcctctgtgagaattcagcattttgcaaccatccaaaaatgttgagggcatgctttgcttccagggcagacagagcagcacagtgagcatgggacacaggatccctgacttgctgtgtgcccttaaaccagccactacctctctgacgttcaaaattgagcaatggaaggcagcctgcccaactgttacctgcctgtcatcatgaaagcctgcggatgagtgcagaatacagaaactgcagccatgaccacgcacgtcaccctggaagatgccctgtccaacgtggacctgcttgaagagcttcccctccccgaccagcagccatgcatcgagcctccaccttcctccatcatgtaccaggctaactttgacacaaactttgaggacaggaatgcatttgtcacgggcattgcaaggtacattgagcaggctacagtccactccagcatgaatgagatgctggaggaaggacatgagtatgcggtcatgctgtacacctggcgcagctgttcccgggccattcccaaggtgaaatgcaacgagcagcccaaccgagtagagatctatgagaagacagtagaggtgctggagccggaggtcaccaagctcatgaagttcatgtattttcagcgcaaggccatcgagcggttctgcagcgaggtgaagcggctgtgccatgccgagcgcaggaaggactttgtctctgaggcctacctcctgacccttggcaagttcatcaacatgtttgctgtcctggatgagctaaagaacatgaagtgcagcgtcaagaatgaccactctgcctacaagagggcagcacagttcctgcggaagatggcagatccccagtctatccaggagtcgcagaacctttccatgttcctggccaaccacaacaggatcacccagtgtctccaccagcaacttgaagtgatcccaggctatgaggagctgctggctgacattgtcaacatctgtgtggattactacgagaacaagatgtacctgactcccagtgagaaacatatgctcctcaaggtgatgggctttggcctctacctaatggatggaaatgtcagtaacatttacaaactggatgccaagaagagaattaatcttagcaaaattgataaattctttaagcagctgcaggtggtgccccttttcggcgacatgcagatagagctggccagatacattaagaccagtgctcactatgaagagaacaagtccaagtggacgtgcacccagagcagcatcagcccccagtacaatatctgcgagcagatggttcagatccgggatgaccacatccgcttcatctccgagctcgctcgctacagcaacagtgaggtggtgacgggctcagggctggacagccagaagtcagacgaggagtatcgcgagctcttcgacctagccctgcggggtctgcagcttctatccaagtggagcgcccacgtcatggaggtgtactcttggaagctggttcatcccacagacaagttctgcaacaaggactgtcctggcaccgcggaggaatatgagagagccacacgctacaattacaccagtgaggaaaaatttgccttcgttgaggtgatcgccatgatcaaaggcctgcaggtgctcatgggcaggatggagagcgtcttcaaccaggccatcaggaacaccatctacgcggcattgcaggacttcgcccaggtgacgctgcgtgagcccctgcggcaggcggtacggaagaagaagaatgtcctcatcagcgtcctacaggcaattcgaaagaccatctgtgactgggagggagggcgagagccccctaatgacccatgcttgagaggggagaaggaccccaaaggtggatttgatatcaaggtgccccggcgtgctgtggggccatccagcacacagctgtacatggtgcggaccatgcttgaatcactcattgcagacaaaagcggctccaagaagaccctgaggagcagcctggatggacccattgtcctcgccatagaggactttcacaaacagtccttcttcttcacacatctgctcaacatcagtgaagccctgcagcagtgttgtgacctctcccagctctggttccgagaattcttcctggagttaaccatgggccgacgaatccagttccccatcgagatgtccatgccctggattctaacggaccatatcctggaaaccaaagaaccttccatgatggagtatgtcctctaccctctggatctgtacaacgacagcgcctactatgctctgaccaagtttaaaaagcagttcctgtacgatgagatagaagctgaggtgaacctgtgttttgatcagtttgtctacaagctggcagaccagatctttgcttactacaaagccatggctggcagtgtcctgttggataaacgttttcgagctgagtgtaagaattatggcgtcatcattccgtatccaccgtccaatcgctatgaaacactgctgaagcagagacacgtccagctgttgggtagatcaattgacttgaacagactcattacccagcgcatctctgccgccatgtataaatccttggaccaagctatcagccgctttgagagtgaggacctgacctccattgtggagctggagtggctgctggagattaaccggctcacgcatcggctgctctgtaagcatatgacgctggacagcttcgatgccatgttccgagaggccaatcacaatgtgtccgccccctatggccgtatcaccctgcatgtcttctgggaactgaactttgactttctccccaactactgctacaatgggtccactaaccgttttgtgcggactgccattcctttcacccaagaaccacaacgagacaaacctgccaacgtccagccttattacctctatggatccaagcctctcaacattgcctacagccacatctacagctcctacaggaatttcgtggggccacctcatttcaagactatctgcagactcctgggttatcagggcatcgctgtggtcatggaggaactgctaaagattgtgaagagcttgctccaaggaaccattctccagtatgtgaaaacactgatagaggtgatgcccaagatatgccgcttgccccgacatgagtatggctccccagggatcctggagttcttccaccaccagctgaaggacatcattgagtacgcagagctcaaaacagacgtgttccagagcctgagggaagtgggcaatgccatcctcttctgcctcctcatagagcaagctctgtctcaggaggaggtctgcgatttgctccatgccgcacccttccaaaacatcttgcctagagtctacatcaaagagggggagcgcctggaggtccggatgaaacgtctggaagccaagtatgccccgctccacctggtccctctgatcgagcggctggggacccctcagcaaatcgccattgctcgcgagggtgacctcctgaccaaggagcggctgtgctgtggcctgtccatgttcgaggtcatcctgacccgcattcggagctacctgcaggaccccatctggcggggcccaccgcccaccaatggcgtcatgcacgtcgatgagtgtgtggagttccaccggctgtggagcgccatgcagttcgtgtactgcatccctgtgggaaccaacgagttcacagctgagcagtgtttcggcgatggcttgaactgggctggttgctccatcattgtcctgctgggccagcagcgtcgctttgacctgttcgacttctgttaccacctgctaaaagtgcagaggcaggacgggaaggatgaaatcattaagaatgtgcccctgaagaagatggccgaccggatcaggaagtatcagatcttgaacaatgaggtttttgccatcctgaacaaatacatgaagtccgtggagacagacagttccactgtggagcatgtgcgctgcttccagccacccatccaccagtccttggccaccacttgctaagcagaagatcctgcagacccttatctggaggaggaagagaagcaggagagagaaagccacagccagcctgccataggatccaactggacaacgtgtgggatggacctggaaacaagcacctccccaaacacatcaccactccctagggcggggcctgtgcatgctctcccatgacatctccatgctggtttctccatagcataaatgaaaaaaaaaaaaaaaaagtaaacagggcagtgtgtgctttttcttttctcccccctcaactatattaagaactcctagtttcaccctttctccatcccatcatcccacctatctgtggttgcttcccaagacctcctcccaagatagacatctcctacccagtgcccttgtgtgaccccaggactcaagtctcagactgtgaacagatgtggccatgcccagagacgccagcctggccagaagggcatgcctcagcttactacttcatctctcctggttccctccctgcagtgccccgggtgtcatcttctcccactctgggtaccagggattctaccacataggcttcccaaagccccattctaactcccctctctcagggaagccctagagagaggtccaaaaagcattcacagctgtatcacactctatgcaggtggggtaggagactgatcaggcctgctgtggggaagcagtatgtatgaacacagccagaaatgtcatagtccaaacaggatgctttcaggccatctcagctgcttgatggtgagatggttcccttattccttcaggaaaggcttagcattgggccacataggggaagcagctttgaacaaatcagtcatagcactgcctatagcattagccagtgaccaaattagggacaacgtcttggcacagaattgcttatcaaggaacatttccacaagaaagaaaatattaaggggttatttccacagaagcccaaaacgtcttggaaacacagaggtgaggaggaggaatagtaattgtcaatgagcttttaataccaagatacaccccctgcccccaaagaagagtcctcttttagggaatcagaaccttcattgtcctagaagctgaaagattcttggaacattttagcttttactctcaacttgctgttctctttacattccttaagttagactttcgggtgtggcttctctcccaggggtaacatttacttccattttctagactgaaccaaaagtcttctgcagaatctcccaccgagtgtggtaagaaggaaggacaaaaggctttaggatataaatttcatgttacagagcatgtcattgtcaaaggaaatctgtggccctgagattttaagaacataaaatgtgacatttgatatttctccagcccagggaagtaagatggttagcaatggttgccttaatcaaatggtcccatttttaaccccaaaggaagtgcccacagcaagaggtttgtgtgatgcacttatgtcctccggtgaggaaagggggccacatatgaaaggccccttaggtcagatcctgagagtagcacatttgagtgcagattcctgggccccacctcaaacctactaattctgaatctctgggaatagggccaggaaatctgccctttctacaaactacccaagttgttctgttgcacatcaatgtttgggaaccactgctgtaagggaatcattctggtcaccttgagctttgagctaccactaagccatgaaagaaaatacatcatacagggaagagagaagggaggaggttccaagtagtaactggcagatcctcctgtctggaggtaccaccttctattctggtttctgacttttccttcttgatgaccatagatgtgttccagaggcaaaagagacacattatcccagatggcagaacatgctttcaaaacatataaaatgtcaaagttccagatccttctacatctttagtcctgtctgaggatggtagctggctctctgtagctgatagatggctagagttccatccaaatccttgaccacgacttcatggagatttgaataatctatttgatgagatttctatttcaataacccacctctctcaccccacattcatatccctaaatttgaccctctgggccgagtcacattaccttcaggagacttgatcccagtagactgaggtcttccctttcagcagaaagatttcatttccctggcttgccagtggcactgatttccgaacacccaatgagtttaatattctttcctccttggcattactgccccagcctctttttattttttttgtgtgtgtctaataaccaggaaaaaaataaagcttaggttttaaaaagttttaaaaataatctgtttcagaaactgtcaaatgtaccatatttgtattaagagttgttgggaatttttgtacaatgaatttacatttatttatggtgacatatttacgcttgtgatcaaataatgatgttaaattcttaaatcatatttgctatgcagctgaagatgatattttgatttgtattttgggggtacctgtgttgagttgataaacatttccatcttcattaaaactgcttccaaactagtaaaaccagcaa

SEQ ID NO: 7531 - DNA, 5457 bp, Homo sapiens
  source 1..5457: mol_type = unassigned DNA
gaaaaaaggcggaggtggacgtgcacccagagcagcatcagcccccagtacaatatctgcgagcagatggttcagatccgggatgaccacatccgcttcatctccgagctcgctcgctacagcaacagtgaggtggtgacgggctcagggctggacagccagaagtcagacgaggagtatcgcgagctcttcgacctagccctgcggggtctgcagcttctatccaagtggagcgcccacgtcatggaggtgtactcttggaagctggttcatcccacagacaagttctgcaacaaggactgtcctggcaccgcggaggaatatgagagagccacacgctacaattacaccagtgaggaaaaatttgccttcgttgaggtgatcgccatgatcaaaggcctgcaggtgctcatgggcaggatggagagcgtcttcaaccaggccatcaggaacaccatctacgcggcattgcaggacttcgcccaggtgacgctgcgtgagcccctgcggcaggcggtacggaagaagaagaatgtcctcatcagcgtcctacaggcaattcgaaagaccatctgtgactgggagggagggcgagagccccctaatgacccatgcttgagaggggagaaggaccccaaaggtggatttgatatcaaggtgccccggcgtgctgtggggccatccagcacacaggcctgccagtggtccccgagggctttgtttcaccccactggtggcacacagggccgaagaggctgccgatccctgctgtacatggtgcggaccatgcttgaatcactcattgcagacaaaagcggctccaagaagaccctgaggagcagcctggatggacccattgtcctcgccatagaggactttcacaaacagtccttcttcttcacacatctgctcaacatcagtgaagccctgcagcagtgttgtgacctctcccagctctggttccgagaattcttcctggagttaaccatgggccgacgaatccagttccccatcgagatgtccatgccctggattctaacggaccatatcctggaaaccaaagaaccttccatgatggagtatgtcctctaccctctggatctgtacaacgacagcgcctactatgctctgaccaagtttaaaaagcagttcctgtacgatgagatagaagctgaggtgaacctgtgttttgatcagtttgtctacaagctggcagaccagatctttgcttactacaaagccatggctggcagtgtcctgttggataaacgttttcgagctgagtgtaagaattatggcgtcatcattccgtatccaccgtccaatcgctatgaaacactgctgaagcagagacacgtccagctgttgggtagatcaattgacttgaacagactcattacccagcgcatctctgccgccatgtataaatccttggaccaagctatcagccgctttgagagtgaggacctgacctccattgtggagctggagtggctgctggagattaaccggctcacgcatcggctgctctgtaagcatatgacgctggacagcttcgatgccatgttccgagaggccaatcacaatgtgtccgccccctatggccgtatcaccctgcatgtcttctgggaactgaactttgactttctccccaactactgctacaatgggtccactaaccgttttgtgcggactgccattcctttcacccaagaaccacaacgagacaaacctgccaacgtccagccttattacctctatggatccaagcctctcaacattgcctacagccacatctacagctcctacaggaatttcgtggggccacctcatttcaagactatctgcagactcctgggttatcagggcatcgctgtggtcatggaggaactgctaaagattgtgaagagcttgctccaaggaaccattctccagtatgtgaaaacactgatagaggtgatgcccaagatatgccgcttgccccgacatgagtatggctccccagggatcctggagttcttccaccaccagctgaaggacatcattgagtacgcagagctcaaaacagacgtgttccagagcctgagggaagtgggcaatgccatcctcttctgcctcctcatagagcaagctctgtctcaggaggaggtctgcgatttgctccatgccgcacccttccaaaacatcttgcctagagtctacatcaaagagggggagcgcctggaggtccggatgaaacgtctggaagccaagtatgccccgctccacctggtccctctgatcgagcggctggggacccctcagcaaatcgccattgctcgcgagggtgacctcctgaccaaggagcggctgtgctgtggcctgtccatgttcgaggtcatcctgacccgcattcggagctacctgcaggaccccatctggcggggcccaccgcccaccaatggcgtcatgcacgtcgatgagtgtgtggagttccaccggctgtggagcgccatgcagttcgtgtactgcatccctgtgggaaccaacgagttcacagctgagcagtgtttcggcgatggcttgaactgggctggttgctccatcattgtcctgctgggccagcagcgtcgctttgacctgttcgacttctgttaccacctgctaaaagtgcagaggcaggacgggaaggatgaaatcattaagaatgtgcccctgaagaagatggccgaccggatcaggaagtatcagatcttgaacaatgaggtttttgccatcctgaacaaatacatgaagtccgtggagacagacagttccactgtggagcatgtgcgctgcttccagccacccatccaccagtccttggccaccacttgctaagcagaagatcctgcagacccttatctggaggaggaagagaagcaggagagagaaagccacagccagcctgccataggatccaactggacaacgtgtgggatggacctggaaacaagcacctccccaaacacatcaccactccctagggcggggcctgtgcatgctctcccatgacatctccatgctggtttctccatagcataaatgaaaaaaaaaaaaaaaaagtaaacagggcagtgtgtgctttttcttttctcccccctcaactatattaagaactcctagtttcaccctttctccatcccatcatcccacctatctgtggttgcttcccaagacctcctcccaagatagacatctcctacccagtgcccttgtgtgaccccaggactcaagtctcagactgtgaacagatgtggccatgcccagagacgccagcctggccagaagggcatgcctcagcttactacttcatctctcctggttccctccctgcagtgccccgggtgtcatcttctcccactctgggtaccagggattctaccacataggcttcccaaagccccattctaactcccctctctcagggaagccctagagagaggtccaaaaagcattcacagctgtatcacactctatgcaggtggggtaggagactgatcaggcctgctgtggggaagcagtatgtatgaacacagccagaaatgtcatagtccaaacaggatgctttcaggccatctcagctgcttgatggtgagatggttcccttattccttcaggaaaggcttagcattgggccacataggggaagcagctttgaacaaatcagtcatagcactgcctatagcattagccagtgaccaaattagggacaacgtcttggcacagaattgcttatcaaggaacatttccacaagaaagaaaatattaaggggttatttccacagaagcccaaaacgtcttggaaacacagaggtgaggaggaggaatagtaattgtcaatgagcttttaataccaagatacaccccctgcccccaaagaagagtcctcttttagggaatcagaaccttcattgtcctagaagctgaaagattcttggaacattttagcttttactctcaacttgctgttctctttacattccttaagttagactttcgggtgtggcttctctcccaggggtaacatttacttccattttctagactgaaccaaaagtcttctgcagaatctcccaccgagtgtggtaagaaggaaggacaaaaggctttaggatataaatttcatgttacagagcatgtcattgtcaaaggaaatctgtggccctgagattttaagaacataaaatgtgacatttgatatttctccagcccagggaagtaagatggttagcaatggttgccttaatcaaatggtcccatttttaaccccaaaggaagtgcccacagcaagaggtttgtgtgatgcacttatgtcctccggtgaggaaagggggccacatatgaaaggccccttaggtcagatcctgagagtagcacatttgagtgcagattcctgggccccacctcaaacctactaattctgaatctctgggaatagggccaggaaatctgccctttctacaaactacccaagttgttctgttgcacatcaatgtttgggaaccactgctgtaagggaatcattctggtcaccttgagctttgagctaccactaagccatgaaagaaaatacatcatacagggaagagagaagggaggaggttccaagtagtaactggcagatcctcctgtctggaggtaccaccttctattctggtttctgacttttccttcttgatgaccatagatgtgttccagaggcaaaagagacacattatcccagatggcagaacatgctttcaaaacatataaaatgtcaaagttccagatccttctacatctttagtcctgtctgaggatggtagctggctctctgtagctgatagatggctagagttccatccaaatccttgaccacgacttcatggagatttgaataatctatttgatgagatttctatttcaataacccacctctctcaccccacattcatatccctaaatttgaccctctgggccgagtcacattaccttcaggagacttgatcccagtagactgaggtcttccctttcagcagaaagatttcatttccctggcttgccagtggcactgatttccgaacacccaatgagtttaatattctttcctccttggcattactgccccagcctctttttattttttttgtgtgtgtctaataaccaggaaaaaaataaagcttaggttttaaaaagttttaaaaataatctgtttcagaaactgtcaaatgtaccatatttgtattaagagttgttgggaatttttgtacaatgaatttacatttatttatggtgacatatttacgcttgtgatcaaataatgatgttaaattcttaaatcatatttgctatgcagctgaagatgatattttgatttgtattttgggggtacctgtgttgagttgataaacatttccatcttcattaaaactgcttccaaactagtaaaaccagcaa

SEQ ID NO: 7532 - DNA, 4102 bp, Homo sapiens
  source 1..4102: mol_type = unassigned DNA
cggggccggggcggggccgagcgcggcgcagcggagcggggcagagcatcctgcgccccggcgcggggccctgcggtagcctcaggcccctcccctggacccgccgcagagccagtgcagaatacagaaactgcagccatgaccacgcacgtcaccctggaagatgccctgtccaacgtggacctgcttgaagagcttcccctccccgaccagcagccatgcatcgagcctccaccttcctccatcatgtaccaggctaactttgacacaaactttgaggacaggaatgcatttgtcacgggcattgcaaggtacattgagcaggctacagtccactccagcatgaatgagatgctggaggaaggacatgagtatgcggtcatgctgtacacctggcgcagctgttcccgggccattcccaggtgaaatgcaacgagcagcccaaccgagtagagatctatgagaagacagtagaggtgctggagccggaggtcaccaagctcatgaagttcatgtattttcagcgcaaggccatcgagcggttctgcagcgaggtgaagcggctgtgccatgccgagcgcaggaaggactttgtctctgaggcctacctcctgacccttggcaagttcatcaacatgtttgctgtcctggatgagctaaagaacatgaagtgcagcgtcaagaatgaccactctgcctacaagagggcagcacagttcctgcggaagatggcagatccccagtctatccaggagtcgcagaacctttccatgttcctggccaaccacaacaggatcacccagtgtctccaccagcaacttgaagtgatcccaggctatgaggagctgctggctgacattgtcaacatctgtgtggattactacgagaacaagatgtacctgactcccagtgagaaacatatgctcctcaaggtgatgggctttggcctctacctaatggatggaaatgtcagtaacatttacaaactggatgccaagaagagaattaatcttagcaaaattgataaattctttaagcagctgcaggtggtgccccttttcggcgacatgcagatagagctggccagatacattaagaccagtgctcactatgaagagaacaagtccaagtggacgtgcacccagagcagcatcagcccccagtacaatatctgcgagcagatggttcagatccgggatgaccacatccgcttcatctccgagctcgctcgctacagcaacagtgaggtggtgacgggctcagggctggacagccagaagtcagacgaggagtatcgcgagctcttcgacctagccctgcggggtctgcagcttctatccaagtggagcgcccacgtcatggaggtgtactcttggaagctggttcatcccacagacaagttctgcaacaaggactgtcctggcaccgcggaggaatatgagagagccacacgctacaattacaccagtgaggaaaaatttgccttcgttgaggtgatcgccatgatcaaaggcctgcaggtgctcatgggcaggatggagagcgtcttcaaccaggccatcaggaacaccatctacgcggcattgcaggacttcgcccaggtgacgctgcgtgagcccctgcggcaggcggtacggaagaagaagaatgtcctcatcagcgtcctacaggcaattcgaaagaccatctgtgactgggagggagggcgagagccccctaatgacccatgcttgagaggggagaaggaccccaaaggtggatttgatatcaaggtgccccggcgtgctgtggggccatccagcacacagctgtacatggtgcggaccatgcttgaatcactcattgcagacaaaagcggctccaagaagaccctgaggagcagcctggatggacccattgtcctcgccatagaggactttcacaaacagtccttcttcttcacacatctgctcaacatcagtgaagccctgcagcagtgttgtgacctctcccagctctggttccgagaattcttcctggagttaaccatgggccgacgaatccagttccccatcgagatgtccatgccctggattctaacggaccatatcctggaaaccaaagaaccttccatgatggagtatgtcctctaccctctggatctgtacaacgacagcgcctactatgctctgaccaagtttaaaaagcagttcctgtacgatgagatagaagctgaggtgaacctgtgttttgatcagtttgtctacaagctggcagaccagatctttgcttactacaaagccatggctggcagtgtcctgttggataaacgttttcgagctgagtgtaagaattatggcgtcatcattccgtatccaccgtccaatcgctatgaaacactgctgaagcagagacacgtccagctgttgggtagatcaattgacttgaacagactcattacccagcgcatctctgccgccatgtataaatccttggaccaagctatcagccgctttgagagtgaggacctgacctccattgtggagctggagtggctgctggagattaaccggctcacgcatcggctgctctgtaagcatatgacgctggacagcttcgatgccatgttccgagaggccaatcacaatgtgtccgccccctatggccgtatcaccctgcatgtcttctgggaactgaactttgactttctccccaactactgctacaatgggtccactaaccgttttgtgcggactgcctcctttcacccaagaaccacaacgagacaaacctgccaacgtccagccttattacctctatggatccaagcctctcaacattgcctacagccacatctacagctcctacaggaatttcgtggggccacctcatttcaagactatgcagactcctgggttatcagggcatcgctgtggtcatggaggaactgctaaagattgtgaagagcttgctccaaggaaccattctccagtatgtgaaaacactgatagaggtgatgcccaagatatgccgcttgccccgacatgagtatggctccccagggatcctggagttcttccaccaccagctgaaggacatcattgagtacgcagagctcaaaacagacgtgttccagagcctgagggaagtgggcaatgccatcctcttctgcctcctcatagagcaagctctgtctcaggaggaggtctgcgatttgctccatgccgcacccttccaaaacatcttgcctagagtctacatcaaagagggggagcgcctggaggtccggatgaaacgtctggaagccaagtatgccccgctccacctggtccctctgatcgagcggctggggacccctcagcaaatcgccattgctcgcgagggtgacctcctgaccaaggagcggctgtgctgtggcctgtccatgttcgaggtcatcctgacccgcattcggagctacctgcaggaccccatctggcggggcccaccgcccaccaatggcgtcatgcacgtcgatgagtgtgtggagttccaccggctgtggagcgccatgcagttcgtgtactgcatccctgtgggaaccaacgagttcacagctgagcagtgtttcggcgatggcttgaactgggctggttgctccatcattgtcctgctgggccagcagcgtcgctttgacctgttcgacttctgttaccacctgctaaaagtgcagaggcaggacgggaaggatgaaatcattaagaatgtgcccctgaagaagatggccgaccggatcaggaagtatcagatcttgaacaatgaggtttttgccatcctgaacaaatacatgaagtccgtggagacagacagttccactgtggagcatgtgcgctgcttccagccacccatccaccagtccttggccaccacttgctaagcagaagatcctgcagacccttatctggaggaggaagagaagcaggagagagaaagccacagccagcctgccataggatccaactggacaacgtgtgggatggacctggaaacaagcacctccccaaacacatcaccactccctagggcggggcctgtgcatgctctcccatgacatctccatgctggtttctccatagcataaatg

SEQ ID NO: 7533 - DNA, 6135 bp, Homo sapiens
  source 1..6135: mol_type = unassigned DNA
atgaccacgcacgtcaccctggaagatgccctgtccaacgtggacctgcttgaagagcttcccctccccaacgagcagcccaaccgagtagagatctatgagaagacagtagaggtgctggagccggaggtcaccaagctcatgaagttcatgtattttcagcgcaaggccatcgagcggttctgcagcgaggtgaagcggctgtgccatgccgagcgcaggaaggactttgtctctgaggcctacctcctgacccttggcaagttcatcaacatgtttgctgtcctggatgagctaaagaacatgaagtgcagcgtcaagaatgaccactctgcctacaagagggcagcacagttcctgcggaagatggcagatccccagtctatccaggagtcgcagaacctttccatgttcctggccaaccacaacaggatcacccagtgtctccaccagcaacttgaagtgatcccaggctatgaggagctgctggctgacattgtcaacatctgtgtggattactacgagaacaagatgtacctgactcccagtgagaaacatatgctcctcaaggtgatgggctttggcctctacctaatggatggaaatgtcagtaacatttacaaactggatgccaagaagagaattaatcttagcaaaattgataaattctttaagcagctgcaggtggtgccccttttcggcgacatgcagatagagctggccagatacattaagaccagtgctcactatgaagagaacaagtccaagtggacgtgcacccagagcagcatcagcccccagtacaatatctgcgagcagatggttcagatccgggatgaccacatccgcttcatctccgagctcgctcgctacagcaacagtgaggtggtgacgggctcagggctggacagccagaagtcagacgaggagtatcgcgagctcttcgacctagccctgcggggtctgcagcttctatccaagtggagcgcccacgtcatggaggtgtactcttggaagctggttcatcccacagacaagttctgcaacaaggactgtcctggcaccgcggaggaatatgagagagccacacgctacaattacaccagtgaggaaaaatttgccttcgttgaggtgatcgccatgatcaaaggcctgcaggtgctcatgggcaggatggagagcgtcttcaaccaggccatcaggaacaccatctacgcggcattgcaggacttcgcccaggtgacgctgcgtgagcccctgcggcaggcggtacggaagaagaagaatgtcctcatcagcgtcctacaggcaattcgaaagaccatctgtgactgggagggagggcgagagccccctaatgacccatgcttgagaggggagaaggaccccaaaggtggatttgatatcaaggtgccccggcgtgctgtggggccatccagcacacagctgtacatggtgcggaccatgcttgaatcactcattgcagacaaaagcggctccaagaagaccctgaggagcagcctggatggacccattgtcctcgccatagaggactttcacaaacagtccttcttcttcacacatctgctcaacatcagtgaagccctgcagcagtgttgtgacctctcccagctctggttccgagaattcttcctggagttaaccatgggccgacgaatccagttccccatcgagatgtccatgccctggattctaacggaccatatcctggaaaccaaagaaccttccatgatggagtatgtcctctaccctctggatctgtacaacgacagcgcctactatgctctgaccaagtttaaaaagcagttcctgtacgatgagatagaagctgaggtgaacctgtgttttgatcagtttgtctacaagctggcagaccagatctttgcttactacaaagccatggctggcagtgtcctgttggataaacgttttcgagctgagtgtaagaattatggcgtcatcattccgtatccaccgtccaatcgctatgaaacactgctgaagcagagacacgtccagctgttgggtagatcaattgacttgaacagactcattacccagcgcatctctgccgccatgtataaatccttggaccaagctatcagccgctttgagagtgaggacctgacctccattgtggagctggagtggctgctggagattaaccggctcacgcatcggctgctctgtaagcatatgacgctggacagcttcgatgccatgttccgagaggccaatcacaatgtgtccgccccctatggccgtatcaccctgcatgtcttctgggaactgaactttgactttctccccaactactgctacaatgggtccactaaccgttttgtgcggactgccattcctttcacccaagaaccacaacgagacaaacctgccaacgtccagccttattacctctatggatccaagcctctcaacattgcctacagccacatctacagctcctacaggaatttcgtggggccacctcatttcaagactatctgcagactcctgggttatcagggcatcgctgtggtcatggaggaactgctaaagattgtgaagagcttgctccaaggaaccattctccagtatgtgaaaacactgatagaggtgatgcccaagatatgccgcttgccccgacatgagtatggctccccagggatcctggagttcttccaccaccagctgaaggacatcattgagtacgcagagctcaaaacagacgtgttccagagcctgagggaagtgggcaatgccatcctcttctgcctcctcatagagcaagctctgtctcaggaggaggtctgcgatttgctccatgccgcacccttccaaaacatcttgcctagagtctacatcaaagagggggagcgcctggaggtccggatgaaacgtctggaagccaagtatgccccgctccacctggtccctctgatcgagcggctggggacccctcagcaaatcgccattgctcgcgagggtgacctcctgaccaaggagcggctgtgctgtggcctgtccatgttcgaggtcatcctgacccgcattcggagctacctgcaggaccccatctggcggggcccaccgcccaccaatggcgtcatgcacgtcgatgagtgtgtggagttccaccggctgtggagcgccatgcagttcgtgtactgcatccctgtgggaaccaacgagttcacagctgagcagtgtttcggcgatggcttgaactgggctggttgctccatcattgtcctgctgggccagcagcgtcgctttgacctgttcgacttctgttaccacctgctaaaagtgcagaggcaggacgggaaggatgaaatcattaagaatgtgcccctgaagaagatggccgaccggatcaggaagtatcagatcttgaacaatgaggtttttgccatcctgaacaaatacatgaagtccgtggagacagacagttccactgtggagcatgtgcgctgcttccagccacccatccaccagtccttggccaccacttgctaagcagaagatcctgcagacccttatctggaggaggaagagaagcaggagagagaaagccacagccagcctgccataggatccaactggacaacgtgtgggatggacctggaaacaagcacctccccaaacacatcaccactccctagggcggggcctgtgcatgctctcccatgacatctccatgctggtttctccatagcataaatgaaaaaaaaaaaaaaaaagtaaacagggcagtgtgtgctttttcttttctcccccctcaactatattaagaactcctagtttcaccctttctccatcccatcatcccacctatctgtggttgcttcccaagacctcctcccaagatagacatctcctacccagtgcccttgtgtgaccccaggactcaagtctcagactgtgaacagatgtggccatgcccagagacgccagcctggccagaagggcatgcctcagcttactacttcatctctcctggttccctccctgcagtgccccgggtgtcatcttctcccactctgggtaccagggattctaccacataggcttcccaaagccccattctaactcccctctctcagggaagccctagagagaggtccaaaaagcattcacagctgtatcacactctatgcaggtggggtaggagactgatcaggcctgctgtggggaagcagtatgtatgaacacagccagaaatgtcatagtccaaacaggatgctttcaggccatctcagctgcttgatggtgagatggttcccttattccttcaggaaaggcttagcattgggccacataggggaagcagctttgaacaaatcagtcatagcactgcctatagcattagccagtgaccaaattagggacaacgtcttggcacagaattgcttatcaaggaacatttccacaagaaagaaaatattaaggggttatttccacagaagcccaaaacgtcttggaaacacagaggtgaggaggaggaatagtaattgtcaatgagcttttaataccaagatacaccccctgcccccaaagaagagtcctcttttagggaatcagaaccttcattgtcctagaagctgaaagattcttggaacattttagcttttactctcaacttgctgttctctttacattccttaagttagactttcgggtgtggcttctctcccaggggtaacatttacttccattttctagactgaaccaaaagtcttctgcagaatctcccaccgagtgtggtaagaaggaaggacaaaaggctttaggatataaatttcatgttacagagcatgtcattgtcaaaggaaatctgtggccctgagattttaagaacataaaatgtgacatttgatatttctccagcccagggaagtaagatggttagcaatggttgccttaatcaaatggtcccatttttaaccccaaaggaagtgcccacagcaagaggtttgtgtgatgcacttatgtcctccggtgaggaaagggggccacatatgaaaggccccttaggtcagatcctgagagtagcacatttgagtgcagattcctgggccccacctcaaacctactaattctgaatctctgggaatagggccaggaaatctgccctttctacaaactacccaagttgttctgttgcacatcaatgtttgggaaccactgctgtaagggaatcattctggtcaccttgagctttgagctaccactaagccatgaaagaaaatacatcatacagggaagagagaagggaggaggttccaagtagtaactggcagatcctcctgtctggaggtaccaccttctattctggtttctgacttttccttcttgatgaccatagatgtgttccagaggcaaaagagacacattatcccagatggcagaacatgctttcaaaacatataaaatgtcaaagttccagatccttctacatctttagtcctgtctgaggatggtagctggctctctgtagctgatagatggctagagttccatccaaatccttgaccacgacttcatggagatttgaataatctatttgatgagatttctatttcaataacccacctctctcaccccacattcatatccctaaatttgaccctctgggccgagtcacattaccttcaggagacttgatcccagtagactgaggtcttccctttcagcagaaagatttcatttccctggcttgccagtggcactgatttccgaacacccaatgagtttaatattctttcctccttggcattactgccccagcctctttttattttttttgtgtgtgtctaataaccaggaaaaaaataaagcttaggttttaaaaagttttaaaaataatctgtttcagaaactgtcaaatgtaccatatttgtattaagagttgttgggaatttttgtacaatgaatttacatttatttatggtgacatatttacgcttgtgatcaaataatgatgttaaattcttaaatcatatttgctatgcagctgaagatgatattttgatttgtattttgggggtacctgtgttgagttgataaacatttccatcttcattaaaactgcttccaaactagtaaaaccagcaa

SEQ ID NO: 7534 - DNA, 8090 bp, Homo sapiens
  source 1..8090: mol_type = unassigned DNA
tttttttttttttaatccccgcaccaagcgcttaacctcattggggtggaggagaaggcggcggctctctggtccgcagcggcaacagtaacgaaaaacagggctaatggactgctgaattatgaagtatttcagacccagtagtagaacatcactctgccactcactcctttatctcctactagttatttaaattggacttttaatatcctaccagctgctcttcagacacacatggtgcattgttgccattccccagattgcatctttgaaacacaggctcttagtaaccttcagcgaacaaagaggcaacctcccagatacgtctgctgggagggagtcatcgtgactgccctctagcttttgctggatctggatttgaattccactatggagcctcgcatggagtcctgcctggcgcaggtgttgcagaaggatgtggggaaacgattgcaggttggccaagaactgatagactatttctcagacaaacagaagtctgctgaccttgagcatgaccagaccatgttagataaacttgtggatggacttgctacctcttgggtgaactctagcaattacaaggtggttctgctgggcatggacatcctgtccgccctggtgacccggctgcaggatcggttcaaggcgcagatcggcacagtgctgccaagtctaatagacagactaggagatgctaaagactctgtgagggagcaggaccaaactctgctgctaaagatcatggatcaagctgctaatccccagtacgtatgggacagaatgcttggaggcttcaaacacaagaatttccgtactcgagaaggcatctgtctctgccttatagcaacactcaatgcctctggagcacagactttaacactaagcaagattgtgccacatatatgcaacttacttggagatccaaacagccaggttcgagatgcagcaataaacagcttagtggaaatttacagacatgtaggagaacgtgtgagggcagatctcagtaaaaaaggattgccacagtcccggttgaatgtaatttttacaaaatttgatgaagtccagaaatctggaaacatgatacaatctgcaaatgataaaaatttcgacgatgaagattctgtggatggtaacagaccttcctctgctagttctacatcatccaaggctccaccaagttctcggagaaacgttggaatgggaaccacccgccggcttggttcatccacccttggatccaagtcttcagctgcaaaagaaggagctggtgctgttgatgaagaggattttattaaagcatttgatgatgtacctgtagtacagatttattccagccgagaccttgaggaatccataaacaaaattagggaaatattatctgatgacaagcatgattgggagcagagagtaaatgctctaaaaaagattagatctttacttttggctggtgctgctgagtatgataacttctttcaacatttgcgtcttttggatggagcctttaaactctctgctaaggacctgcggtctcaggtagtgcgggaggcttgtatcacgttggggcatctgtcatcagttctggggaataagtttgaccatggagctgaagccattatgccaactatctttaatttaattccaaacagtgccaaaattatggccacatctggtgttgtagctgttaggttaattattcggcacacacacatccctaggttaatacctgtcataacaagcaactgtacctctaagtctgtcgcagttagaaggcgctgttttgaatttttagatttgcttttacaagaatggcagacacattcactagaacgacacatatcagtattagctgaaacaataaagaagggaatacatgatgctgattccgaagcaagaatagaagccagaaaatgttactggggtttccacagtcacttcagcagagaagcagagcacttgtaccacaccttggagtcctcctaccagaaagccctgcagtcccacctgaagaactcagacagcatagtgtctctgcctcagtcagaccgctcatcttccagctctcaagagagtctaaatcgtccgctgtctgccaaaagaagtcctactggaagtaccacatctagagcttctacagttagtaccaaatctgtgtcaacgactgggtccctccagcgatctcgaagtgatattgatgtgaacgcagcagccagtgccaaatccaaagtctcctcatcttcgggcacgacgcctttcagctctgcagcagctttgcctccagggtcatacgcatccttaggtcggatccgcacaagacggcaaagctctgggagtgccaccaacgtcgcctctacacctgataaccggggccgcagtcgcgctaaagtggtttcacagtcccagcgatccagatctgctaatcctgctggtgctggcagccggtcaagttccccaggaaaattgttgggaagtggttatggtggacttactgggggctcctcacgaggcccacctgtgacaccgtcttcagaaaagcgaagcaagattcccaggagccagggatgtagccgggaaacaagtccaaaccgaataggattagcacggagcagccgtatccctcgacccagcatgagtcaggggtgcagccgcgataccagccgtgagagcagccgagatacaagccctgctcggggctttcctccacttgatcggtttgggcttggccagccaggaagaatacctggttctgtgaatgccatgagagttctgagcacaagtacagatcttgaagctgctgttgctgatgctttgaagaagcctgtgaggaggagatatgagccgtatgggatgtattctgacgatgatgccaacagtgatgcctcaagtgtttgctctgagcgctcatatggctccaggaatggtggcattccccattatctgcggcagactgaggatgtagcagaagttctcaaccactgtgctagttcaaactggtcagaaaggaaagaagggcttctgggcctgcagaacttactgaagagccaaagaacactgagtcgagttgaactgaaaaggttgtgtgagatcttcactcggatgtttgctgaccctcatagcaagagagttttcagtatgtttttggagactcttgtggattttataataattcataaggatgatttacaagactggctttttgttcttctcacacaattacttaagaaaatgggagcagatttacttggatctgtgcaagcaaaagttcaaaaggctctagatgtcacaagggactcctttccatttgatcaacaatttaacattttgatgagatttattgtggatcaaactcaaactccaaacctcaaggtcaaagttgcaatcctgaaatacattgagtctctggccagacagatggatccaacagattttgtaaactctagtgagacaaggcttgctgtttctagaatcataacctggacaacagaaccaaagagttcagacgtgagaaaggcagcacagattgtgctaatctctctgtttgaattgaatactcctgaatttaccatgttacttggtgccttgccaaaaacattccaggatggtgccaccaaactcctgcacaaccacctcaagaattccagtaacaccagtgtgggctctccaagcaatacgattggccggacgccctcccgacacaccagcagcaggaccagccccctgacctcacccaccaactgttcccatgggggtctgtctccaagtcggttatggggttggagtgccgacgggttagcgaagcacccacctcccttttctcagcctaactccatccccaccgctccctcccacaaggctctcaggcgctcttactctcccagcatgctggactatgatacagagaacctgaactctgaagaaatctatagttctctacgtggagttacagaagccattgaaaagtttagttttcgaagccaagaagatctgaatgagccaattaaacgagatggcaaaaaggagtgtgatattgtgtcccgcgatgggggcgctgcctcccctgccactgagggccgggggggtagtgaagtagaaggaggccggacagctctggataacaagacctcactactcaacacccagcctccgcgcgccttcccggggccgcgggcgcgagactacaacccgtacccctactcagatgccatcaacacctacgacaagaccgccctgaaagaggctgtgttcgatgacgacatggagcagcttcgagacgtgcccatcgaccattctgacctggtggctgaccttctgaaagagctgtccaaccacaatgagcgagtggaggaacggaagggagccctgctggagctgctcaagatcacgcgggaagacagccttggtgtctgggaggagcacttcaagaccattctgctcctgctgctggagacccttggagacaaagaccattcaattcgagcactggcgttaagagttttgagggaaattctgagaaatcaaccagcaagatttaaaaactacgccgagctgacgattatgaagactctggaagcccacaaagactcccataaggaggtggtgagagcggctgaggaggctgcgtccacactggccagttccatccacccggagcagtgcatcaaggtgctctgccccatcatccagacggccgactaccccatcaaccttgctgccatcaagatgcagaccaaagtcgtcgagaggatcgcaaaggagtcattgctgcagctccttgtcgacatcatcccaggcttgctgcagggttatgacaacaccgaaagtagtgtgcgtaaggccagcgtgttttgcttagtggcaatttattccgtaatcggagaagacctgaaacctcaccttgcacagctcacagggagcaagatgaagctactaaacttatacataaagagggcccagaccaccaacagcaacagcagctcctcctccgatgtctccacgcacagctaatggcagtacctgtctcttgtgtagacctagaagcaatcggtggtgcctctcagagacctttccccacccccttcatcggctgcccagtcagtacaaggaggcccacaaatatttattacaatcagtattttggtcccttccagcttttctgtagaatcttactggtattgaatgtaaaggaagcaaggcctgtattgcagtcttcatacaaaacaaaaggaataagaacagaaaagagccatactgaaacatgtcttgtacagcctgctgagatggcgaaaccctgtgtgtggggtgcagtttttaaaaatcagagcgctctagccactacttggtagaaagtagcattttttttttcagttaataacatatttgggggtggggtggggtgttactttgtgttcttcctccttagcctattttcttgtgcgtatggtctgtgtggggcccctttcacagctgacaccacgaaaggtgatatatctttaagttgtgttctgagacctactaaaaatgggaatcaagtcttggcaagaacagtctgaagatggccttttaacaaacgctgggaattttgcttgtcatatccagactggaggccgactgccctggctttcagcgtagaattgggagtgcaccctgacagtctccttccagctctccctaatcgactccaccgacaaggtccctaccccagagcttccatgcaaaggaattcttcaagtttaaatctggacacaaaaataagataaatgtatggcatcatttagggatgcctgagatggcagttcatgaagcacagaagataaagaagaagtctttcatctttactgctgagatccttgggaacactgttgtcatgggggctctgccaagaccctcatctctgggctacacggtgattcagattgagcaccaacttgtttcctcccctcaaagttctgcctaagccgttcagttctaacatggtctcagttaatctggtaaatggcatctttaccatcttagttctgacttctcagtttaatgtgggattaagagccaagaaaagcctagagagactggatatcacaattttttttaattttataaactgaagtagttccttgaatgtctgttgatgaaatagtcactgtttaaggaaaaaagtaattatgaggtgtagcagattgcagaaaaacaggattagaaacacacttaaaaagaacacacatttagagtctctcttcctcctcagcgaaccactaggccccctttttaaaaacacctttagagcctaattactccaataaaagtaactagaggtttggagtctggttaaataaattctgagtaaaattcttaagccaaatggaaattcttaatgcaatcatgaggacttctattgtctcttactgttgtattagatcctataaattgaactgatttttccataaggaaaatgcttcttttgagattaattctaataacgtatttgctattgcagtgcagagcccactgcaactgctaggactgaaagcagaggctgggtgccagagcacgtgattcttaacatcatttccacagacccctctgccctgaccctctgcattggatgcaggaagctgggaaagactgatgttgatttggaaacatgggctgaaaatgaaggccccatagtgcataggaacagtaaagccagggtgctgacgtgtgtgtgtgtgtgtgtgtgtgtgtgtgtgtgtgtgtggtgttgtgtgtgtttgtgcgtgcaccctacacatgtgtggtacctcactgctgctgtttagggaacttgagggacgcgtttcaaggggttgggtattactgacgagctttggctcaaaatatagcaggaccaggtcttttgttgataagtactgtttgtttattaatatgtcattaatggtatttcttttttacactctacaagtgaattagggagtctcttgttgacccctttgttgcaggaatgtgcgtcgggctaggttatccatgagtttctttattcctaatgcagttagaaagacctttctccttgagctctttgactcccagaaggtaccccagtccccagtgtacttagaaaggatctcgaacattgctggacgtcctcatagtactcacaaagggctagccttgaatgtcactcgcccagtcttcagtctcctgacttagagatacaatcacgtcacaggtctcttggcctcaatctgaaaactgctgccgccgcgccgaggagactcgcatgccgccaccacctcactgggagggcgccgagcccaccgtcgccccctagaccctgacagctgcagctgccttgccttgccgccgcctccctgcagggcccctgttccaatgaaaaacagaacacaaaagagcagagcacctaagcctgtctctgcctccctgtctaccggactggccagggcccaagacccccgctgctccactgcggggctgggcgggctgactccctgcttcctccaagctgctgcctcccctgcagccagggtctgggcagggtgcagccggtcctcggggcacgcagcttccttcaagtacactgtgtgtgcttcccggacctgcggcgatgccacgggcctgccttttctatgcgcctcactagcttaccaccctgtgcaggtaatgcaactgactttgtctcatcagtctttttctttccctgccaccctttatttatcaagcgtaatgttacactttaaaggacagcaaataagaactttgtagaatcccaccaggactttgctaacaataatgtttggaaataaagaagtgctctgaaaaaatatcagccaccaaaatagttatgttggcactgtgttcacacgcatggtccccacacccccaggttgggtgggtttttttgttttttgggtttttttgggggggggggctttttcatgttacatccatatctgtatttatatcttatttgtttcactttcaagtgtatcatggcaaatgtacagatttttttgttaataatgtgctaggatttgctaaaaaagaaaaaaaaaaaacccttttgagtttgccctagaataaatgagacttaattc

SEQ ID NO: 7535 - DNA, 7910 bp, Homo sapiens
  source 1..7910: mol_type = unassigned DNA
tttttttttttttaatccccgcaccaagcgcttaacctcattggggtggaggagaaggcggcggctctctggtccgcagcggcaacagtaacgaaaaacagggctaatggactgctgaattatgaagtatttcagacccagtagtagaacatcactctgccactcactcctttatctcctactagttatttaaattggacttttaatatcctaccagctgctcttcagacacacatggtgcattgttgccattccccagattgcatctttgaaacacaggctcttagtaaccttcagcgaacaaagaggcaacctcccagatacgtctgctgggagggagtcatcgtgactgccctctagcttttgctggatctggatttgaattccactatggagcctcgcatggagtcctgcctggcgcaggtgttgcagaaggatgtggggaaacgattgcaggttggccaagaactgatagactatttctcagacaaacagaagtctgctgaccttgagcatgaccagaccatgttagataaacttgtggatggacttgctacctcttgggtgaactctagcaattacaaggtggttctgctgggcatggacatcctgtccgccctggtgacccggctgcaggatcggttcaaggcgcagatcggcacagtgctgccaagtctaatagacagactaggagatgctaaagactctgtgagggagcaggaccaaactctgctgctaaagatcatggatcaagctgctaatccccagtacgtatgggacagaatgcttggaggcttcaaacacaagaatttccgtactcgagaaggcatctgtctctgccttatagcaacactcaatgcctctggagcacagactttaacactaagcaagattgtgccacatatatgcaacttacttggagatccaaacagccaggttcgagatgcagcaataaacagcttagtggaaatttacagacatgtaggagaacgtgtgagggcagatctcagtaaaaaaggattgccacagtcccggttgaatgtaatttttacaaaatttgatgaagtccagaaatctggaaacatgatacaatctgcaaatgataaaaatttcgacgatgaagattctgtggatggtaacagaccttcctctgctagttctacatcatccaaggctccaccaagttctcggagaaacgttggaatgggaaccacccgccggcttggttcatccacccttggatccaagtcttcagctgcaaaagaaggagctggtgctgttgatgaagaggattttattaaagcatttgatgatgtacctgtagtacagatttattccagccgagaccttgaggaatccataaacaaaattagggaaatattatctgatgacaagcatgattgggagcagagagtaaatgctctaaaaaagattagatctttacttttggctggtgctgctgagtatgataacttctttcaacatttgcgtcttttggatggagcctttaaactctctgctaaggacctgcggtctcaggtagtgcgggaggcttgtatcacgttggggcatctgtcatcagttctggggaataagtttgaccatggagctgaagccattatgccaactatctttaatttaattccaaacagtgccaaaattatggccacatctggtgttgtagctgttaggttaattattcggcacacacacatccctaggttaatacctgtcataacaagcaactgtacctctaagtctgtcgcagttagaaggcgctgttttgaatttttagatttgcttttacaagaatggcagacacattcactagaacgacacatatcagtattagctgaaacaataaagaagggaatacatgatgctgattccgaagcaagaatagaagccagaaaatgttactggggtttccacagtcacttcagcagagaagcagagcacttgtaccacaccttggagtcctcctaccagaaagccctgcagtcccacctgaagaactcagacagcatagtgtctctgcctcagtcagaccgctcatcttccagctctcaagagagtctaaatcgtccgctgtctgccaaaagaagtcctactggaagtaccacatctagagcttctacagttagtaccaaatctgtgtcaacgactgggtccctccagcgatctcgaagtgatattgatgtgaacgcagcagccagtgccaaatccaaagtctcctcatcttcgggcacgacgcctttcagctctgcagcagctttgcctccagggtcatacgcatccttagatggtactaccactaaagcggagggtcggatccgcacaagacggcaaagctctgggagtgccaccaacgtcgcctctacacctgataaccggggccgcagtcgcgctaaagtggtttcacagtcccagcgatccagatctgctaatcctgctggtgctggcagccggtcaagttccccaggaaaattgttgggaagtggttatggtggacttactgggggctcctcacgaggcccacctgtgacaccgtcttcagaaaagcgaagcaagattcccaggagccagggatgtagccgggaaacaagtccaaaccgaataggattagatcggtttgggcttggccagccaggaagaatacctggttctgtgaatgccatgagagttctgagcacaagtacagatcttgaagctgctgttgctgatgctttgctgttaggagactccaggagcaagaagaagcctgtgaggaggagatatgagccgtatgggatgtattctgacgatgatgccaacagtgatgcctcaagtgtttgctctgagcgctcatatggctccaggaatggtggcattccccattatctgcggcagactgaggatgtagcagaagttctcaaccactgtgctagttcaaactggtcagaaaggaaagaagggcttctgggcctgcagaacttactgaagagccaaagaacactgagtcgagttgaactgaaaaggttgtgtgagatcttcactcggatgtttgctgaccctcatagcaaggttttcagtatgtttttggagactcttgtggattttataataattcataaggatgatttacaagactggctttttgttcttctcacacaattacttaagaaaatgggagcagatttacttggatctgtgcaagcaaaagttcaaaaggctctagatgtcacaagggactcctttccatttgatcaacaatttaacattttgatgagatttattgtggatcaaactcaaactccaaacctcaaggtcaaagttgcaatcctgaaatacattgagtctctggccagacagatggatccaacagattttgtaaactctagtgagacaaggcttgctgtttctagaatcataacctggacaacagaaccaaagagttcagacgtgagaaaggcagcacagattgtgctaatctctctgtttgaattgaatactcctgaatttaccatgttacttggtgccttgccaaaaacattccaggatggtgccaccaaactcctgcacaaccacctcaagaattccagtaacaccagtgtgggctctccaagcaatacgattggccggacgccctcccgacacaccagcagcaggaccagccccctgacctcacccaccaactgttcccatgggggtctgtctccaagcatgctggactatgatacagagaacctgaactctgaagaaatctatagttctctacgtggagttacagaagccattgaaaagtttagttttcgaagccaagaagatctgaatgagccaattaaacgagatggcaaaaaggagtgtgatattgtgtcccgcgatgggggcgctgcctcccctgccactgagggccgggggggtagtgaagtagaaggaggccggacagctctggataacaagacctcactactcaacacccagcctccgcgcgccttcccggggccgcgggcgcgagactacaacccgtacccctactcagatgccatcaacacctacgacaagaccgccctgaaagaggctgtgttcgatgacgacatggagcagcttcgagacgtgcccatcgaccattctgacctggtggctgaccttctgaaagagctgtccaaccacaatgagcgagtggaggaacggaagggagccctgctggagctgctcaagatcacgcgggaagacagccttggtgtctgggaggagcacttcaagaccattctgctcctgctgctggagacccttggagacaaagaccattcaattcgagcactggcgttaagagttttgagggaaattctgagaaatcaaccagcaagatttaaaaactacgccgagctgacgattatgaagactctggaagcccacaaagactcccataaggaggtggtgagagcggctgaggaggctgcgtccacactggccagttccatccacccggagcagtgcatcaaggtgctctgccccatcatccagacggccgactaccccatcaaccttgctgccatcaagatgcagaccaaagtcgtcgagaggatcgcaaaggagtcattgctgcagctccttgtcgacatcatcccaggcttgctgcagggttatgacaacaccgaaagtagtgtgcgtaaggccagcgtgttttgcttagtggcaatttattccgtaatcggagaagacctgaaacctcaccttgcacagctcacagggagcaagatgaagctactaaacttatacataaagagggcccagaccaccaacagcaacagcagctcctcctccgatgtctccacgcacagctaatggcagtacctgtctcttgtgtagacctagaagcaatcggtggtgcctctcagagacctttccccacccccttcatcggctgcccagtcagtacaaggaggcccacaaatatttattacaatcagtattttggtcccttccagcttttctgtagaatcttactggtattgaatgtaaaggaagcaaggcctgtattgcagtcttcatacaaaacaaaaggaataagaacagaaaagagccatactgaaacatgtcttgtacagcctgctgagatggcgaaaccctgtgtgtggggtgcagtttttaaaaatcagagcgctctagccactacttggtagaaagtagcattttttttttcagttaataacatatttgggggtggggtggggtgttactttgtgttcttcctccttagcctattttcttgtgcgtatggtctgtgtggggcccctttcacagctgacaccacgaaaggtgatatatctttaagttgtgttctgagacctactaaaaatgggaatcaagtcttggcaagaacagtctgaagatggccttttaacaaacgctgggaattttgcttgtcatatccagactggaggccgactgccctggctttcagcgtagaattgggagtgcaccctgacagtctccttccagctctccctaatcgactccaccgacaaggtccctaccccagagcttccatgcaaaggaattcttcaagtttaaatctggacacaaaaataagataaatgtatggcatcatttagggatgcctgagatggcagttcatgaagcacagaagataaagaagaagtctttcatctttactgctgagatccttgggaacactgttgtcatgggggctctgccaagaccctcatctctgggctacacggtgattcagattgagcaccaacttgtttcctcccctcaaagttctgcctaagccgttcagttctaacatggtctcagttaatctggtaaatggcatctttaccatcttagttctgacttctcagtttaatgtgggattaagagccaagaaaagcctagagagactggatatcacaattttttttaattttataaactgaagtagttccttgaatgtctgttgatgaaatagtcactgtttaaggaaaaaagtaattatgaggtgtagcagattgcagaaaaacaggattagaaacacacttaaaaagaacacacatttagagtctctcttcctcctcagcgaaccactaggccccctttttaaaaacacctttagagcctaattactccaataaaagtaactagaggtttggagtctggttaaataaattctgagtaaaattcttaagccaaatggaaattcttaatgcaatcatgaggacttctattgtctcttactgttgtattagatcctataaattgaactgatttttccataaggaaaatgcttcttttgagattaattctaataacgtatttgctattgcagtgcagagcccactgcaactgctaggactgaaagcagaggctgggtgccagagcacgtgattcttaacatcatttccacagacccctctgccctgaccctctgcattggatgcaggaagctgggaaagactgatgttgatttggaaacatgggctgaaaatgaaggccccatagtgcataggaacagtaaagccagggtgctgacgtgtgtgtgtgtgtgtgtgtgtgtgtgtgtgtgtgtgtggtgttgtgtgtgtttgtgcgtgcaccctacacatgtgtggtacctcactgctgctgtttagggaacttgagggacgcgtttcaaggggttgggtattactgacgagctttggctcaaaatatagcaggaccaggtcttttgttgataagtactgtttgtttattaatatgtcattaatggtatttcttttttacactctacaagtgaattagggagtctcttgttgacccctttgttgcaggaatgtgcgtcgggctaggttatccatgagtttctttattcctaatgcagttagaaagacctttctccttgagctctttgactcccagaaggtaccccagtccccagtgtacttagaaaggatctcgaacattgctggacgtcctcatagtactcacaaagggctagccttgaatgtcactcgcccagtcttcagtctcctgacttagagatacaatcacgtcacaggtctcttggcctcaatctgaaaactgctgccgccgcgccgaggagactcgcatgccgccaccacctcactgggagggcgccgagcccaccgtcgccccctagaccctgacagctgcagctgccttgccttgccgccgcctccctgcagggcccctgttccaatgaaaaacagaacacaaaagagcagagcacctaagcctgtctctgcctccctgtctaccggactggccagggcccaagacccccgctgctccactgcggggctgggcgggctgactccctgcttcctccaagctgctgcctcccctgcagccagggtctgggcagggtgcagccggtcctcggggcacgcagcttccttcaagtacactgtgtgtgcttcccggacctgcggcgatgccacgggcctgccttttctatgcgcctcactagcttaccaccctgtgcaggtaatgcaactgactttgtctcatcagtctttttctttccctgccaccctttatttatcaagcgtaatgttacactttaaaggacagcaaataagaactttgtagaatcccaccaggactttgctaacaataatgtttggaaataaagaagtgctctgaaaaaatatcagccaccaaaatagttatgttggcactgtgttcacacgcatggtccccacacccccaggttgggtgggtttttttgttttttgggtttttttgggggggggggctttttcatgttacatccatatctgtatttatatcttatttgtttcactttcaagtgtatcatggcaaatgtacagatttttttgttaataatgtgctaggatttgctaaaaaagaaaaaaaaaaaacccttttgagtttgccctagaataaatgagacttaattc

SEQ ID NO: 7536 - DNA, 5135 bp, Homo sapiens
  source 1..5135: mol_type = unassigned DNA
gctctctatggtgtacccgggttggtggcggtaagaagaaaaagggtgaccgcactgcgcaggcgccctcggcgtctctctcgctctctcggtcttttttttttttttctttttttttttttttaatccccgcaccaagcgcttaacctcattggggtggaggagaaggcggcggctctctggtccgcagcggcaacagtaacgaaaaacagggctaatggactgctgaattatgaagtatttcagacccagtagtagaacatcactctgccactcactcctttatctcctactagttatttaaattggacttttaatatcctaccagctgctcttcagacacacatggtgcattgttgccattccccagattgcatctttgaaacacaggctcttagtaaccttcagcgaacaaagaggcaacctcccagatacgtctgctgggagggagtcatcgtgactgccctctagcttttgctggatctggatttgaattccactatggagcctcgcatggagtcctgcctggcgcaggtgttgcagaaggatgtggggaaacgattgcaggttggccaagaactgatagactatttctcagacaaacagaagtctgctgaccttgagcatgaccagaccatgttagataaacttgtggatggacttgctacctcttgggtgaactctagcaattacaaggtggttctgctgggcatggacatcctgtccgccctggtgacccggctgcaggatcggttcaaggcgcagatcggcacagtgctgccaagtctaatagacagactaggagatgctaaagactctgtgagggagcaggaccaaactctgctgctaaagatcatggatcaagctgctaatccccagtacgtatgggacagaatgcttggaggcttcaaacacaagaatttccgtactcgagaaggcatctgtctctgccttatagcaacactcaatgcctctggagcacagactttaacactaagcaagattgtgccacatatatgcaacttacttggagatccaaacagccaggttcgagatgcagcaataaacagcttagtggaaatttacagacatgtaggagaacgtgtgagggcagatctcagtaaaaaaggattgccacagtcccggttgaatgtaatttttacaaaatttgatgaagtccagaaatctggaaacatgatacaatctgcaaatgataaaaatttcgacgatgaagattctgtggatggtaacagaccttcctctgctagttctacatcatccaaggctccaccaagttctcggagaaacgttggaatgggaaccacccgccggcttggttcatccacccttggatccaagtcttcagctgcaaaagaaggagctggtgctgttgatgaagaggattttattaaagcatttgatgatgtacctgtagtacagatttattccagccgagaccttgaggaatccataaacaaaattagggaaatattatctgatgacaagcatgattgggagcagagagtaaatgctctaaaaaagattagatctttacttttggctggtgctgctgagtatgataacttctttcaacatttgcgtcttttggatggagcctttaaactctctgctaaggacctgcggtctcaggtagtgcgggaggcttgtatcacgttggggcatctgtcatcagttctggggaataagtttgaccatggagctgaagccattatgccaactatctttaatttaattccaaacagtgccaaaattatggccacatctggtgttgtagctgttaggttaattattcggcacacacacatccctaggttaatacctgtcataacaagcaactgtacctctaagtctgtcgcagttagaaggcgctgttttgaatttttagatttgcttttacaagaatggcagacacattcactagaacgacacatatcagtattagctgaaacaataaagaagggaatacatgatgctgattccgaagcaagaatagaagccagaaaatgttactggggtttccacagtcacttcagcagagaagcagagcacttgtaccacaccttggagtcctcctaccagaaagccctgcagtcccacctgaagaactcagacagcatagtgtctctgcctcagtcagaccgctcatcttccagctctcaagagagtctaaatcgtccgctgtctgccaaaagaagtcctactggaagtaccacatctagagcttctacagttagtaccaaatctgtgtcaacgactgggtccctccagcgatctcgaagtgatattgatgtgaacgcagcagccagtgccaaatccaaagtctcctcatcttcgggcacgacgcctttcagctctgcagcagctttgcctccagggtcatacgcatccttaggtcggatccgcacaagacggcaaagctctgggagtgccaccaacgtcgcctctacacctgataaccggggccgcagtcgcgctaaagtggtttcacagtcccagcgatccagatctgctaatcctgctggtgctggcagccggtcaagttccccaggaaaattgttgggaagtggttatggtggacttactgggggctcctcacgaggcccacctgtgacaccgtcttcagaaaagcgaagcaagattcccaggagccagggatgtagccgggaaacaagtccaaaccgaataggattagatcggtttgggcttggccagccaggaagaatacctggttctgtgaatgccatgagagttctgagcacaagtacagatcttgaagctgctgttgctgatgctttgctgttaggagactccaggagcaagaagaagcctgtgaggaggagatatgagccgtatgggatgtattctgacgatgatgccaacagtgatgcctcaagtgtttgctctgagcgctcatatggctccaggaatggtggcattccccattatctgcggcagactgaggatgtagcagaagttctcaaccactgtgctagttcaaactggtcagaaaggaaagaagggcttctgggcctgcagaacttactgaagagccaaagaacactgagtcgagttgaactgaaaaggttgtgtgagatcttcactcggatgtttgctgaccctcatagcaagttagttttcagtatgtttttggagactcttgtggattttataataattcataaggatgatttacaagactggctttttgttcttctcacacaattacttaagaaaatgggagcagatttacttggatctgtgcaagcaaaagttcaaaaggctctagatgtcacaagggactcctttccatttgatcaacaatttaacattttgatgagatttattgtggatcaaactcaaactccaaacctcaaggtcaaagttgcaatcctgaaatacattgagtctctggccagacagatggatccaacagattttgtaaactctagtgagacaaggcttgctgtttctagaatcataacctggacaacagaaccaaagagttcagacgtgagaaaggcagcacagattgtgctaatctctctgtttgaattgaatactcctgaatttaccatgttacttggtgccttgccaaaaacattccaggatggtgccaccaaactcctgcacaaccacctcaagaattccagtaacaccagtgtgggctctccaagcaatacgattggccggacgccctcccgacacaccagcagcaggaccagccccctgacctcacccaccaactgttcccatgggggtctgtctccaagcatgctggactatgatacagagaacctgaactctgaagaaatctatagttctctacgtggagttacagaagccattgaaaagtttagttttcgaagccaagaagatctgaatgagccaattaaacgagatggcaaaaaggagtgtgatattgtgtcccgcgatgggggcgctgcctcccctgccactgagggccgggggggtagtgaagtagaaggaggccggacagctctggataacaagacctcactactcaacacccagcctccgcgcgccttcccggggccgcgggcgcgagactacaacccgtacccctactcagatgccatcaacacctacgacaagaccgccctgaaagaggctgtgttcgatgacgacatggagcagcttcgagacgtgcccatcgaccattctgacctggtggctgaccttctgaaagagctgtccaaccacaatgagcgagtggaggaacggaagggagccctgctggagctgctcaagatcacgcgggaagacagccttggtgtctgggaggagcacttcaagaccattctgctcctgctgctggagacccttggagacaaagaccattcaattcgagcactggcgttaagagttttgagggaaattctgagaaatcaaccagcaagatttaaaaactacgccgagctgacgattatgaagactctggaagcccacaaagactcccataaggaggtggtgagagcggctgaggaggctgcgtccacactggccagttccatccacccggagcagtgcatcaaggtgctctgccccatcatccagacggccgactaccccatcaaccttgctgccatcaagatgcagaccaaagtcgtcgagaggatcgcaaaggagtcattgctgcagctccttgtcgacatcatcccaggcttgctgcagggttatgacaacaccgaaagtagtgtgcgtaaggccagcgtgttttgcttagtggcaatttattccgtaatcggagaagacctgaaacctcaccttgcacagctcacagggagcaagatgaagctactaaacttatacataaagagggcccagaccaccaacagcaacagcagctcctcctccgatgtctccacgcacagctaatggcagtacctgtctcttgtgtagacctagaagcaatcggtggtgcctctcagagacctttccccacccccttcatcggctgcccagtcagtacaaggaggcccacaaatatttattacaatcagtattttggtcccttccagcttttctgtagaatcttactggtattgaatgtaaaggaagcaaggcctgtattgcagtcttcatacaaaacaaaa

SEQ ID NO: 7537 - DNA, 3967 bp, Homo sapiens
  source 1..3967: mol_type = unassigned DNA
ttacaaaatttgatgaagtccagaaatctggaaacatgatacaatctgcaaatgataaaaatttcgacgatgaagattctgtggatggtaacagaccttcctctgctagttctacatcatccaaggctccaccaagttctcggagaaacgttggaatgggaaccacccgccggcttggttcatccacccttggatccaagtcttcagctgcaaaagaaggagctggtgctgttgatgaagaggattttattaaagcatttgatgatgtacctgtagtacagatttattccagccgagaccttgaggaatccataaacaaaattagggaaatattatctgatgacaagcatgattgggagcagagagtaaatgctctaaaaaagattagatctttacttttggctggtgctgctgagtatgataacttctttcaacatttgcgtcttttggatggagcctttaaactctctgctaaggacctgcggtctcaggtagtgcgggaggcttgtatcacgttggggcatctgtcatcagttctggggaataagtttgaccatggagctgaagccattatgccaactatctttaatttaattccaaacagtgccaaaattatggccacatctggtgttgtagctgttaggttaattattcggcacacacacatccctaggttaatacctgtcataacaagcaactgtacctctaagtctgtcgcagttagaaggcgctgttttgaatttttagatttgcttttacaagaatggcagacacattcactagaacgacacatatcagtattagctgaaacaataaagaagggaatacatgatgctgattccgaagcaagaatagaagccagaaaatgttactggggtttccacagtcacttcagcagagaagcagagcacttgtaccacaccttggagtcctcctaccagaaagccctgcagtcccacctgaagaactcagacagcatagtgtctctgcctcagtcagaccgctcatcttccagctctcaagagagtctaaatcgtccgctgtctgccaaaagaagtcctactggaagtaccacatctagagcttctacagttagtaccaaatctgtgtcaacgactgggtccctccagcgatctcgaagtgatattgatgtgaacgcagcagccagtgccaaatccaaagtctcctcatcttcgggcacgacgcctttcagctctgcagcagctttgcctccagggtcatacgcatccttaggtcggatccgcacaagacggcaaagctctgggagtgccaccaacgtcgcctctacacctgataaccggggccgcagtcgcgctaaagtggtttcacagtcccagcgatccagatctgctaatcctgctggtgctggcagccggtcaagttccccaggaaaattgttgggaagtggttatggtggacttactgggggctcctcacgaggcccacctgtgacaccgtcttcagaaaagcgaagcaagattcccaggagccagggatgtagccgggaaacaagtccaaaccgaataggattagatcggtttgggcttggccagccaggaagaatacctggttctgtgaatgccatgagagttctgagcacaagtacagatcttgaagctgctgttgctgatgctttgctgttaggagactccaggagcaagaagaagcctgtgaggaggagatatgagccgtatgggatgtattctgacgatgatgccaacagtgatgcctcaagtgtttgctctgagcgctcatatggctccaggaatggtggcattccccattatctgcggcagactgaggatgtagcagaagttctcaaccactgtgctagttcaaactggtcagaaaggaaagaagggcttctgggcctgcagaacttactgaagagccaaagaacactgagtcgagttgaactgaaaaggttgtgtgagatcttcactcggatgtttgctgaccctcatagcaagattgctgattcagaagcagaatgtgaggataaagaaggaaatttgtttccatcagaagtctcttgtacagtgagttttcagtatgtttttggagactcttgtggattttataataattcataaggatgatttacaagactggctttttgttcttctcacacaattacttaagaaaatgggagcagatttacttggatctgtgcaagcaaaagttcaaaaggctctagatgtcacaagggactcctttccatttgatcaacaatttaacattttgatgagatttattgtggatcaaactcaaactccaaacctcaaggtcaaagttgcaatcctgaaatacattgagtctctggccagacagatggatccaacagattttgtaaactctagtgagacaaggcttgctgtttctagaatcataacctggacaacagaaccaaagagttcagacgtgagaaaggcagcacagattgtgctaatctctctgtttgaattgaatactcctgaatttaccatgttacttggtgccttgccaaaaacattccaggatggtgccaccaaactcctgcacaaccacctcaagaattccagtaacaccagtgtgggctctccaagcaatacgattggccggacgccctcccgacacaccagcagcaggaccagccccctgacctcacccaccaactgttcccatgggggtctgtctccaagcatgctggactatgatacagagaacctgaactctgaagaaatctatagttctctacgtggagttacagaagccattgaaaagtttagttttcgaagccaagaagatctgaatgagccaattaaacgagatggcaaaaaggagtgtgatattgtgtcccgcgatgggggcgctgcctcccctgccactgagggccgggggggtagtgaagtagaaggaggccggacagctctggataacaagacctcactactcaacacccagcctccgcgcgccttcccggggccgcgggcgcgagactacaacccgtacccctactcagatgccatcaacacctacgacaagaccgccctgaaagaggctgtgttcgatgacgacatggagcagcttcgagacgtgcccatcgaccattctgacctggtggctgaccttctgaaagagctgtccaaccacaatgagcgagtggaggaacggaagggagccctgctggagctgctcaagatcacgcgggaagacagccttggtgtctgggaggagcacttcaagaccattctgctcctgctgctggagacccttggagacaaagaccattcaattcgagcactggcgttaagagttttgagggaaattctgagaaatcaaccagcaagatttaaaaactacgccgagctgacgattatgaagactctggaagcccacaaagactcccataaggaggtggtgagagcggctgaggaggctgcgtccacactggccagttccatccacccggagcagtgcatcaaggtgctctgccccatcatccagacggccgactaccccatcaaccttgctgccatcaagatgcagaccaaagtcgtcgagaggatcgcaaaggagtcattgctgcagctccttgtcgacatcatcccaggcttgctgcagggttatgacaacaccgaaagtagtgtgcgtaaggccagcgtgttttgcttagtggcaatttattccgtaatcggagaagacctgaaacctcaccttgcacagctcacagggagcaagatgaagctactaaacttatacataaagagggcccagaccaccaacagcaacagcagctcctcctccgatgtctccacgcacagctaatggcagtacctgtctcttgtgtagacctagaagcaatcggtggtgcctctcagagacctttccccacccccttcatcggctgcccagtcagtacaaggaggcccacaaatatttattacaatcagtattttggtccctt

SEQ ID NO: 7538 - DNA, 7958 bp, Homo sapiens
  source 1..7958: mol_type = unassigned DNA
tttttttttttttaatccccgcaccaagcgcttaacctcattggggtggaggagaaggcggcggctctctggtccgcagcggcaacagtaacgaaaaacagggctaatggactgctgaattatgaagtatttcagacccagtagtagaacatcactctgccactcactcctttatctcctactagttatttaaattggacttttaatatcctaccagctgctcttcagacacacatggtgcattgttgccattccccagattgcatctttgaaacacaggctcttagtaaccttcagcgaacaaagaggcaacctcccagatacgtctgctgggagggagtcatcgtgactgccctctagcttttgctggatctggatttgaattccactatggagcctcgcatggagtcctgcctggcgcaggtgttgcagaaggatgtggggaaacgattgcaggttggccaagaactgatagactatttctcagacaaacagaagtctgctgaccttgagcatgaccagaccatgttagataaacttgtggatggacttgctacctcttgggtgaactctagcaattacaaggtggttctgctgggcatggacatcctgtccgccctggtgacccggctgcaggatcggttcaaggcgcagatcggcacagtgctgccaagtctaatagacagactaggagatgctaaagactctgtgagggagcaggaccaaactctgctgctaaagatcatggatcaagctgctaatccccagtacgtatgggacagaatgcttggaggcttcaaacacaagaatttccgtactcgagaaggcatctgtctctgccttatagcaacactcaatgcctctggagcacagactttaacactaagcaagattgtgccacatatatgcaacttacttggagatccaaacagccaggttcgagatgcagcaataaacagcttagtggaaatttacagacatgtaggagaacgtgtgagggcagatctcagtaaaaaaggattgccacagtcccggttgaatgtaatttttacaaaatttgatgaagtccagaaatctggaaacatgatacaatctgcaaatgataaaaatttcgacgatgaagattctgtggatggtaacagaccttcctctgctagttctacatcatccaaggctccaccaagttctcggagaaacgttggaatgggaaccacccgccggcttggttcatccacccttggatccaagtcttcagctgcaaaagaaggagctggtgctgttgatgaagaggattttattaaagcatttgatgatgtacctgtagtacagatttattccagccgagaccttgaggaatccataaacaaaattagggaaatattatctgatgacaagcatgattgggagcagagagtaaatgctctaaaaaagattagatctttacttttggctggtgctgctgagtatgataacttctttcaacatttgcgtcttttggatggagcctttaaactctctgctaaggacctgcggtctcaggtagtgcgggaggcttgtatcacgttggggcatctgtcatcagttctggggaataagtttgaccatggagctgaagccattatgccaactatctttaatttaattccaaacagtgccaaaattatggccacatctggtgttgtagctgttaggttaattattcggcacacacacatccctaggttaatacctgtcataacaagcaactgtacctctaagtctgtcgcagttagaaggcgctgttttgaatttttagatttgcttttacaagaatggcagacacattcactagaacgacacatatcagtattagctgaaacaataaagaagggaatacatgatgctgattccgaagcaagaatagaagccagaaaatgttactggggtttccacagtcacttcagcagagaagcagagcacttgtaccacaccttggagtcctcctaccagaaagccctgcagtcccacctgaagaactcagacagcatagtgtctctgcctcagtcagaccgctcatcttccagctctcaagagagtctaaatcgtccgctgtctgccaaaagaagtcctactggaagtaccacatctagagcttctacagttagtaccaaatctgtgtcaacgactgggtccctccagcgatctcgaagtgatattgatgtgaacgcagcagccagtgccaaatccaaagtctcctcatcttcgggcacgacgcctttcagctctgcagcagctttgcctccagggtcatacgcatccttaggtcggatccgcacaagacggcaaagctctgggagtgccaccaacgtcgcctctacacctgataaccggggccgcagtcgcgctaaagtggtttcacagtcccagcgatccagatctgctaatcctgctggtgctggcagccggtcaagttccccaggaaaattgttgggaagtggttatggtggacttactgggggctcctcacgaggcccacctgtgacaccgtcttcagaaaagcgaagcaagattcccaggagccagggatgtagccgggaaacaagtccaaaccgaataggattagatcggtttgggcttggccagccaggaagaatacctggttctgtgaatgccatgagagttctgagcacaagtacagatcttgaagctgctgttgctgatgctttggtaagaggcacaagcacaggaaaaaagaagcctgtgaggaggagatatgagccgtatgggatgtattctgacgatgatgccaacagtgatgcctcaagtgtttgctctgagcgctcatatggctccaggaatggtggcattccccattatctgcggcagactgaggatgtagcagaagttctcaaccactgtgctagttcaaactggtcagaaaggaaagaagggcttctgggcctgcagaacttactgaagagccaaagaacactgagtcgagttgaactgaaaaggttgtgtgagatcttcactcggatgtttgctgaccctcatagcaagattgctgattcagaagcagaatgtgaggataaagaaggaaatttgtttccatcagaagtctcttgtacaagagttttcagtatgtttttggagactcttgtggattttataataattcataaggatgatttacaagactggctttttgttcttctcacacaattacttaagaaaatgggagcagatttacttggatctgtgcaagcaaaagttcaaaaggctctagatgtcacaagggactcctttccatttgatcaacaatttaacattttgatgagatttattgtggatcaaactcaaactccaaacctcaaggtcaaagttgcaatcctgaaatacattgagtctctggccagacagatggatccaacagattttgtaaactctagtgagacaaggcttgctgtttctagaatcataacctggacaacagaaccaaagagttcagacgtgagaaaggcagcacagattgtgctaatctctctgtttgaattgaatactcctgaatttaccatgttacttggtgccttgccaaaaacattccaggatggtgccaccaaactcctgcacaaccacctcaagaattccagtaacaccagtgtgggctctccaagcaatacgattggccggacgccctcccgacacaccagcagcaggaccagccccctgacctcacccaccaactgttcccatgggggtctgtctccaagcatgctggactatgatacagagaacctgaactctgaagaaatctatagttctctacgtggagttacagaagccattgaaaagtttagttttcgaagccaagaagatctgaatgagccaattaaacgagatggcaaaaaggagtgtgatattgtgtcccgcgatgggggcgctgcctcccctgccactgagggccgggggggtagtgaagtagaaggaggccggacagctctggataacaagacctcactactcaacacccagcctccgcgcgccttcccggggccgcgggcgcgagactacaacccgtacccctactcagatgccatcaacacctacgacaagaccgccctgaaagaggctgtgttcgatgacgacatggagcagcttcgagacgtgcccatcgaccattctgacctggtggctgaccttctgaaagagctgtccaaccacaatgagcgagtggaggaacggaagggagccctgctggagctgctcaagatcacgcgggaagacagccttggtgtctgggaggagcacttcaagaccattctgctcctgctgctggagacccttggagacaaagaccattcaattcgagcactggcgttaagagttttgagggaaattctgagaaatcaaccagcaagatttaaaaactacgccgagctgacgattatgaagactctggaagcccacaaagactcccataaggaggtggtgagagcggctgaggaggctgcgtccacactggccagttccatccacccggagcagtgcatcaaggtgctctgccccatcatccagacggccgactaccccatcaaccttgctgccatcaagatgcagaccaaagtcgtcgagaggatcgcaaaggagtcattgctgcagctccttgtcgacatcatcccaggcttgctgcagggttatgacaacaccgaaagtagtgtgcgtaaggccagcgtgttttgcttagtggcaatttattccgtaatcggagaagacctgaaacctcaccttgcacagctcacagggagcaagatgaagctactaaacttatacataaagagggcccagaccaccaacagcaacagcagctcctcctccgatgtctccacgcacagctaatggcagtacctgtctcttgtgtagacctagaagcaatcggtggtgcctctcagagacctttccccacccccttcatcggctgcccagtcagtacaaggaggcccacaaatatttattacaatcagtattttggtcccttccagcttttctgtagaatcttactggtattgaatgtaaaggaagcaaggcctgtattgcagtcttcatacaaaacaaaaggaataagaacagaaaagagccatactgaaacatgtcttgtacagcctgctgagatggcgaaaccctgtgtgtggggtgcagtttttaaaaatcagagcgctctagccactacttggtagaaagtagcattttttttttcagttaataacatatttgggggtggggtggggtgttactttgtgttcttcctccttagcctattttcttgtgcgtatggtctgtgtggggcccctttcacagctgacaccacgaaaggtgatatatctttaagttgtgttctgagacctactaaaaatgggaatcaagtcttggcaagaacagtctgaagatggccttttaacaaacgctgggaattttgcttgtcatatccagactggaggccgactgccctggctttcagcgtagaattgggagtgcaccctgacagtctccttccagctctccctaatcgactccaccgacaaggtccctaccccagagcttccatgcaaaggaattcttcaagtttaaatctggacacaaaaataagataaatgtatggcatcatttagggatgcctgagatggcagttcatgaagcacagaagataaagaagaagtctttcatctttactgctgagatccttgggaacactgttgtcatgggggctctgccaagaccctcatctctgggctacacggtgattcagattgagcaccaacttgtttcctcccctcaaagttctgcctaagccgttcagttctaacatggtctcagttaatctggtaaatggcatctttaccatcttagttctgacttctcagtttaatgtgggattaagagccaagaaaagcctagagagactggatatcacaattttttttaattttataaactgaagtagttccttgaatgtctgttgatgaaatagtcactgtttaaggaaaaaagtaattatgaggtgtagcagattgcagaaaaacaggattagaaacacacttaaaaagaacacacatttagagtctctcttcctcctcagcgaaccactaggccccctttttaaaaacacctttagagcctaattactccaataaaagtaactagaggtttggagtctggttaaataaattctgagtaaaattcttaagccaaatggaaattcttaatgcaatcatgaggacttctattgtctcttactgttgtattagatcctataaattgaactgatttttccataaggaaaatgcttcttttgagattaattctaataacgtatttgctattgcagtgcagagcccactgcaactgctaggactgaaagcagaggctgggtgccagagcacgtgattcttaacatcatttccacagacccctctgccctgaccctctgcattggatgcaggaagctgggaaagactgatgttgatttggaaacatgggctgaaaatgaaggccccatagtgcataggaacagtaaagccagggtgctgacgtgtgtgtgtgtgtgtgtgtgtgtgtgtgtgtgtgtgtggtgttgtgtgtgtttgtgcgtgcaccctacacatgtgtggtacctcactgctgctgtttagggaacttgagggacgcgtttcaaggggttgggtattactgacgagctttggctcaaaatatagcaggaccaggtcttttgttgataagtactgtttgtttattaatatgtcattaatggtatttcttttttacactctacaagtgaattagggagtctcttgttgacccctttgttgcaggaatgtgcgtcgggctaggttatccatgagtttctttattcctaatgcagttagaaagacctttctccttgagctctttgactcccagaaggtaccccagtccccagtgtacttagaaaggatctcgaacattgctggacgtcctcatagtactcacaaagggctagccttgaatgtcactcgcccagtcttcagtctcctgacttagagatacaatcacgtcacaggtctcttggcctcaatctgaaaactgctgccgccgcgccgaggagactcgcatgccgccaccacctcactgggagggcgccgagcccaccgtcgccccctagaccctgacagctgcagctgccttgccttgccgccgcctccctgcagggcccctgttccaatgaaaaacagaacacaaaagagcagagcacctaagcctgtctctgcctccctgtctaccggactggccagggcccaagacccccgctgctccactgcggggctgggcgggctgactccctgcttcctccaagctgctgcctcccctgcagccagggtctgggcagggtgcagccggtcctcggggcacgcagcttccttcaagtacactgtgtgtgcttcccggacctgcggcgatgccacgggcctgccttttctatgcgcctcactagcttaccaccctgtgcaggtaatgcaactgactttgtctcatcagtctttttctttccctgccaccctttatttatcaagcgtaatgttacactttaaaggacagcaaataagaactttgtagaatcccaccaggactttgctaacaataatgtttggaaataaagaagtgctctgaaaaaatatcagccaccaaaatagttatgttggcactgtgttcacacgcatggtccccacacccccaggttgggtgggtttttttgttttttgggtttttttgggggggggggctttttcatgttacatccatatctgtatttatatcttatttgtttcactttcaagtgtatcatggcaaatgtacagatttttttgttaataatgtgctaggatttgctaaaaaagaaaaaaaaaaaacccttttgagtttgccctagaataaatgagacttaattc

SEQ ID NO: 7539 - DNA, 7907 bp, Homo sapiens
  source 1..7907: mol_type = unassigned DNA
tttttttttttttaatccccgcaccaagcgcttaacctcattggggtggaggagaaggcggcggctctctggtccgcagcggcaacagtaacgaaaaacagggctaatggactgctgaattatgaagtatttcagacccagtagtagaacatcactctgccactcactcctttatctcctactagttatttaaattggacttttaatatcctaccagctgctcttcagacacacatggtgcattgttgccattccccagattgcatctttgaaacacaggctcttagtaaccttcagcgaacaaagaggcaacctcccagatacgtctgctgggagggagtcatcgtgactgccctctagcttttgctggatctggatttgaattccactatggagcctcgcatggagtcctgcctggcgcaggtgttgcagaaggatgtggggaaacgattgcaggttggccaagaactgatagactatttctcagacaaacagaagtctgctgaccttgagcatgaccagaccatgttagataaacttgtggatggacttgctacctcttgggtgaactctagcaattacaaggtggttctgctgggcatggacatcctgtccgccctggtgacccggctgcaggatcggttcaaggcgcagatcggcacagtgctgccaagtctaatagacagactaggagatgctaaagactctgtgagggagcaggaccaaactctgctgctaaagatcatggatcaagctgctaatccccagtacgtatgggacagaatgcttggaggcttcaaacacaagaatttccgtactcgagaaggcatctgtctctgccttatagcaacactcaatgcctctggagcacagactttaacactaagcaagattgtgccacatatatgcaacttacttggagatccaaacagccaggttcgagatgcagcaataaacagcttagtggaaatttacagacatgtaggagaacgtgtgagggcagatctcagtaaaaaaggattgccacagtcccggttgaatgtaatttttacaaaatttgatgaagtccagaaatctggaaacatgatacaatctgcaaatgataaaaatttcgacgatgaagattctgtggatggtaacagaccttcctctgctagttctacatcatccaaggctccaccaagttctcggagaaacgttggaatgggaaccacccgccggcttggttcatccacccttggatccaagtcttcagctgcaaaagaaggagctggtgctgttgatgaagaggattttattaaagcatttgatgatgtacctgtagtacagatttattccagccgagaccttgaggaatccataaacaaaattagggaaatattatctgatgacaagcatgattgggagcagagagtaaatgctctaaaaaagattagatctttacttttggctggtgctgctgagtatgataacttctttcaacatttgcgtcttttggatggagcctttaaactctctgctaaggacctgcggtctcaggtagtgcgggaggcttgtatcacgttggggcatctgtcatcagttctggggaataagtttgaccatggagctgaagccattatgccaactatctttaatttaattccaaacagtgccaaaattatggccacatctggtgttgtagctgttaggttaattattcggcacacacacatccctaggttaatacctgtcataacaagcaactgtacctctaagtctgtcgcagttagaaggcgctgttttgaatttttagatttgcttttacaagaatggcagacacattcactagaacgacacatatcagtattagctgaaacaataaagaagggaatacatgatgctgattccgaagcaagaatagaagccagaaaatgttactggggtttccacagtcacttcagcagagaagcagagcacttgtaccacaccttggagtcctcctaccagaaagccctgcagtcccacctgaagaactcagacagcatagtgtctctgcctcagtcagaccgctcatcttccagctctcaagagagtctaaatcgtccgctgtctgccaaaagaagtcctactggaagtaccacatctagagcttctacagttagtaccaaatctgtgtcaacgactgggtccctccagcgatctcgaagtgatattgatgtgaacgcagcagccagtgccaaatccaaagtctcctcatcttcgggcacgacgcctttcagctctgcagcagctttgcctccagggtcatacgcatccttagagtccagacacatgagggaagacatggagtacataggcctggactcaggtcggatccgcacaagacggcaaagctctgggagtgccaccaacgtcgcctctacacctgataaccggggccgcagtcgcgctaaagtggtttcacagtcccagcctggcagccggtcaagttccccaggaaaattgttgggaagtggttatggtggacttactgggggctcctcacgaggcccacctgtgacaccgtcttcagaaaagcgaagcaagattcccaggagccagggatgtagccgggaaacaagtccaaaccgaataggattagatcggtttgggcttggccagccaggaagaatacctggttctgtgaatgccatgagagttctgagcacaagtacagatcttgaagctgctgttgctgatgctttgctgttaggagactccaggagcaagaagcctgtgaggaggagatatgagccgtatgggatgtattctgacgatgatgccaacagtgatgcctcaagtgtttgctctgagcgctcatatggctccaggaatggtggcattccccattatctgcggcagactgaggatgtagcagaagttctcaaccactgtgctagttcaaactggtcagaaaggaaagaagggcttctgggcctgcagaacttactgaagagccaaagaacactgagtcgagttgaactgaaaaggttgtgtgagatcttcactcggatgtttgctgaccctcatagcaagagagttttcagtatgtttttggagactcttgtggattttataataattcataaggatgatttacaagactggctttttgttcttctcacacaattacttaagaaaatgggagcagatttacttggatctgtgcaagcaaaagttcaaaaggctctagatgtcacaagggactcctttccatttgatcaacaatttaacattttgatgagatttattgtggatcaaactcaaactccaaacctcaaggtcaaagttgcaatcctgaaatacattgagtctctggccagacagatggatccaacagattttgtaaactctagtgagacaaggcttgctgtttctagaatcataacctggacaacagaaccaaagagttcagacgtgagaaaggcagcacagattgtgctaatctctctgtttgaattgaatactcctgaatttaccatgttacttggtgccttgccaaaaacattccaggatggtgccaccaaactcctgcacaaccacctcaagaattccagtaacaccagtgtgggctctccaagcaatacgattggccggacgccctcccgacacaccagcagcaggaccagccccctgacctcacccaccaactgttcccatgggggtctgtctccaagcatgctggactatgatacagagaacctgaactctgaagaaatctatagttctctacgtggagttacagaagccattgaaaagtttagttttcgaagccaagaagatctgaatgagccaattaaacgagatggcaaaaaggagtgtgatattgtgtcccgcgatgggggcgctgcctcccctgccactgagggccgggggggtagtgaagtagaaggaggccggacagctctggataacaagacctcactactcaacacccagcctccgcgcgccttcccggggccgcgggcgcgagactacaacccgtacccctactcagatgccatcaacacctacgacaagaccgccctgaaagaggctgtgttcgatgacgacatggagcagcttcgagacgtgcccatcgaccattctgacctggtggctgaccttctgaaagagctgtccaaccacaatgagcgagtggaggaacggaagggagccctgctggagctgctcaagatcacgcgggaagacagccttggtgtctgggaggagcacttcaagaccattctgctcctgctgctggagacccttggagacaaagaccattcaattcgagcactggcgttaagagttttgagggaaattctgagaaatcaaccagcaagatttaaaaactacgccgagctgacgattatgaagactctggaagcccacaaagactcccataaggaggtggtgagagcggctgaggaggctgcgtccacactggccagttccatccacccggagcagtgcatcaaggtgctctgccccatcatccagacggccgactaccccatcaaccttgctgccatcaagatgcagaccaaagtcgtcgagaggatcgcaaaggagtcattgctgcagctccttgtcgacatcatcccaggcttgctgcagggttatgacaacaccgaaagtagtgtgcgtaaggccagcgtgttttgcttagtggcaatttattccgtaatcggagaagacctgaaacctcaccttgcacagctcacagggagcaagatgaagctactaaacttatacataaagagggcccagaccaccaacagcaacagcagctcctcctccgatgtctccacgcacagctaatggcagtacctgtctcttgtgtagacctagaagcaatcggtggtgcctctcagagacctttccccacccccttcatcggctgcccagtcagtacaaggaggcccacaaatatttattacaatcagtattttggtcccttccagcttttctgtagaatcttactggtattgaatgtaaaggaagcaaggcctgtattgcagtcttcatacaaaacaaaaggaataagaacagaaaagagccatactgaaacatgtcttgtacagcctgctgagatggcgaaaccctgtgtgtggggtgcagtttttaaaaatcagagcgctctagccactacttggtagaaagtagcattttttttttcagttaataacatatttgggggtggggtggggtgttactttgtgttcttcctccttagcctattttcttgtgcgtatggtctgtgtggggcccctttcacagctgacaccacgaaaggtgatatatctttaagttgtgttctgagacctactaaaaatgggaatcaagtcttggcaagaacagtctgaagatggccttttaacaaacgctgggaattttgcttgtcatatccagactggaggccgactgccctggctttcagcgtagaattgggagtgcaccctgacagtctccttccagctctccctaatcgactccaccgacaaggtccctaccccagagcttccatgcaaaggaattcttcaagtttaaatctggacacaaaaataagataaatgtatggcatcatttagggatgcctgagatggcagttcatgaagcacagaagataaagaagaagtctttcatctttactgctgagatccttgggaacactgttgtcatgggggctctgccaagaccctcatctctgggctacacggtgattcagattgagcaccaacttgtttcctcccctcaaagttctgcctaagccgttcagttctaacatggtctcagttaatctggtaaatggcatctttaccatcttagttctgacttctcagtttaatgtgggattaagagccaagaaaagcctagagagactggatatcacaattttttttaattttataaactgaagtagttccttgaatgtctgttgatgaaatagtcactgtttaaggaaaaaagtaattatgaggtgtagcagattgcagaaaaacaggattagaaacacacttaaaaagaacacacatttagagtctctcttcctcctcagcgaaccactaggccccctttttaaaaacacctttagagcctaattactccaataaaagtaactagaggtttggagtctggttaaataaattctgagtaaaattcttaagccaaatggaaattcttaatgcaatcatgaggacttctattgtctcttactgttgtattagatcctataaattgaactgatttttccataaggaaaatgcttcttttgagattaattctaataacgtatttgctattgcagtgcagagcccactgcaactgctaggactgaaagcagaggctgggtgccagagcacgtgattcttaacatcatttccacagacccctctgccctgaccctctgcattggatgcaggaagctgggaaagactgatgttgatttggaaacatgggctgaaaatgaaggccccatagtgcataggaacagtaaagccagggtgctgacgtgtgtgtgtgtgtgtgtgtgtgtgtgtgtgtgtgtgtggtgttgtgtgtgtttgtgcgtgcaccctacacatgtgtggtacctcactgctgctgtttagggaacttgagggacgcgtttcaaggggttgggtattactgacgagctttggctcaaaatatagcaggaccaggtcttttgttgataagtactgtttgtttattaatatgtcattaatggtatttcttttttacactctacaagtgaattagggagtctcttgttgacccctttgttgcaggaatgtgcgtcgggctaggttatccatgagtttctttattcctaatgcagttagaaagacctttctccttgagctctttgactcccagaaggtaccccagtccccagtgtacttagaaaggatctcgaacattgctggacgtcctcatagtactcacaaagggctagccttgaatgtcactcgcccagtcttcagtctcctgacttagagatacaatcacgtcacaggtctcttggcctcaatctgaaaactgctgccgccgcgccgaggagactcgcatgccgccaccacctcactgggagggcgccgagcccaccgtcgccccctagaccctgacagctgcagctgccttgccttgccgccgcctccctgcagggcccctgttccaatgaaaaacagaacacaaaagagcagagcacctaagcctgtctctgcctccctgtctaccggactggccagggcccaagacccccgctgctccactgcggggctgggcgggctgactccctgcttcctccaagctgctgcctcccctgcagccagggtctgggcagggtgcagccggtcctcggggcacgcagcttccttcaagtacactgtgtgtgcttcccggacctgcggcgatgccacgggcctgccttttctatgcgcctcactagcttaccaccctgtgcaggtaatgcaactgactttgtctcatcagtctttttctttccctgccaccctttatttatcaagcgtaatgttacactttaaaggacagcaaataagaactttgtagaatcccaccaggactttgctaacaataatgtttggaaataaagaagtgctctgaaaaaatatcagccaccaaaatagttatgttggcactgtgttcacacgcatggtccccacacccccaggttgggtgggtttttttgttttttgggtttttttgggggggggggctttttcatgttacatccatatctgtatttatatcttatttgtttcactttcaagtgtatcatggcaaatgtacagatttttttgttaataatgtgctaggatttgctaaaaaagaaaaaaaaaaaacccttttgagtttgccctagaataaatgagacttaattc

SEQ ID NO: 7540 - DNA, 6851 bp, Homo sapiens
  source 1..6851: mol_type = unassigned DNA
atgttgcagaattgttcagataaaaatttcgacgatgaagattctgtggatggtaacagaccttcctctgctagttctacatcatccaaggctccaccaagttctcggagaaacgttggaatgggaaccacccgccggcttggttcatccacccttggatccaagtcttcagctgcaaaagaaggagctggtgctgttgatgaagaggattttattaaagcatttgatgatgtacctgtagtacagatttattccagccgagaccttgaggaatccataaacaaaattagggaaatattatctgatgacaagcatgattgggagcagagagtaaatgctctaaaaaagattagatctttacttttggctggtgctgctgagtatgataacttctttcaacatttgcgtcttttggatggagcctttaaactctctgctaaggacctgcggtctcaggtagtgcgggaggcttgtatcacgttggggcatctgtcatcagttctggggaataagtttgaccatggagctgaagccattatgccaactatctttaatttaattccaaacagtgccaaaattatggccacatctggtgttgtagctgttaggttaattattcggcacacacacatccctaggttaatacctgtcataacaagcaactgtacctctaagtctgtcgcagttagaaggcgctgttttgaatttttagatttgcttttacaagaatggcagacacattcactagaacgacacatatcagtattagctgaaacaataaagaagggaatacatgatgctgattccgaagcaagaatagaagccagaaaatgttactggggtttccacagtcacttcagcagagaagcagagcacttgtaccacaccttggagtcctcctaccagaaagccctgcagtcccacctgaagaactcagacagcatagtgtctctgcctcagtcagaccgctcatcttccagctctcaagagagtctaaatcgtccgctgtctgccaaaagaagtcctactggaagtaccacatctagagcttctacagttagtaccaaatctgtgtcaacgactgggtccctccagcgatctcgaagtgatattgatgtgaacgcagcagccagtgccaaatccaaagtctcctcatcttcgggcacgacgcctttcagctctgcagcagctttgcctccagggtcatacgcatccttaggtcggatccgcacaagacggcaaagctctgggagtgccaccaacgtcgcctctacacctgataaccggggccgcagtcgcgctaaagtggtttcacagtcccagcgatccagatctgctaatcctgctggtgctggcagccggtcaagttccccaggaaaattgttgggaagtggttatggtggacttactgggggctcctcacgaggcccacctgtgacaccgtcttcagaaaagcgaagcaagattcccaggagccagggatgtagccgggaaacaagtccaaaccgaataggattagatcggtttgggcttggccagccaggaagaatacctggttctgtgaatgccatgagagttctgagcacaagtacagatcttgaagctgctgttgctgatgctttgaagaagcctgtgaggaggagatatgagccgtatgggatgtattctgacgatgatgccaacagtgatgcctcaagtgtttgctctgagcgctcatatggctccaggaatggtggcattccccattatctgcggcagactgaggatgtagcagaagttctcaaccactgtgctagttcaaactggtcagaaaggaaagaagggcttctgggcctgcagaacttactgaagagccaaagaacactgagtcgagttgaactgaaaaggttgtgtgagatcttcactcggatgtttgctgaccctcatagcaagattgctgattcagaagcagaatgtgaggataaagaaggaaatttgtttccatcagaagtctcttgtacaagagttttcagtatgtttttggagactcttgtggattttataataattcataaggatgatttacaagactggctttttgttcttctcacacaattacttaagaaaatgggagcagatttacttggatctgtgcaagcaaaagttcaaaaggctctagatgtcacaagggactcctttccatttgatcaacaatttaacattttgatgagatttattgtggatcaaactcaaactccaaacctcaaggtcaaagttgcaatcctgaaatacattgagtctctggccagacagatggatccaacagattttgtaaactctagtgagacaaggcttgctgtttctagaatcataacctggacaacagaaccaaagagttcagacgtgagaaaggcagcacagattgtgctaatctctctgtttgaattgaatactcctgaatttaccatgttacttggtgccttgccaaaaacattccaggatggtgccaccaaactcctgcacaaccacctcaagaattccagtaacaccagtgtgggctctccaagcaatacgattggccggacgccctcccgacacaccagcagcaggaccagccccctgacctcacccaccaactgttcccatgggggtctgtctccaagcatgctggactatgatacagagaacctgaactctgaagaaatctatagttctctacgtggagttacagaagccattgaaaagtttagttttcgaagccaagaagatctgaatgagccaattaaacgagatggcaaaaaggagtgtgatattgtgtcccgcgatgggggcgctgcctcccctgccactgagggccgggggggtagtgaagtagaaggaggccggacagctctggataacaagacctcactactcaacacccagcctccgcgcgccttcccggggccgcgggcgcgagactacaacccgtacccctactcagatgccatcaacacctacgacaagaccgccctgaaagaggctgtgttcgatgacgacatggagcagcttcgagacgtgcccatcgaccattctgacctggtggctgaccttctgaaagagctgtccaaccacaatgagcgagtggaggaacggaagggagccctgctggagctgctcaagatcacgcgggaagacagccttggtgtctgggaggagcacttcaagaccattctgctcctgctgctggagacccttggagacaaagaccattcaattcgagcactggcgttaagagttttgagggaaattctgagaaatcaaccagcaagatttaaaaactacgccgagctgacgattatgaagactctggaagcccacaaagactcccataaggaggtggtgagagcggctgaggaggctgcgtccacactggccagttccatccacccggagcagtgcatcaaggtgctctgccccatcatccagacggccgactaccccatcaaccttgctgccatcaagatgcagaccaaagtcgtcgagaggatcgcaaaggagtcattgctgcagctccttgtcgacatcatcccaggcttgctgcagggttatgacaacaccgaaagtagtgtgcgtaaggccagcgtgttttgcttagtggcaatttattccgtaatcggagaagacctgaaacctcaccttgcacagctcacagggagcaagatgaagctactaaacttatacataaagagggcccagaccaccaacagcaacagcagctcctcctccgatgtctccacgcacagctaatggcagtacctgtctcttgtgtagacctagaagcaatcggtggtgcctctcagagacctttccccacccccttcatcggctgcccagtcagtacaaggaggcccacaaatatttattacaatcagtattttggtcccttccagcttttctgtagaatcttactggtattgaatgtaaaggaagcaaggcctgtattgcagtcttcatacaaaacaaaaggaataagaacagaaaagagccatactgaaacatgtcttgtacagcctgctgagatggcgaaaccctgtgtgtggggtgcagtttttaaaaatcagagcgctctagccactacttggtagaaagtagcattttttttttcagttaataacatatttgggggtggggtggggtgttactttgtgttcttcctccttagcctattttcttgtgcgtatggtctgtgtggggcccctttcacagctgacaccacgaaaggtgatatatctttaagttgtgttctgagacctactaaaaatgggaatcaagtcttggcaagaacagtctgaagatggccttttaacaaacgctgggaattttgcttgtcatatccagactggaggccgactgccctggctttcagcgtagaattgggagtgcaccctgacagtctccttccagctctccctaatcgactccaccgacaaggtccctaccccagagcttccatgcaaaggaattcttcaagtttaaatctggacacaaaaataagataaatgtatggcatcatttagggatgcctgagatggcagttcatgaagcacagaagataaagaagaagtctttcatctttactgctgagatccttgggaacactgttgtcatgggggctctgccaagaccctcatctctgggctacacggtgattcagattgagcaccaacttgtttcctcccctcaaagttctgcctaagccgttcagttctaacatggtctcagttaatctggtaaatggcatctttaccatcttagttctgacttctcagtttaatgtgggattaagagccaagaaaagcctagagagactggatatcacaattttttttaattttataaactgaagtagttccttgaatgtctgttgatgaaatagtcactgtttaaggaaaaaagtaattatgaggtgtagcagattgcagaaaaacaggattagaaacacacttaaaaagaacacacatttagagtctctcttcctcctcagcgaaccactaggccccctttttaaaaacacctttagagcctaattactccaataaaagtaactagaggtttggagtctggttaaataaattctgagtaaaattcttaagccaaatggaaattcttaatgcaatcatgaggacttctattgtctcttactgttgtattagatcctataaattgaactgatttttccataaggaaaatgcttcttttgagattaattctaataacgtatttgctattgcagtgcagagcccactgcaactgctaggactgaaagcagaggctgggtgccagagcacgtgattcttaacatcatttccacagacccctctgccctgaccctctgcattggatgcaggaagctgggaaagactgatgttgatttggaaacatgggctgaaaatgaaggccccatagtgcataggaacagtaaagccagggtgctgacgtgtgtgtgtgtgtgtgtgtgtgtgtgtgtgtgtgtgtggtgttgtgtgtgtttgtgcgtgcaccctacacatgtgtggtacctcactgctgctgtttagggaacttgagggacgcgtttcaaggggttgggtattactgacgagctttggctcaaaatatagcaggaccaggtcttttgttgataagtactgtttgtttattaatatgtcattaatggtatttcttttttacactctacaagtgaattagggagtctcttgttgacccctttgttgcaggaatgtgcgtcgggctaggttatccatgagtttctttattcctaatgcagttagaaagacctttctccttgagctctttgactcccagaaggtaccccagtccccagtgtacttagaaaggatctcgaacattgctggacgtcctcatagtactcacaaagggctagccttgaatgtcactcgcccagtcttcagtctcctgacttagagatacaatcacgtcacaggtctcttggcctcaatctgaaaactgctgccgccgcgccgaggagactcgcatgccgccaccacctcactgggagggcgccgagcccaccgtcgccccctagaccctgacagctgcagctgccttgccttgccgccgcctccctgcagggcccctgttccaatgaaaaacagaacacaaaagagcagagcacctaagcctgtctctgcctccctgtctaccggactggccagggcccaagacccccgctgctccactgcggggctgggcgggctgactccctgcttcctccaagctgctgcctcccctgcagccagggtctgggcagggtgcagccggtcctcggggcacgcagcttccttcaagtacactgtgtgtgcttcccggacctgcggcgatgccacgggcctgccttttctatgcgcctcactagcttaccaccctgtgcaggtaatgcaactgactttgtctcatcagtctttttctttccctgccaccctttatttatcaagcgtaatgttacactttaaaggacagcaaataagaactttgtagaatcccaccaggactttgctaacaataatgtttggaaataaagaagtgctctgaaaaaatatcagccaccaaaatagttatgttggcactgtgttcacacgcatggtccccacacccccaggttgggtgggtttttttgttttttgggtttttttgggggggggggctttttcatgttacatccatatctgtatttatatcttatttgtttcactttcaagtgtatcatggcaaatgtacagatttttttgttaataatgtgctaggatttgctaaaaaagaaaaaaaaaaaacccttttgagtttgccctagaataaatgagacttaattc

SEQ ID NO: 7541 - DNA, 3942 bp, Homo sapiens
  source 1..3942: mol_type = unassigned DNA
agagcagtgtttttatttggtaccaggattactgacaatcatgactactgggaaagataaaaatttcgacgatgaagattctgtggatggtaacagaccttcctctgctagttctacatcatccaaggctccaccaagttctcggagaaacgttggaatgggaaccacccgccggcttggttcatccacccttggatccaagtcttcagctgcaaaagaaggagctggtgctgttgatgaagaggattttattaaagcatttgatgatgtacctgtagtacagatttattccagccgagaccttgaggaatccataaacaaaattagggaaatattatctgatgacaagcatgattgggagcagagagtaaatgctctaaaaaagattagatctttacttttggctggtgctgctgagtatgataacttctttcaacatttgcgtcttttggatggagcctttaaactctctgctaaggacctgcggtctcaggtagtgcgggaggcttgtatcacgttggggcatctgtcatcagttctggggaataagtttgaccatggagctgaagccattatgccaactatctttaatttaattccaaacagtgccaaaattatggccacatctggtgttgtagctgttaggttaattattcggcacacacacatccctaggttaatacctgtcataacaagcaactgtacctctaagtctgtcgcagttagaaggcgctgttttgaatttttagatttgcttttacaagaatggcagacacattcactagaacgacacatatcagtattagctgaaacaataaagaagggaatacatgatgctgattccgaagcaagaatagaagccagaaaatgttactggggtttccacagtcacttcagcagagaagcagagcacttgtaccacaccttggagtcctcctaccagaaagccctgcagtcccacctgaagaactcagacagcatagtgtctctgcctcagtcagaccgctcatcttccagctctcaagagagtctaaatcgtccgctgtctgccaaaagaagtcctactggaagtaccacatctagagcttctacagttagtaccaaatctgtgtcaacgactgggtccctccagcgatctcgaagtgatattgatgtgaacgcagcagccagtgccaaatccaaagtctcctcatcttcgggcacgacgcctttcagctctgcagcagctttgcctccagggtcatacgcatccttagatggtactaccactaaagcggagggtcggatccgcacaagacggcaaagctctgggagtgccaccaacgtcgcctctacacctgataaccggggccgcagtcgcgctaaagtggtttcacagtcccagcgatccagatctgctaatcctgctggtgctggcagccggtcaagttccccaggaaaattgttgggaagtggttatggtggacttactgggggctcctcacgaggcccacctgtgacaccgtcttcagaaaagcgaagcaagattcccaggagccagggatgtagccgggaaacaagtccaaaccgaataggattagatcggtttgggcttggccagccaggaagaatacctggttctgtgaatgccatgagagttctgagcacaagtacagatcttgaagctgctgttgctgatgctttgctgttaggagactccaggagcaagaagcctgtgaggaggagatatgagccgtatgggatgtattctgacgatgatgccaacagtgatgcctcaagtgtttgctctgagcgctcatatggctccaggaatggtggcattccccattatctgcggcagactgaggatgtagcagaagttctcaaccactgtgctagttcaaactggtcagaaaggaaagaagggcttctgggcctgcagaacttactgaagagccaaagaacactgagtcgagttgaactgaaaaggttgtgtgagatcttcactcggatgtttgctgaccctcatagcaaggttttcagtatgtttttggagactcttgtggattttataataattcataaggatgatttacaagactggctttttgttcttctcacacaattacttaagaaaatgggagcagatttacttggatctgtgcaagcaaaagttcaaaaggctctagatgtcacaagggactcctttccatttgatcaacaatttaacattttgatgagatttattgtggatcaaactcaaactccaaacctcaaggtcaaagttgcaatcctgaaatacattgagtctctggccagacagatggatccaacagattttgtaaactctagtgagacaaggcttgctgtttctagaatcataacctggacaacagaaccaaagagttcagacgtgagaaaggcagcacagattgtgctaatctctctgtttgaattgaatactcctgaatttaccatgttacttggtgccttgccaaaaacattccaggatggtgccaccaaactcctgcacaaccacctcaagaattccagtaacaccagtgtgggctctccaagcaatacgattggccggacgccctcccgacacaccagcagcaggaccagccccctgacctcacccaccaactgttcccatgggggtctgtctccaagcatgctggactatgatacagagaacctgaactctgaagaaatctatagttctctacgtggagttacagaagccattgaaaagtttagttttcgaagccaagaagatctgaatgagccaattaaacgagatggcaaaaaggagtgtgatattgtgtcccgcgatgggggcgctgcctcccctgccactgagggccgggggggtagtgaagtagaaggaggccggacagctctggataacaagacctcactactcaacacccagcctccgcgcgccttcccggggccgcgggcgcgagactacaacccgtacccctactcagatgccatcaacacctacgacaagaccgccctgaaagaggctgtgttcgatgacgacatggagcagcttcgagacgtgcccatcgaccattctgacctggtggctgaccttctgaaagagctgtccaaccacaatgagcgagtggaggaacggaagggagccctgctggagctgctcaagatcacgcgggaagacagccttggtgtctgggaggagcacttcaagaccattctgctcctgctgctggagacccttggagacaaagaccattcaattcgagcactggcgttaagagttttgagggaaattctgagaaatcaaccagcaagatttaaaaactacgccgagctgacgattatgaagactctggaagcccacaaagactcccataaggaggtggtgagagcggctgaggaggctgcgtccacactggccagttccatccacccggagcagtgcatcaaggtgctctgccccatcatccagacggccgactaccccatcaaccttgctgccatcaagatgcagaccaaagtcgtcgagaggatcgcaaaggagtcattgctgcagctccttgtcgacatcatcccaggcttgctgcagggttatgacaacaccgaaagtagtgtgcgtaaggccagcgtgttttgcttagtggcaatttattccgtaatcggagaagacctgaaacctcaccttgcacagctcacagggagcaagatgaagctactaaacttatacataaagagggcccagaccaccaacagcaacagcagctcctcctccgatgtctccacgcacagctaatggcagtacctgtctcttgtgtagacctagaagcaatcggtggtgcctctcagagacctttccccacccccttcatcggctgcccagtcagtacaaggaggcccacaaatatttattacaatcagtattttggtcccttccagcttttctgtagaatcttactg

SEQ ID NO: 7542 - DNA, 7257 bp, Homo sapiens
  source 1..7257: mol_type = unassigned DNA
agaggtcctatcgctcccagcggtttccgcagccacctccaccacctccgcagcaaaacgctagccggactggagggccctcgccggcgtcgtgctgacgtcacgcgcgtgctgacgtcgcccgcggccgcggcctctgaagcgggctggggatcggggggcgccgagtttgactagtttgggggcggctgggcgcttggcgttcctcccgccgcccgctgcgccccgcaagccgcgcccctggcgggctaagtgagtcccgcccgctcccgcggggacccgcactggaggctgggcggctctcggcgaaagttggccgctcacagactggcaggcgggcgggcggccgcagccatggagccccgcagcatggagtacttctgcgcccaggtgcagcagaaggacgtcggcggccggctgcaggtcggccaggagctcctgctctaccttggcgcccccggcgccatctcggacctggaggaggacctgggccgcctaggcaagacagtcgacgcgctcaccggctgggtgggttcgagcaactaccgggtatcattaatgggattggaaattttaagtgcctttgtggacagattatcaacacgctttaaatcctatgtagcaatggttattgtagctttaatagacagaatgggagatgccaaagacaaggttcgagatgaagctcagactctgatattgaagttaatggatcaagtagcaccacctatgtacatttgggagcagttggcttctggttttaaacacaagaattttcgatctcgagaaggcgtgtgtctgtgtcttattgaaaccttaaacatttttggggctcagccactagtcatcagcaaattgataccacatttgtgtatcctgtttggagactccaacagtcaggtgagagatgctgcaatattggctatagtggagatttatagacatgtgggagaaaaagtgaggatggatctttataagagaggaattccccctgctagattagaaatgatatttgccaaatttgatgaagtgcaaagttcaggcggtatgattttgagtgtctgcaaagataaaagcttcgatgatgaagaatcagtggatggaaataggccatcatcagctgcatcagccttcaaggttcctgcacctaaaacatccggaaatcctgccaacagtgcaaggaagcctggttcagcaggtggccctaaggttggaggtgcttctaaggaaggaggtgctggagcagttgatgaagatgattttataaaagcttttacagatgtcccttctattcagatttattctagtcgagaactcgaagaaacattaaataaaatcagggaaattttgtcagatgataaacatgactgggatcagcgtgccaatgcactgaagaaaattcgatcactgcttgttgctggagctgcacagtatgattgcttttttcaacatttacgattgttggatggagcacttaaactttcagctaaggatcttagatcccaggtggttagagaagcttgtattactgtagcccacctttcaacagttttgggaaacaagtttgatcatggcgctgaagccattgtacctacactttttaatctcgtccccaatagtgcaaaagtcatggcaacttctggatgtgcagcaatcagatttatcattcggcatactcatgtacccagacttatacctttaataacaagcaattgcacatcaaaatcagttcccgtgaggagacgttcatttgaatttttagatttattgttgcaagagtggcagactcattcattggaaagacatgcagccgtcttggttgaaactattaaaaagggaattcatgatgctgacgctgaggccagagtggaggcaagaaagacatacatgggtcttagaaaccactttcctggtgaagctgaaacattatataattcccttgagccatcttatcagaagagtcttcaaacttacttaaagagttctggcagtgtagcatctcttccacaatcagacaggtcctcatccagctcacaggaaagtctcaatcgccctttttcttccaaatggtctacagcaaatccatcaactgtggctggaagagtatcagcaggcagcagcaaagccagttcccttccaggaagcctgcagcgttcacgaagtgacattgatgtgaatgctgctgcaggtgccaaggcacatcatgctgctggacagtctgtgcgaagcgggcgcttaggtgcaggtgccctgaatgcaggttcctatgcgtcactagaggatacttctgacaagctggatggaacagcatctgaagatggccgggtgagagcaaaactttcagcaccacttgctggcatgggaaatgccaaggcagattctagaggaagaagtcgaacaaaaatggtgtctcaatcacagcctggtagccggtctgggtctccaggaagagttctgaccacaacagccctgtccactgtgagctctggtgttcaaagagtcctggtcaattcagcctcagcacaaaaaagaagcaagataccacggagccagggctgtagcagagaggctagtccatctaggctttcagtggcccgaagcagtcgtattcctcgaccaagtgtgagtcaaggatgcagccgggaagctagtcgggagagcagcagagacacaagtcctgttcgctcttttcagcccctcggtccaggttatgggatcagccaatcaagtcgactgtcgtcttctgttagtgccatgcgagtcctgaacacaggttctgatgtggaggaggcggtggcagatgccttgaaaaaaccagctcgaagaagatatgaatcatatggaatgcattcagatgatgacgccaacagcgatgcatctagtgcttgttcagaacgctcctatagttctcgaaatggtagtattcctacatatatgaggcagacggaagatgtggcagaagtcctcaatagatgtgctagttccaattggtcagaaaggaaagaaggcctcctaggtctgcagaacttattaaaaaatcagagaacactaagtcgagttgaactgaaaagattatgtgaaattttcacaagaatgtttgctgaccctcatggcaagagggtattcagcatgtttttggagactctagtggatttcatacaagtccacaaagatgatcttcaagattggttgtttgtactgctgacacaactactaaaaaaaatgggtgctgatttgcttggatctgttcaggcaaaagttcagaaagcccttgatgttacaagagagtcttttccaaatgatcttcagttcaatattctaatgagatttacagttgatcagacccagacaccaagcttaaaggtgaaggttgctatccttaaatacatagaaactctggccaaacagatggatccaggagattttataaattccagtgaaactcgcctagcagtgtctcgggtcatcacttggacaacagaacccaaaagttctgatgttcggaaggcagcacagtcagtgctgatttcattatttgaactcaataccccagagtttacaatgttattaggagctttaccaaaaacttttcaggatggtgctaccaagcttcttcataatcaccttcgaaacactggcaatggaacccagagttccatggggagtcctttgacaagaccaacaccacgatcaccagctaactggtccagtcctcttacttctcctaccaatacatcacagaatactttatctccaagtgcatttgattatgacacagaaaatatgaactctgaagatatttatagctctcttagaggtgtcactgaagcaatccagaatttcagcttccgtagccaagaagatatgaatgagccattgaaaagggattctaaaaaagatgatggcgattcaatgtgtggtggtcctgggatgtctgacccaagagcaggaggtgatgctactgactcaagtcaaacagctcttgataataaagcttcattgctccattcaatgcctactcactcctctccacgctctcgagactataatccatataactattcagatagcatcagtcccttcaacaagtctgccctcaaggaagccatgtttgatgatgatgctgaccagtttcctgacgatctttccctagatcattctgacctagttgcagagttgttgaaggagctgtctaaccataatgagcgtgtagaagaaagaaaaattgccctctatgaacttatgaaactgacacaggaagaatcttttagtgtttgggatgaacacttcaaaacaatattgcttttattgcttgaaacgcttggagataaagagcctacaatcagggctttggcattaaaggttttaagagaaatcctaaggcatcaaccagcaagatttaaaaactatgcagaattgactgtcatgaaaacattggaagcacataaagatcctcataaggaggtggtgagatctgctgaggaagcggcatcagtgttggccacttcaattagtccagagcagtgcatcaaagtgctttgtcctatcattcaaactgcagactacccaattaatctggctgcaatcaaaatgcaaacaaaagtgatagagagagtgtccaaggaaaccctaaacctgcttttgccagagattatgccaggtctaatacagggttatgataattcagagagcagtgttcggaaagcttgtgtcttctgcctggtggctgttcatgcggtaattggtgatgaactaaaaccacatctcagtcaacttactggcagtaaaatgaagctactgaatctttacatcaaacgtgcacaaacaggttctggaggagctgatcccactactgatgtttctggacaaagttagtgaagctcatcacagcgaaccaggtctctcaaaagaaaggacagatagaccaccctcatcaatgaaaggaagttctcaaacacatcctttggaacttactattgtttcccagttttagttttttgtttcgtttcgttttgtattttctgtaacagaggactatcctcagtctgcatgtaacttttatgatagttattccaaattcaagaagaagcagtattaacatcaattgatcgacacaaagtaatttttaatttaattcatcatttcacatgtttgtactttgtcttcccattaacctttgccagtgttatgattgtataaatttttttaaatgctggttaaacaggaatgcttaaagctttaaaagtttaacagtctaaaacatttttgcttttattcaactgcagaataatatttttattgctactttgagttttgtttcgtatcatgtcctatgctagaaatatttaaatgatgtgaaacaaagcaggactaatttgaactacagctggactccgtttgtgtgatggtgatacatgtcattagttgcaacttctttggggtgatctatagtttgaaaactaaaacctcaaagacagatgttacagaatcagccagttctgtaaaactgatattgtctattggttattgatcttgccatctttatttaaaaccatgtcccttctatgatcccttaagaaagctgcaccaaatcatctgcctgttttttcttgatacttactgaaatagaaggttttattgcagggtttattttggtttgtttatatctttgttgtgaatgatgcttttttgtatttattaatatcaaattcacttatgaataaacttgataatggaaacggacaaaaaaaatcaagtgcgtgtgtgtccttgaccgtcttctgtttctcacgtaataaacaaattatcgagacatgggagtgaccagcaccttttctttaaatggtggaacctggtttccttttaccatgaaattgtcttacttgaaaatattgatcctgatgagagagaagatggtgccaaggctgtctttgtataatgggctcaaattctctacctcttcagggctaatacttttaactgagctgctgcctatagtgtcttttggaaaactacttaaagggtgattttctgttactttttagcaaatttttttaatcacctcttgctacacccattcttttcatgtgcagccgactcaaaaattaccagttttggtgaaaggctaaattagataatttggaaccaggatactaatgatttctcatctttacttttttttaatcctaatataaagtgaatttgattgaaaaggcaaatagctattagggaagcagtttgccattgttgcagagttatctgtactttgtttaactgaaaaaaatgtagaaatatatgtaaagaatttaagacaagagtactgaatggatgatttgtcataggctttcccctttctttctgttctagcagcaggaaaagtttctctatatcctctccctctacctgtaacaattttgttttctactgttaattacattgtgtatttatagttctatgcttactgttgtgcatatactggcaataaaactgtacataacattacttgaaaaagttaataatgtatatcagtttttctgtctcactgtgtaacaagtcactcagttttattttaactttagacggtcttgtatcagtggtggtctcttgaattttgtaagttcatctgaggagaaaagatttttcaggtgtagctaccacaatcaaaggtatatagctacatacgcatgtatatattacagcttatctgtaagaagaaaatgcattttaaacacaactcttctcagtagcattttatgacctttggatatgtttgtaatcatttcgaatcaaaatattgatttaattttgacctctggtttaagatactgctttaactactgttgacaaccaagtagagtgacttaagctgaacagtaactaactggaaaattagataagcacctggcatctaatggcaggcaggcactcaagaaatgaattaactacataatggaaaagtatggtttaatgtgtccaaatgaaagctagtagatgtaaacatggaaaaattgtgtttacaattttataatctcagttgataagactataagaaagctgattatttaaatcactatatacaatacacccttaatttgttcattccagaaacatactgagatgtcagctacttaaaaatggtcacaaaaagctactgtttatatttttcctcctgctattctctcccaaattaattattaataagtgttgttcatttactgcactgctgagaactaattaaaattatatattccagattgt

SEQ ID NO: 7543 - DNA, 1597 bp, Homo sapiens
  source 1..1597: mol_type = unassigned DNA
acagcacctagggcagggaagagaaagaaaaatgccggcacaaacctcagtggtggttctgtggttgtttctgtctttttttgatagaatctttgattagtatcgaatttactgtatttggccatgtgaactattgggagcctcctagggtgagggaaattaagagctttcagaggaatgaggcgactgatttgcaaacggatctgtgattataaaagcttcgatgatgaagaatcagtggatggaaataggccatcatcagctgcatcagccttcaaggttcctgcacctaaaacatccggaaatcctgccaacagtgcaaggaagcctggttcagcaggtggccctaaggttggaggtgcttctaaggaaggaggtgctggagcagttgatgaagatgattttataaaagcttttacagatgtcccttctattcagatttattctagtcgagaactcgaagaaacattaaataaaatcagggaaattttgtcagatgataaacatgactgggatcagcgtgccaatgcactgaagaaaattcgatcactgcttgttgctggagctgcacagtatgattgcttttttcaacatttacgattgttggatggagcacttaaactttcagctaaggatcttagatcccaggtggttagagaagcttgtattactgtagcccacctttcaacagttttgggaaacaagtttgatcatggcgctgaagccattgtacctacactttttaatctcgtccccaatagtgcaaaagtcatggcaacttctggatgtgcagcaatcagatttatcattcggcatactcatgtacccagacttatacctttaataacaagcaattgcacatcaaaatcagttcccgtgaggagacgttcatttgaatttttagatttattgttgcaagagtggcagactcattcattggaaagacatgcagccgtcttggttgaaactattaaaaagggaattcatgatgctgacgctgaggccagagtggaggcaagaaagacatacatgggtcttagaaaccactttcctggtgaagctgaaacattatataattcccttgagccatcttatcagaagagtcttcaaacttacttaaagagttctggcagtgtagcatctcttccacaatcagacaggtcctcatccagctcacaggaaagtctcaatcgccctttttcttccaaatggtctacagcaaatccatcaactgtggctggaagagtatcagcaggcagcagcaaagccagttcccttccaggaagcctgcagcgttcacgaagtgacattgatgtgaatgctgctgcaggtgccaaggcacatcatgctgctggacagtctgtgcgaagcgggcgcttaggtgcaggtgccctgaatgcaggttcctatgcgtcactagaatgtgaagccttttggagatctgggagaactgcaaagctctactctgtctaaccaaaccctaaacatatattccaaaactctattcagtttgatttcttcatgtttttatgtctatcaaattaaaaagttgacgttggtttgcgtatctcttcttcatgcttccatttttttcttt

SEQ ID NO: 7544 - DNA, 7254 bp, Homo sapiens
  source 1..7254: mol_type = unassigned DNA
agaggtcctatcgctcccagcggtttccgcagccacctccaccacctccgcagcaaaacgctagccggactggagggccctcgccggcgtcgtgctgacgtcacgcgcgtgctgacgtcgcccgcggccgcggcctctgaagcgggctggggatcggggggcgccgagtttgactagtttgggggcggctgggcgcttggcgttcctcccgccgcccgctgcgccccgcaagccgcgcccctggcgggctaagtgagtcccgcccgctcccgcggggacccgcactggaggctgggcggctctcggcgaaagttggccgctcacagactggcaggcgggcgggcggccgcagccatggagccccgcagcatggagtacttctgcgcccaggtgcagcagaaggacgtcggcggccggctgcaggtcggccaggagctcctgctctaccttggcgcccccggcgccatctcggacctggaggaggacctgggccgcctaggcaagacagtcgacgcgctcaccggctgggtgggttcgagcaactaccgggtatcattaatgggattggaaattttaagtgcctttgtggacagattatcaacacgctttaaatcctatgtagcaatggttattgtagctttaatagacagaatgggagatgccaaagacaaggttcgagatgaagctcagactctgatattgaagttaatggatcaagtagcaccacctatgtacatttgggagcagttggcttctggttttaaacacaagaattttcgatctcgagaaggcgtgtgtctgtgtcttattgaaaccttaaacatttttggggctcagccactagtcatcagcaaattgataccacatttgtgtatcctgtttggagactccaacagtcaggtgagagatgctgcaatattggctatagtggagatttatagacatgtgggagaaaaagtgaggatggatctttataagagaggaattccccctgctagattagaaatgatatttgccaaatttgatgaagtgcaaagttcaggcggtatgattttgagtgtctgcaaagataaaagcttcgatgatgaagaatcagtggatggaaataggccatcatcagctgcatcagccttcaaggttcctgcacctaaaacatccggaaatcctgccaacagtgcaaggaagcctggttcagcaggtggccctaaggttggaggtgcttctaaggaaggaggtgctggagcagttgatgaagatgattttataaaagcttttacagatgtcccttctattcagatttattctagtcgagaactcgaagaaacattaaataaaatcagggaaattttgtcagatgataaacatgactgggatcagcgtgccaatgcactgaagaaaattcgatcactgcttgttgctggagctgcacagtatgattgcttttttcaacatttacgattgttggatggagcacttaaactttcagctaaggatcttagatcccaggtggttagagaagcttgtattactgtagcccacctttcaacagttttgggaaacaagtttgatcatggcgctgaagccattgtacctacactttttaatctcgtccccaatagtgcaaaagtcatggcaacttctggatgtgcagcaatcagatttatcattcggcatactcatgtacccagacttatacctttaataacaagcaattgcacatcaaaatcagttcccgtgaggagacgttcatttgaatttttagatttattgttgcaagagtggcagactcattcattggaaagacatgcagccgtcttggttgaaactattaaaaagggaattcatgatgctgacgctgaggccagagtggaggcaagaaagacatacatgggtcttagaaaccactttcctggtgaagctgaaacattatataattcccttgagccatcttatcagaagagtcttcaaacttacttaaagagttctggcagtgtagcatctcttccacaatcagacaggtcctcatccagctcacaggaaagtctcaatcgccctttttcttccaaatggtctacagcaaatccatcaactgtggctggaagagtatcagcaggcagcagcaaagccagttcccttccaggaagcctgcagcgttcacgaagtgacattgatgtgaatgctgctgcaggtgccaaggcacatcatgctgctggacagtctgtgcgaagcgggcgcttaggtgcaggtgccctgaatgcaggttcctatgcgtcactagaggatacttctgacaagctggatggaacagcatctgaagatggccgggtgagagcaaaactttcagcaccacttgctggcatgggaaatgccaaggcagattctagaggaagaagtcgaacaaaaatggtgtctcaatcacagcctggtagccggtctgggtctccaggaagagttctgaccacaacagccctgtccactgtgagctctggtgttcaaagagtcctggtcaattcagcctcagcacaaaaaagaagcaagataccacggagccagggctgtagcagagaggctagtccatctaggctttcagtggcccgaagcagtcgtattcctcgaccaagtgtgagtcaaggatgcagccgggaagctagtcgggagagcagcagagacacaagtcctgttcgctcttttcagcccctcggtccaggttatgggatcagccaatcaagtcgactgtcgtcttctgttagtgccatgcgagtcctgaacacaggttctgatgtggaggaggcggtggcagatgccttgaaaaaaccagctcgaagaagatatgaatcatatggaatgcattcagatgatgacgccaacagcgatgcatctagtgcttgttcagaacgctcctatagttctcgaaatggtagtattcctacatatatgaggcagacggaagatgtggcagaagtcctcaatagatgtgctagttccaattggtcagaaaggaaagaaggcctcctaggtctgcagaacttattaaaaaatcagagaacactaagtcgagttgaactgaaaagattatgtgaaattttcacaagaatgtttgctgaccctcatggcaaggtattcagcatgtttttggagactctagtggatttcatacaagtccacaaagatgatcttcaagattggttgtttgtactgctgacacaactactaaaaaaaatgggtgctgatttgcttggatctgttcaggcaaaagttcagaaagcccttgatgttacaagagagtcttttccaaatgatcttcagttcaatattctaatgagatttacagttgatcagacccagacaccaagcttaaaggtgaaggttgctatccttaaatacatagaaactctggccaaacagatggatccaggagattttataaattccagtgaaactcgcctagcagtgtctcgggtcatcacttggacaacagaacccaaaagttctgatgttcggaaggcagcacagtcagtgctgatttcattatttgaactcaataccccagagtttacaatgttattaggagctttaccaaaaacttttcaggatggtgctaccaagcttcttcataatcaccttcgaaacactggcaatggaacccagagttccatggggagtcctttgacaagaccaacaccacgatcaccagctaactggtccagtcctcttacttctcctaccaatacatcacagaatactttatctccaagtgcatttgattatgacacagaaaatatgaactctgaagatatttatagctctcttagaggtgtcactgaagcaatccagaatttcagcttccgtagccaagaagatatgaatgagccattgaaaagggattctaaaaaagatgatggcgattcaatgtgtggtggtcctgggatgtctgacccaagagcaggaggtgatgctactgactcaagtcaaacagctcttgataataaagcttcattgctccattcaatgcctactcactcctctccacgctctcgagactataatccatataactattcagatagcatcagtcccttcaacaagtctgccctcaaggaagccatgtttgatgatgatgctgaccagtttcctgacgatctttccctagatcattctgacctagttgcagagttgttgaaggagctgtctaaccataatgagcgtgtagaagaaagaaaaattgccctctatgaacttatgaaactgacacaggaagaatcttttagtgtttgggatgaacacttcaaaacaatattgcttttattgcttgaaacgcttggagataaagagcctacaatcagggctttggcattaaaggttttaagagaaatcctaaggcatcaaccagcaagatttaaaaactatgcagaattgactgtcatgaaaacattggaagcacataaagatcctcataaggaggtggtgagatctgctgaggaagcggcatcagtgttggccacttcaattagtccagagcagtgcatcaaagtgctttgtcctatcattcaaactgcagactacccaattaatctggctgcaatcaaaatgcaaacaaaagtgatagagagagtgtccaaggaaaccctaaacctgcttttgccagagattatgccaggtctaatacagggttatgataattcagagagcagtgttcggaaagcttgtgtcttctgcctggtggctgttcatgcggtaattggtgatgaactaaaaccacatctcagtcaacttactggcagtaaaatgaagctactgaatctttacatcaaacgtgcacaaacaggttctggaggagctgatcccactactgatgtttctggacaaagttagtgaagctcatcacagcgaaccaggtctctcaaaagaaaggacagatagaccaccctcatcaatgaaaggaagttctcaaacacatcctttggaacttactattgtttcccagttttagttttttgtttcgtttcgttttgtattttctgtaacagaggactatcctcagtctgcatgtaacttttatgatagttattccaaattcaagaagaagcagtattaacatcaattgatcgacacaaagtaatttttaatttaattcatcatttcacatgtttgtactttgtcttcccattaacctttgccagtgttatgattgtataaatttttttaaatgctggttaaacaggaatgcttaaagctttaaaagtttaacagtctaaaacatttttgcttttattcaactgcagaataatatttttattgctactttgagttttgtttcgtatcatgtcctatgctagaaatatttaaatgatgtgaaacaaagcaggactaatttgaactacagctggactccgtttgtgtgatggtgatacatgtcattagttgcaacttctttggggtgatctatagtttgaaaactaaaacctcaaagacagatgttacagaatcagccagttctgtaaaactgatattgtctattggttattgatcttgccatctttatttaaaaccatgtcccttctatgatcccttaagaaagctgcaccaaatcatctgcctgttttttcttgatacttactgaaatagaaggttttattgcagggtttattttggtttgtttatatctttgttgtgaatgatgcttttttgtatttattaatatcaaattcacttatgaataaacttgataatggaaacggacaaaaaaaatcaagtgcgtgtgtgtccttgaccgtcttctgtttctcacgtaataaacaaattatcgagacatgggagtgaccagcaccttttctttaaatggtggaacctggtttccttttaccatgaaattgtcttacttgaaaatattgatcctgatgagagagaagatggtgccaaggctgtctttgtataatgggctcaaattctctacctcttcagggctaatacttttaactgagctgctgcctatagtgtcttttggaaaactacttaaagggtgattttctgttactttttagcaaatttttttaatcacctcttgctacacccattcttttcatgtgcagccgactcaaaaattaccagttttggtgaaaggctaaattagataatttggaaccaggatactaatgatttctcatctttacttttttttaatcctaatataaagtgaatttgattgaaaaggcaaatagctattagggaagcagtttgccattgttgcagagttatctgtactttgtttaactgaaaaaaatgtagaaatatatgtaaagaatttaagacaagagtactgaatggatgatttgtcataggctttcccctttctttctgttctagcagcaggaaaagtttctctatatcctctccctctacctgtaacaattttgttttctactgttaattacattgtgtatttatagttctatgcttactgttgtgcatatactggcaataaaactgtacataacattacttgaaaaagttaataatgtatatcagtttttctgtctcactgtgtaacaagtcactcagttttattttaactttagacggtcttgtatcagtggtggtctcttgaattttgtaagttcatctgaggagaaaagatttttcaggtgtagctaccacaatcaaaggtatatagctacatacgcatgtatatattacagcttatctgtaagaagaaaatgcattttaaacacaactcttctcagtagcattttatgacctttggatatgtttgtaatcatttcgaatcaaaatattgatttaattttgacctctggtttaagatactgctttaactactgttgacaaccaagtagagtgacttaagctgaacagtaactaactggaaaattagataagcacctggcatctaatggcaggcaggcactcaagaaatgaattaactacataatggaaaagtatggtttaatgtgtccaaatgaaagctagtagatgtaaacatggaaaaattgtgtttacaattttataatctcagttgataagactataagaaagctgattatttaaatcactatatacaatacacccttaatttgttcattccagaaacatactgagatgtcagctacttaaaaatggtcacaaaaagctactgtttatatttttcctcctgctattctctcccaaattaattattaataagtgttgttcatttactgcactgctgagaactaattaaaattatatattccagattgt

SEQ ID NO: 7545 - DNA, 7282 bp, Homo sapiens
  source 1..7282: mol_type = unassigned DNA
agaggtcctatcgctcccagcggtttccgcagccacctccaccacctccgcagcaaaacgctagccggactggagggccctcgccggcgtcgtgctgacgtcacgcgcgtgctgacgtcgcccgcggccgcggcctctgaagcgggctggggatcggggggcgccgagtttgactagtttgggggcggctgggcgcttggcgttcctcccgccgcccgctgcgccccgcaagccgcgcccctggcgggctaagtgagtcccgcccgctcccgcggggacccgcactggaggctgggcggctctcggcgaaagttggccgctcacagactggcaggcgggcgggcggccgcagccatggagccccgcagcatggagtacttctgcgcccaggtgcagcagaaggacgtcggcggccggctgcaggtcggccaggagctcctgctctaccttggcgcccccggcgccatctcggacctggaggaggacctgggccgcctaggcaagacagtcgacgcgctcaccggctgggtgggttcgagcaactaccgggtatcattaatgggattggaaattttaagtgcctttgtggacagattatcaacacgctttaaatcctatgtagcaatggttattgtagctttaatagacagaatgggagatgccaaagacaaggttcgagatgaagctcagactctgatattgaagttaatggatcaagtagcaccacctatgtacatttgggagcagttggcttctggttttaaacacaagaattttcgatctcgagaaggcgtgtgtctgtgtcttattgaaaccttaaacatttttggggctcagccactagtcatcagcaaattgataccacatttgtgtatcctgtttggagactccaacagtcaggtgagagatgctgcaatattggctatagtggagatttatagacatgtgggagaaaaagtgaggatggatctttataagagaggaattccccctgctagattagaaatgatatttgccaaatttgatgaagtgcaaagttcaggcggtatgattttgagtgtctgcaaagataaaagcttcgatgatgaagaatcagtggatggaaataggccatcatcagctgcatcagccttcaaggttcctgcacctaaaacatccggaaatcctgccaacagtgcaaggaagcctggttcagcaggtggccctaaggttggaggtgcttctaaggaaggaggtgctggagcagttgatgaagatgattttataaaagcttttacagatgtcccttctattcagatttattctagtcgagaactcgaagaaacattaaataaaatcagggaaattttgtcagatgataaacatgactgggatcagcgtgccaatgcactgaagaaaattcgatcactgcttgttgctggagctgcacagtatgattgcttttttcaacatttacgattgttggatggagcacttaaactttcagctaaggatcttagatcccaggtggttagagaagcttgtattactgtagcccacctttcaacagttttgggaaacaagtttgatcatggcgctgaagccattgtacctacactttttaatctcgtccccaatagtgcaaaagtcatggcaacttctggatgtgcagcaatcagatttatcattcggcatactcatgtacccagacttatacctttaataacaagcaattgcacatcaaaatcagttcccgtgaggagacgttcatttgaatttttagatttattgttgcaagagtggcagactcattcattggaaagacatgcagccgtcttggttgaaactattaaaaagggaattcatgatgctgacgctgaggccagagtggaggcaagaaagacatacatgggtcttagaaaccactttcctggtgaagctgaaacattatataattcccttgagccatcttatcagaagagtcttcaaacttacttaaagagttctggcagtgtagcatctcttccacaatcagacaggtcctcatccagctcacaggaaagtctcaatcgccctttttcttccaaatggtctacagcaaatccatcaactgtggctggaagagtatcagcaggcagcagcaaagccagttcccttccaggaagcctgcagcgttcacgaagtgacattgatgtgaatgctgctgcaggtgccaaggcacatcatgctgctggacagtctgtgcgaagcgggcgcttaggtgcaggtgccctgaatgcaggttcctatgcgtcactagaggatacttctgacaagctggatggaacagcatctgaagatggccgggtgagagcaaaactttcagcaccacttgctggcatgggaaatgccaaggcagattctagaggaagaagtcgaacaaaaatggtgtctcaatcacagcctggtagccggtctgggtctccaggaagagttctgaccacaacagccctgtccactgtgagctctggtgttcaaagagtcctggtcaattcagcctcagcacaaaaaagaagcaagataccacggagccagggctgtagcagagaggctagtccatctaggctttcagtggcccgaagcagtcgtattcctcgaccaagtgtgagtcaaggatgcagccgggaagctagtcgggagagcagcagagacacaagtcctgttcgctcttttcagcccctcggtccaggttatgggatcagccaatcaagtcgactgtcgtcttctgttagtgccatgcgagtcctgaacacaggttctgatgtggaggaggcggtggcagatgccttgctcttaggagacatacggactaagaaaaaaccagctcgaagaagatatgaatcatatggaatgcattcagatgatgacgccaacagcgatgcatctagtgcttgttcagaacgctcctatagttctcgaaatggtagtattcctacatatatgaggcagacggaagatgtggcagaagtcctcaatagatgtgctagttccaattggtcagaaaggaaagaaggcctcctaggtctgcagaacttattaaaaaatcagagaacactaagtcgagttgaactgaaaagattatgtgaaattttcacaagaatgtttgctgaccctcatggcaaggtattcagcatgtttttggagactctagtggatttcatacaagtccacaaagatgatcttcaagattggttgtttgtactgctgacacaactactaaaaaaaatgggtgctgatttgcttggatctgttcaggcaaaagttcagaaagcccttgatgttacaagagagtcttttccaaatgatcttcagttcaatattctaatgagatttacagttgatcagacccagacaccaagcttaaaggtgaaggttgctatccttaaatacatagaaactctggccaaacagatggatccaggagattttataaattccagtgaaactcgcctagcagtgtctcgggtcatcacttggacaacagaacccaaaagttctgatgttcggaaggcagcacagtcagtgctgatttcattatttgaactcaataccccagagtttacaatgttattaggagctttaccaaaaacttttcaggatggtgctaccaagcttcttcataatcaccttcgaaacactggcaatggaacccagagttccatggggagtcctttgacaagaccaacaccacgatcaccagctaactggtccagtcctcttacttctcctaccaatacatcacagaatactttatctccaagtgcatttgattatgacacagaaaatatgaactctgaagatatttatagctctcttagaggtgtcactgaagcaatccagaatttcagcttccgtagccaagaagatatgaatgagccattgaaaagggattctaaaaaagatgatggcgattcaatgtgtggtggtcctgggatgtctgacccaagagcaggaggtgatgctactgactcaagtcaaacagctcttgataataaagcttcattgctccattcaatgcctactcactcctctccacgctctcgagactataatccatataactattcagatagcatcagtcccttcaacaagtctgccctcaaggaagccatgtttgatgatgatgctgaccagtttcctgacgatctttccctagatcattctgacctagttgcagagttgttgaaggagctgtctaaccataatgagcgtgtagaagaaagaaaaattgccctctatgaacttatgaaactgacacaggaagaatcttttagtgtttgggatgaacacttcaaaacaatattgcttttattgcttgaaacgcttggagataaagagcctacaatcagggctttggcattaaaggttttaagagaaatcctaaggcatcaaccagcaagatttaaaaactatgcagaattgactgtcatgaaaacattggaagcacataaagatcctcataaggaggtggtgagatctgctgaggaagcggcatcagtgttggccacttcaattagtccagagcagtgcatcaaagtgctttgtcctatcattcaaactgcagactacccaattaatctggctgcaatcaaaatgcaaacaaaagtgatagagagagtgtccaaggaaaccctaaacctgcttttgccagagattatgccaggtctaatacagggttatgataattcagagagcagtgttcggaaagcttgtgtcttctgcctggtggctgttcatgcggtaattggtgatgaactaaaaccacatctcagtcaacttactggcagtaaaatgaagctactgaatctttacatcaaacgtgcacaaacaggttctggaggagctgatcccactactgatgtttctggacaaagttagtgaagctcatcacagcgaaccaggtctctcaaaagaaaggacagatagaccaccctcatcaatgaaaggaagttctcaaacacatcctttggaacttactattgtttcccagttttagttttttgtttcgtttcgttttgtattttctgtaacagaggactatcctcagtctgcatgtaacttttatgatagttattccaaattcaagaagaagcagtattaacatcaattgatcgacacaaagtaatttttaatttaattcatcatttcacatgtttgtactttgtcttcccattaacctttgccagtgttatgattgtataaatttttttaaatgctggttaaacaggaatgcttaaagctttaaaagtttaacagtctaaaacatttttgcttttattcaactgcagaataatatttttattgctactttgagttttgtttcgtatcatgtcctatgctagaaatatttaaatgatgtgaaacaaagcaggactaatttgaactacagctggactccgtttgtgtgatggtgatacatgtcattagttgcaacttctttggggtgatctatagtttgaaaactaaaacctcaaagacagatgttacagaatcagccagttctgtaaaactgatattgtctattggttattgatcttgccatctttatttaaaaccatgtcccttctatgatcccttaagaaagctgcaccaaatcatctgcctgttttttcttgatacttactgaaatagaaggttttattgcagggtttattttggtttgtttatatctttgttgtgaatgatgcttttttgtatttattaatatcaaattcacttatgaataaacttgataatggaaacggacaaaaaaaatcaagtgcgtgtgtgtccttgaccgtcttctgtttctcacgtaataaacaaattatcgagacatgggagtgaccagcaccttttctttaaatggtggaacctggtttccttttaccatgaaattgtcttacttgaaaatattgatcctgatgagagagaagatggtgccaaggctgtctttgtataatgggctcaaattctctacctcttcagggctaatacttttaactgagctgctgcctatagtgtcttttggaaaactacttaaagggtgattttctgttactttttagcaaatttttttaatcacctcttgctacacccattcttttcatgtgcagccgactcaaaaattaccagttttggtgaaaggctaaattagataatttggaaccaggatactaatgatttctcatctttacttttttttaatcctaatataaagtgaatttgattgaaaaggcaaatagctattagggaagcagtttgccattgttgcagagttatctgtactttgtttaactgaaaaaaatgtagaaatatatgtaaagaatttaagacaagagtactgaatggatgatttgtcataggctttcccctttctttctgttctagcagcaggaaaagtttctctatatcctctccctctacctgtaacaattttgttttctactgttaattacattgtgtatttatagttctatgcttactgttgtgcatatactggcaataaaactgtacataacattacttgaaaaagttaataatgtatatcagtttttctgtctcactgtgtaacaagtcactcagttttattttaactttagacggtcttgtatcagtggtggtctcttgaattttgtaagttcatctgaggagaaaagatttttcaggtgtagctaccacaatcaaaggtatatagctacatacgcatgtatatattacagcttatctgtaagaagaaaatgcattttaaacacaactcttctcagtagcattttatgacctttggatatgtttgtaatcatttcgaatcaaaatattgatttaattttgacctctggtttaagatactgctttaactactgttgacaaccaagtagagtgacttaagctgaacagtaactaactggaaaattagataagcacctggcatctaatggcaggcaggcactcaagaaatgaattaactacataatggaaaagtatggtttaatgtgtccaaatgaaagctagtagatgtaaacatggaaaaattgtgtttacaattttataatctcagttgataagactataagaaagctgattatttaaatcactatatacaatacacccttaatttgttcattccagaaacatactgagatgtcagctacttaaaaatggtcacaaaaagctactgtttatatttttcctcctgctattctctcccaaattaattattaataagtgttgttcatttactgcactgctgagaactaattaaaattatatattccagattgtaaaa

SEQ ID NO: 7546 - DNA, 6978 bp, Homo sapiens
  source 1..6978: mol_type = unassigned DNA
gaaagttggccgctcacagactggcaggcgggcgggcggccgcagccatggagccccgcagcatggagtacttctgcgcccaggtgcagcagaaggacgtcggcggccggctgcaggtcggccaggagctcctgctctaccttggcgcccccggcgccatctcggacctggaggaggacctgggccgcctaggcaagacagtcgacgcgctcaccggctgggtgggttcgagcaactaccgggtatcattaatgggattggaaattttaagtgcctttgtggacagattatcaacacgctttaaatcctatgtagcaatggttattgtagctttaatagacagaatgggagatgccaaagacaaggttcgagatgaagctcagactctgatattgaagttaatggatcaagtagcaccacctatgtacatttgggagcagttggcttctggttttaaacacaagaattttcgatctcgagaaggcgtgtgtctgtgtcttattgaaaccttaaacatttttggggctcagccactagtcatcagcaaattgataccacatttgtgtatcctgtttggagactccaacagtcaggtgagagatgctgcaatattggctatagtggagatttatagacatgtgggagaaaaagtgaggatggatctttataagagaggaattccccctgctagattagaaatgatatttgccaaatttgatgaagtgcaaagttcaggcggtatgattttgagtgtctgcaaagataaaagcttcgatgatgaagaatcagtggatggaaataggccatcatcagctgcatcagccttcaaggttcctgcacctaaaacatccggaaatcctgccaacagtgcaaggaagcctggttcagcaggtggccctaaggttggagcaggtgcttctaaggaaggaggtgctggagcagttgatgaagatgattttataaaagcttttacagatgtcccttctattcagatttattctagtcgagaactcgaagaaacattaaataaaatcagggaaattttgtcagatgataaacatgactgggatcagcgtgccaatgcactgaagaaaattcgatcactgcttgttgctggagctgcacagtatgattgcttttttcaacatttacgattgttggatggagcacttaaactttcagctaaggatcttagatcccaggtggttagagaagcttgtattactgtagcccacctttcaacagttttgggaaacaagtttgatcatggcgctgaagccattgtacctacactttttaatctcgtccccaatagtgcaaaagtcatggcaacttctggatgtgcagcaatcagatttatcattcggcatactcatgtacccagacttatacctttaataacaagcaattgcacatcaaaatcagttcccgtgaggagacgttcatttgaatttttagatttattgttgcaagagtggcagactcattcattggaaagacatgcagccgtcttggttgaaactattaaaaagggaattcatgatgctgacgctgaggccagagtggaggcaagaaagacatacatgggtcttagaaaccactttcctggtgaagctgaaacattatataattcccttgagccatcttatcagaagagtcttcaaacttacttaaagagttctggcagtgtagcatctcttccacaatcagacaggtcctcatccagctcacaggaaagtctcaatcgccctttttcttccaaatggtctacagcaaatccatcaactgtggctggaagagtatcagcaggcagcagcaaagccagttcccttccaggaagcctgcagcgttcacgaagtgacattgatgtgaatgctgctgcaggtgccaaggcacatcatgctgctggacagtctgtgcgaagcgggcgcttaggtgcaggtgccctgaatgcaggttcctatgcgtcactagaggatacttctgacaagctggatggaacagcatctgaagatggccgggtgagagcaaaactttcagcaccacttgctggcatgggaaatgccaaggcagattctagaggaagaagtcgaacaaaaatggtgtctcaatcacagcctggtagccggtctgggtctccaggaagagttctgaccacaacagccctgtccactgtgagctctggtgttcaaagagtcctggtcaattcagcctcagcacaaaaaagaagcaagataccacggagccagggctgtagcagagaggctagtccatctaggctttcagtggcccgaagcagtcgtattcctcgaccaagtgtgagtcaaggatgcagccgggaagctagtcgggagagcagcagagacacaagtcctgttcgctcttttcagcccctcggtccaggttatgggatcagccaatcaagtcgactgtcgtcttctgttagtgccatgcgagtcctgaacacaggttctgatgtggaggaggcggtggcagatgccttgctcttaggagacatacggactaagaaaaaaccagctcgaagaagatatgaatcatatggaatgcattcagatgatgacgccaacagcgatgcatctagtgcttgttcagaacgctcctatagttctcgaaatggtagtattcctacatatatgaggcagacggaagatgtggcagaagtcctcaatagatgtgctagttccaattggtcagaaaggaaagaaggcctcctaggtctgcagaacttattaaaaaatcagagaacactaagtcgagttgaactgaaaagattatgtgaaattttcacaagaatgtttgctgaccctcatggcaaggtattcagcatgtttttggagactctagtggatttcatacaagtccacaaagatgatcttcaagattggttgtttgtactgctgacacaactactaaaaaaaatgggtgctgatttgcttggatctgttcaggcaaaagttcagaaagcccttgatgttacaagagagtcttttccaaatgatcttcagttcaatattctaatgagatttacagttgatcagacccagacaccaagcttaaaggtgaaggttgctatccttaaatacatagaaactctggccaaacagatggatccaggagattttataaattccagtgaaactcgcctagcagtgtctcgggtcatcacttggacaacagaacccaaaagttctgatgttcggaaggcagcacagtcagtgctgatttcattatttgaactcaataccccagagtttacaatgttattaggagctttaccaaaaacttttcaggatggtgctaccaagcttcttcataatcaccttcgaaacactggcaatggaacccagagttccatggggagtcctttgacaagaccaacaccacgatcaccagctaactggtccagtcctcttacttctcctaccaatacatcacagaatactttatctccaagtgcatttgattatgacacagaaaatatgaactctgaagatatttatagctctcttagaggtgtcactgaagcaatccagaatttcagcttccgtagccaagaagatatgaatgagccattgaaaagggattctaaaaaagatgatggcgattcaatgtgtggtggtcctgggatgtctgacccaagagcaggaggtgatgctactgactcaagtcaaacagctcttgataataaagcttcattgctccattcaatgcctactcactcctctccacgctctcgagactataatccatataactattcagatagcatcagtcccttcaacaagtctgccctcaaggaagccatgtttgatgatgatgctgaccagtttcctgacgatctttccctagatcattctgacctagttgcagagttgttgaaggagctgtctaaccataatgagcgtgtagaagaaagaaaaattgccctctatgaacttatgaaactgacacaggaagaatcttttagtgtttgggatgaacacttcaaaacaatattgcttttattgcttgaaacgcttggagataaagagcctacaatcagggctttggcattaaaggttttaagagaaatcctaaggcatcaaccagcaagatttaaaaactatgcagaattgactgtcatgaaaacattggaagcacataaagatcctcataaggaggtggtgagatctgctgaggaagcggcatcagtgttggccacttcaattagtccagagcagtgcatcaaagtgctttgtcctatcattcaaactgcagactacccaattaatctggctgcaatcaaaatgcaaacaaaagtgatagagagagtgtccaaggaaaccctaaacctgcttttgccagagattatgccaggtctaatacagggttatgataattcagagagcagtgttcggaaagcttgtgtcttctgcctggtggctgttcatgcggtaattggtgatgaactaaaaccacatctcagtcaacttactggcagtaaaatgaagctactgaatctttacatcaaacgtgcacaaacaggttctggaggagctgatcccactactgatgtttctggacaaagttagtgaagctcatcacagcgaaccaggtctctcaaaagaaaggacagatagaccaccctcatcaatgaaaggaagttctcaaacacatcctttggaacttactattgtttcccagttttagttttttgtttcgtttcgttttgtattttctgtaacagaggactatcctcagtctgcatgtaacttttatgatagttattccaaattcaagaagaagcagtattaacatcaattgatcgacacaaagtaatttttaatttaattcatcatttcacatgtttgtactttgtcttcccattaacctttgccagtgttatgattgtataaatttttttaaatgctggttaaacaggaatgcttaaagctttaaaagtttaacagtctaaaacatttttgcttttattcaactgcagaataatatttttattgctactttgagttttgtttcgtatcatgtcctatgctagaaatatttaaatgatgtgaaacaaagcaggactaatttgaactacagctggactccgtttgtgtgatggtgatacatgtcattagttgcaacttctttggggtgatctatagtttgaaaactaaaacctcaaagacagatgttacagaatcagccagttctgtaaaactgatattgtctattggttattgatcttgccatctttatttaaaaccatgtcccttctatgatcccttaagaaagctgcaccaaatcatctgcctgttttttcttgatacttactgaaatagaaggttttattgcagggtttattttggtttgtttatatctttgttgtgaatgatgcttttttgtatttattaatatcaaattcacttatgaataaacttgataatggaaacggacaaaaaaaatcaagtgcgtgtgtgtccttgaccgtcttctgtttctcacgtaataaacaaattatcgagacatgggagtgaccagcaccttttctttaaatggtggaacctggtttccttttaccatgaaattgtcttacttgaaaatattgatcctgatgagagagaagatggtgccaaggctgtctttgtataatgggctcaaattctctacctcttcagggctaatacttttaactgagctgctgcctatagtgtcttttggaaaactacttaaagggtgattttctgttactttttagcaaatttttttaatcacctcttgctacacccattcttttcatgtgcagccgactcaaaaattaccagttttggtgaaaggctaaattagataatttggaaccaggatactaatgatttctcatctttacttttttttaatcctaatataaagtgaatttgattgaaaaggcaaatagctattagggaagcagtttgccattgttgcagagttatctgtactttgtttaactgaaaaaaatgtagaaatatatgtaaagaatttaagacaagagtactgaatggatgatttgtcataggctttcccctttctttctgttctagcagcaggaaaagtttctctatatcctctccctctacctgtaacaattttgttttctactgttaattacattgtgtatttatagttctatgcttactgttgtgcatatactggcaataaaactgtacataacattacttgaaaaagttaataatgtatatcagtttttctgtctcactgtgtaacaagtcactcagttttattttaactttagacggtcttgtatcagtggtggtctcttgaattttgtaagttcatctgaggagaaaagatttttcaggtgtagctaccacaatcaaaggtatatagctacatacgcatgtatatattacagcttatctgtaagaagaaaatgcattttaaacacaactcttctcagtagcattttatgacctttggatatgtttgtaatcatttcgaatcaaaatattgatttaattttgacctctggtttaagatactgctttaactactgttgacaaccaagtagagtgacttaagctgaacagtaactaactggaaaattagataagcacctggcatctaatggcaggcaggcactcaagaaatgaattaactacataatggaaaagtatggtttaatgtgtccaaatgaaagctagtagatgtaaacatggaaaaattgtgtttacaattttataatctcagttgataagactataagaaagctgattatttaaatcactatatacaatacacccttaatttgttcattccagaaacatactgagatgtcagctacttaaaaatggtcacaaaaagctactgtttatatttttcctcctgctattctctcccaaattaattattaataagtgttgttcatttactgcactgctgagaactaattaaaattatatattccagattgtaaaa

SEQ ID NO: 7547 - DNA, 5972 bp, Homo sapiens
  source 1..5972: mol_type = unassigned DNA
attgctactgattacatggatatctttagggaagcagaaaatgattgctgaacacatgccttgtgttttgatgattgcattaaaagtcccccagcgggatggcatttattggctctcagagcttttcttagattaaatttcaggcagccagtacaaggagaaacatcataacctgtatccaacagcatatgtgcagctaaagagtaatcttaatcaagtccttctaggctgtgctaaataaacgagggttttcagcaagaccccagacttttattttgaagtggagtagcagctgttggctattgcggtgcagagctgcagcgaggcctgggtcacacagtgctccgggtgtctgcaggctgcaggccgagcccagtggcgcaggcactgagctgtacttatttgctgtgctatttgacctcttggtttcagagagctccctggaccatctaatggctatgggagatgataaaagcttcgatgatgaagaatcagtggatggaaataggccatcatcagctgcatcagccttcaaggttcctgcacctaaaacatccggaaatcctgccaacagtgcaaggaagcctggttcagcaggtggccctaaggttggaggtgcttctaaggaaggaggtgctggagcagttgatgaagatgattttataaaagcttttacagatgtcccttctattcagatttattctagtcgagaactcgaagaaacattaaataaaatcagggaaattttgtcagatgataaacatgactgggatcagcgtgccaatgcactgaagaaaattcgatcactgcttgttgctggagctgcacagtatgattgcttttttcaacatttacgattgttggatggagcacttaaactttcagctaaggatcttagatcccaggtggttagagaagcttgtattactgtagcccacctttcaacagttttgggaaacaagtttgatcatggcgctgaagccattgtacctacactttttaatctcgtccccaatagtgcaaaagtcatggcaacttctggatgtgcagcaatcagatttatcattcggcatactcatgtacccagacttatacctttaataacaagcaattgcacatcaaaatcagttcccgtgaggagacgttcatttgaatttttagatttattgttgcaagagtggcagactcattcattggaaagacatgcagccgtcttggttgaaactattaaaaagggaattcatgatgctgacgctgaggccagagtggaggcaagaaagacatacatgggtcttagaaaccactttcctggtgaagctgaaacattatataattcccttgagccatcttatcagaagagtcttcaaacttacttaaagagttctggcagtgtagcatctcttccacaatcagacaggtcctcatccagctcacaggaaagtctcaatcgccctttttcttccaaatggtctacagcaaatccatcaactgtggctggaagagtatcagcaggcagcagcaaagccagttcccttccaggaagcctgcagcgttcacgaagtgacattgatgtgaatgctgctgcaggtgccaaggcacatcatgctgctggacagtctgtgcgaagcgggcgcttaggtgcaggtgccctgaatgcaggttcctatgcgtcactagaggatacttctgacaagctggatggaacagcatctgaagatggccgggtgagagcaaaactttcagcaccacttgctggcatgggaaatgccaaggcagattctagaggaagaagtcgaacaaaaatggtgtctcaatcacagcctggtagccggtctgggtctccaggaagagttctgaccacaacagccctgtccactgtgagctctggtgttcaaagagtcctggtcaattcagcctcagcacaaaaaagaagcaagataccacggagccagggctgtagcagagaggctagtccatctaggctttcagtggcccgaagcagtcgtattcctcgaccaagtgtgagtcaaggatgcagccgggaagctagtcgggagagcagcagagacacaagtcctgttcgctcttttcagcccctcgcctccagacaccattccagatcaactggtgccctctacgcccccgaagtgtatggggcctcaggtccaggttatgggatcagccaatcaagtcgactgtcgtcttctgttagtgccatgcgagtcctgaacacaggttctgatgtggaggaggcggtggcagatgccttgaaaaaaccagctcgaagaagatatgaatcatatggaatgcattcagatgatgacgccaacagcgatgcatctagtgcttgttcagaacgctcctatagttctcgaaatggtagtattcctacatatatgaggcagacggaagatgtggcagaagtcctcaatagatgtgctagttccaattggtcagaaaggaaagaaggcctcctaggtctgcagaacttattaaaaaatcagagaacactaagtcgagttgaactgaaaagattatgtgaaattttcacaagaatgtttgctgaccctcatggcaaggtattcagcatgtttttggagactctagtggatttcatacaagtccacaaagatgatcttcaagattggttgtttgtactgctgacacaactactaaaaaaaatgggtgctgatttgcttggatctgttcaggcaaaagttcagaaagcccttgatgttacaagagagtcttttccaaatgatcttcagttcaatattctaatgagatttacagttgatcagacccagacaccaagcttaaaggtgaaggttgctatccttaaatacatagaaactctggccaaacagatggatccaggagattttataaattccagtgaaactcgcctagcagtgtctcgggtcatcacttggacaacagaacccaaaagttctgatgttcggaaggcagcacagtcagtgctgatttcattatttgaactcaataccccagagtttacaatgttattaggagctttaccaaaaacttttcaggatggtgctaccaagcttcttcataatcaccttcgaaacactggcaatggaacccagagttccatggggagtcctttgacaagaccaacaccacgatcaccagctaactggtccagtcctcttacttctcctaccaatacatcacagaatactttatctccaagtgcatttgattatgacacagaaaatatgaactctgaagatatttatagctctcttagaggtgtcactgaagcaatccagaatttcagcttccgtagccaagaagatatgaatgagccattgaaaagggattctaaaaaagatgatggcgattcaatgtgtggtggtcctgggatgtctgacccaagagcaggaggtgatgctactgactcaagtcaaacagctcttgataataaagcttcattgctccattcaatgcctactcactcctctccacgctctcgagactataatccatataactattcagatagcatcagtcccttcaacaagtctgccctcaaggaagccatgtttgatgatgatgctgaccagtttcctgacgatctttccctagatcattctgacctagttgcagagttgttgaaggagctgtctaaccataatgagcgtgtagaagaaagaaaaattgccctctatgaacttatgaaactgacacaggaagaatcttttagtgtttgggatgaacacttcaaaacaatattgcttttattgcttgaaacgcttggagataaagagcctacaatcagggctttggcattaaaggttttaagagaaatcctaaggcatcaaccagcaagatttaaaaactatgcagaattgactgtcatgaaaacattggaagcacataaagatcctcataaggaggtggtgagatctgctgaggaagcggcatcagtgttggccacttcaattagtccagagcagtgcatcaaagtgctttgtcctatcattcaaactgcagactacccaattaatctggctgcaatcaaaatgcaaacaaaagtgatagagagagtgtccaaggaaaccctaaacctgcttttgccagagattatgccaggtctaatacagggttatgataattcagagagcagtgttcggaaagcttgtgtcttctgcctggtggctgttcatgcggtaattggtgatgaactaaaaccacatctcagtcaacttactggcagtaaaatgaagctactgaatctttacatcaaacgtgcacaaacaggttctggaggagctgatcccactactgatgtttctggacaaagttagtgaagctcatcacagcgaaccaggtctctcaaaagaaaggacagatagaccaccctcatcaatgaaaggaagttctcaaacacatcctttggaacttactattgtttcccagttttagttttttgtttcgtttcgttttgtattttctgtaacagaggactatcctcagtctgcatgtaacttttatgatagttattccaaattcaagaagaagcagtattaacatcaattgatcgacacaaagtaatttttaatttaattcatcatttcacatgtttgtactttgtcttcccattaacctttgccagtgttatgattgtataaatttttttaaatgctggttaaacaggaatgcttaaagctttaaaagtttaacagtctaaaacatttttgcttttattcaactgcagaataatatttttattgctactttgagttttgtttcgtatcatgtcctatgctagaaatatttaaatgatgtgaaacaaagcaggactaatttgaactacagctggactccgtttgtgtgatggtgatacatgtcattagttgcaacttctttggggtgatctatagtttgaaaactaaaacctcaaagacagatgttacagaatcagccagttctgtaaaactgatattgtctattggttattgatcttgccatctttatttaaaaccatgtcccttctatgatcccttaagaaagctgcaccaaatcatctgcctgttttttcttgatacttactgaaatagaaggttttattgcagggtttattttggtttgtttatatctttgttgtgaatgatgcttttttgtatttattaatatcaaattcacttatgaataaacttgataatggaaacggacaaaaaaaatcaagtgcgtgtgtgtccttgaccgtcttctgtttctcacgtaataaacaaattatcgagacatgggagtgaccagcaccttttctttaaatggtggaacctggtttccttttaccatgaaattgtcttacttgaaaatattgatcctgatgagagagaagatggtgccaaggctgtctttgtataatgggctcaaattctctacctcttcagggctaatacttttaactgagctgctgcctatagtgtcttttggaaaactacttaaagggtgattttctgttactttttagcaaatttttttaatcacctcttgctacacccattcttttcatgtgcagccgactcaaaaattaccagttttggtgaaaggctaaattagataatttggaaccaggatactaatgatttctcatctttacttttttttaatcctaatataaagtgaatttgattgaaaaggcaaatagctattagggaagcagtttgccattgttgcagagttatctgtactttgtttaactgaaaaaaatgtagaaatatatgtaaagaatttaagacaagagtactgaatggatgatttgtcataggctttcccctttctttctgttctagcagcaggaaaagtttctctatatcctctccctctacctgtaacaattttgttttctactgttaattacattgtgtatttatagttctatgcttactgttgtgcatatactggcaataaaactgtacataacattacttgaaaaagtt

SEQ ID NO: 7548 - DNA, 6234 bp, Homo sapiens
  source 1..6234: mol_type = unassigned DNA
atgaggcgactgatttgcaaacggatctgtgattataaaagcttcgatgatgaagaatcagtggatggaaataggccatcatcagctgcatcagccttcaaggttcctgcacctaaaacatccggaaatcctgccaacagtgcaaggaagcctggttcagcaggtggccctaaggttggagaattattgtctataatgatttattctagtcgagaactcgaagaaacattaaataaaatcagggaaattttgtcagatgataaacatgactgggatcagcgtgccaatgcactgaagaaaattcgatcactgcttgttgctggagctgcacagtatgattgcttttttcaacatttacgattgttggatggagcacttaaactttcagctaaggatcttagatcccaggtggttagagaagcttgtattactgtagcccacctttcaacagttttgggaaacaagtttgatcatggcgctgaagccattgtacctacactttttaatctcgtccccaatagtgcaaaagtcatggcaacttctggatgtgcagcaatcagatttatcattcggcatactcatgtacccagacttatacctttaataacaagcaattgcacatcaaaatcagttcccgtgaggagacgttcatttgaatttttagatttattgttgcaagagtggcagactcattcattggaaagacatgcagccgtcttggttgaaactattaaaaagggaattcatgatgctgacgctgaggccagagtggaggcaagaaagacatacatgggtcttagaaaccactttcctggtgaagctgaaacattatataattcccttgagccatcttatcagaagagtcttcaaacttacttaaagagttctggcagtgtagcatctcttccacaatcagacaggtcctcatccagctcacaggaaagtctcaatcgccctttttcttccaaatggtctacagcaaatccatcaactgtggctggaagagtatcagcaggcagcagcaaagccagttcccttccaggaagcctgcagcgttcacgaagtgacattgatgtgaatgctgctgcaggtgccaaggcacatcatgctgctggacagtctgtgcgaagcgggcgcttaggtgcaggtgccctgaatgcaggttcctatgcgtcactagaggatacttctgacaagctggatgacttatttagtgataatggccgggtgagagcaaaactttcagcaccacttgctggcatgggaaatgccaaggcagattctagaggaagaagtcgaacaaaaatggtgtctcaatcacagcgttcatcatcacctgacaaaaatgaaggatcacaatctgctaataccattggtgctggtagccggtctgggtctccaggaagagttctgaccacaacagccctgtccactgtgagctctggtgttcaaagagtcctggtcaattcagcctcagcacaaaaaagaagcaagataccacggagccagggctgtagcagagaggctagtccatctaggctttcagtggcccgaagcagtcgtattcctcgaccaagtgtgagtcaaggatgcagccgggaagctagtcgggagagcagcagagacacaagtcctgttcgctcttttcagcccctcggtccaggttatgggatcagccaatcaagtcgactgtcgtcttctgttagtgccatgcgagtcctgaacacaggttctgatgtggaggaggcggtggcagatgccttggtactctttgattttaaaacaaaaaaaaaaccagctcgaagaagatatgaatcatatggaatgcattcagatgatgacgccaacagcgatgcatctagtgcttgttcagaacgctcctatagttctcgaaatggtagtattcctacatatatgaggcagacggaagatgtggcagaagtcctcaatagatgtgctagttccaattggtcagaaaggaaagaaggcctcctaggtctgcagaacttattaaaaaatcagagaacactaagtcgagttgaactgaaaagattatgtgaaattttcacaagaatgtttgctgaccctcatggcaaggtattcagcatgtttttggagactctagtggatttcatacaagtccacaaagatgatcttcaagattggttgtttgtactgctgacacaactactaaaaaaaatgggtgctgatttgcttggatctgttcaggcaaaagttcagaaagcccttgatgttacaagagagtcttttccaaatgatcttcagttcaatattctaatgagatttacagttgatcagacccagacaccaagcttaaaggtgaaggttgctatccttaaatacatagaaactctggccaaacagatggatccaggagattttataaattccagtgaaactcgcctagcagtgtctcgggtcatcacttggacaacagaacccaaaagttctgatgttcggaaggcagcacagtcagtgctgatttcattatttgaactcaataccccagagtttacaatgttattaggagctttaccaaaaacttttcaggatggtgctaccaagcttcttcataatcaccttcgaaacactggcaatggaacccagagttccatggggagtcctttgacaagaccaacaccacgatcaccagctaactggtccagtcctcttacttctcctaccaatacatcacagaatactttatctccaagtgcatttgattatgacacagaaaatatgaactctgaagatatttatagctctcttagaggtgtcactgaagcaatccagaatttcagcttccgtagccaagaagatatgaatgagccattgaaaagggattctaaaaaagatgatggcgattcaatgtgtggtggtcctgggatgtctgacccaagagcaggaggtgatgctactgactcaagtcaaacagctcttgataataaagcttcattgctccattcaatgcctactcactcctctccacgctctcgagactataatccatataactattcagatagcatcagtcccttcaacaagtctgccctcaaggaagccatgtttgatgatgatgctgaccagtttcctgacgatctttccctagatcattctgacctagttgcagagttgttgaaggagctgtctaaccataatgagcgtgtagaagaaagaaaaattgccctctatgaacttatgaaactgacacaggaagaatcttttagtgtttgggatgaacacttcaaaacaatattgcttttattgcttgaaacgcttggagataaagagcctacaatcagggctttggcattaaaggttttaagagaaatcctaaggcatcaaccagcaagatttaaaaactatgcagaattgactgtcatgaaaacattggaagcacataaagatcctcataaggaggtggtgagatctgctgaggaagcggcatcagtgttggccacttcaattagtccagagcagtgcatcaaagtgctttgtcctatcattcaaactgcagactacccaattaatctggctgcaatcaaaatgcaaacaaaagtgatagagagagtgtccaaggaaaccctaaacctgcttttgccagagattatgccaggtctaatacagggttatgataattcagagagcagtgttcggaaagcttgtgtcttctgcctggtggctgttcatgcggtaattggtgatgaactaaaaccacatctcagtcaacttactggcagtaaaatgaagctactgaatctttacatcaaacgtgcacaaacaggttctggaggagctgatcccactactgatgtttctggacaaagttagtgaagctcatcacagcgaaccaggtctctcaaaagaaaggacagatagaccaccctcatcaatgaaaggaagttctcaaacacatcctttggaacttactattgtttcccagttttagttttttgtttcgtttcgttttgtattttctgtaacagaggactatcctcagtctgcatgtaacttttatgatagttattccaaattcaagaagaagcagtattaacatcaattgatcgacacaaagtaatttttaatttaattcatcatttcacatgtttgtactttgtcttcccattaacctttgccagtgttatgattgtataaatttttttaaatgctggttaaacaggaatgcttaaagctttaaaagtttaacagtctaaaacatttttgcttttattcaactgcagaataatatttttattgctactttgagttttgtttcgtatcatgtcctatgctagaaatatttaaatgatgtgaaacaaagcaggactaatttgaactacagctggactccgtttgtgtgatggtgatacatgtcattagttgcaacttctttggggtgatctatagtttgaaaactaaaacctcaaagacagatgttacagaatcagccagttctgtaaaactgatattgtctattggttattgatcttgccatctttatttaaaaccatgtcccttctatgatcccttaagaaagctgcaccaaatcatctgcctgttttttcttgatacttactgaaatagaaggttttattgcagggtttattttggtttgtttatatctttgttgtgaatgatgcttttttgtatttattaatatcaaattcacttatgaataaacttgataatggaaacggacaaaaaaaatcaagtgcgtgtgtgtccttgaccgtcttctgtttctcacgtaataaacaaattatcgagacatgggagtgaccagcaccttttctttaaatggtggaacctggtttccttttaccatgaaattgtcttacttgaaaatattgatcctgatgagagagaagatggtgccaaggctgtctttgtataatgggctcaaattctctacctcttcagggctaatacttttaactgagctgctgcctatagtgtcttttggaaaactacttaaagggtgattttctgttactttttagcaaatttttttaatcacctcttgctacacccattcttttcatgtgcagccgactcaaaaattaccagttttggtgaaaggctaaattagataatttggaaccaggatactaatgatttctcatctttacttttttttaatcctaatataaagtgaatttgattgaaaaggcaaatagctattagggaagcagtttgccattgttgcagagttatctgtactttgtttaactgaaaaaaatgtagaaatatatgtaaagaatttaagacaagagtactgaatggatgatttgtcataggctttcccctttctttctgttctagcagcaggaaaagtttctctatatcctctccctctacctgtaacaattttgttttctactgttaattacattgtgtatttatagttctatgcttactgttgtgcatatactggcaataaaactgtacataacattacttgaaaaagttaataatgtatatcagtttttctgtctcactgtgtaacaagtcactcagttttattttaactttagacggtcttgtatcagtggtggtctcttgaattttgtaagttcatctgaggagaaaagatttttcaggtgtagctaccacaatcaaaggtatatagctacatacgcatgtatatattacagcttatctgtaagaagaaaatgcattttaaacacaactcttctcagtagcattttatgacctttggatatgtttgtaatcatttcgaatcaaaatattgatttaattttgacctctggtttaagatactgctttaactactgttgacaaccaagtagagtgacttaagctgaacagtaactaactggaaaattagataagcacctggcatctaatggcaggcaggcactcaagaaatgaattaactacataatggaaaagtatggtttaatgtgtccaaatgaaagctagtagatgtaaacatggaaaaattgtgtttacaattttataatctcagttgataagactataagaaagctgattatttaaatcactatatacaatacacccttaatttgttcattccagaaacatactgagatgtcagctacttaaaaatggtcacaaaaagctactgtttatatttttcctcctgctattctctcccaaattaattattaataagtgttgttcatttactgcactgctgagaactaattaaaattatatattccagattgt

SEQ ID NO: 7549 - DNA, 2013 bp, Homo sapiens
  source 1..2013: mol_type = unassigned DNA
ccccagcagccgccccagccgcagccgcagccgcccggctcgtctgccaccaccccgggcggcggcagcggcggctcgctcagcgccatgccgccgcccagccccgactcagagaacggcttctaccccgggctgccgtcgtccatgaacccggccttcttccctagcttctcgcccgtgtcgccgcacggctgcactgggctcagcgttccgacgagcggcggcggcggcggcggcttcggcggccccttctcggctaccgctgtgccccctccgccgccgcccgccatgaatatacctcaacagcagcccccgccgcccgcggcgccgcagcagccgcagagccggaggtcgcccgtcagcccgcagctccagcagcagcaccaggcggcggccgccgccttcctgcagcagaggaactcctataaccaccaccagcctcttctgaaacagtctccctggagcaaccatcagagcagtggctggggcactggaagtatgtcctggggagcaatgcatggcagagatcatcgtagaaccggaaacatgggaatcccaggaactatgaatcagatatctccattgaagaaaccgttttctggtaatgtcatagcaccaccgaaatttactcgctcaactccatcactgactccaaaatcttggattgaagataatgtgttcagaacagacaacaatagtaatacactcttacccttacaggatcgaagtagaatgtatgacagtttgaatatgcactctttggaaaattcccttatcgatattatgagagcagagcatgatcctcttaagggtcgattgagctatccacatccaggaactgacaatctgttgatgttaaatggtcgttcttccctctttccaatagatgatggcttgcttgatgatggtcacagtgatcaagttggagttttaaattcacccacctgttattcagctcaccaaaatggagagcgaatagaacgcttctctcgaaaagtttttgttggtggtcttcctccagatattgatgaagatgaaataactgctagcttcagaagatttgggcctttggtagtagattggcctcataaagcagaaagcaagtcctattttccaccaaaaggctatgcatttcttctctttcaagaagagagctcagttcaggcactcattgatgcttgtattgaagaagatggaaaactctatctgtgtgtttctagccctactatcaaggacaaaccagttcaaatacgtccttggaatttaagtgatagtgattttgtaatggatggttctcagcctttggatccccgaaaaacaatttttgttggaggtgttcctaggccattaagggctgtggaacttgctatgatcatggaccggctgtatggtggagtttgttatgcaggaattgatacagatcctgagctaaaatacccaaaaggtgctgggcgagttgctttctccaatcagcagagctatattgctgccattagtgctcggtttgttcagcttcagcatggtgatattgataaacgtgtggaggtaaagccatatgtgctagatgaccagatgtgtgatgaatgccagggcgcacgctgtggtggaaaatttgctccctttttttgtgccaatgtcacttgcctgcagtattactgtgagttttgttgggcaaatatccactctcgtgctggacgtgagttccataagccattggtaaaggaaggtgctgatcgcccacgtcagatccacttccgctggaactaagaatagcaaactggcctctgtttaacaaggaaagaaagggtgcatgtggcttactgtgtctgaagatactgacatgcagaagaaataagtgcattcttctgcttttcaccccagctatcaatacatgcatctttatcagcagccaaaacactacaagcctcttgtttttcaccaaaaccctacatctcaggcttactaatttttgtgatattttcatgttcaaataaaatgtttttttgtattttc

SEQ ID NO: 7550 - DNA, 5504 bp, Homo sapiens
  source 1..5504: mol_type = unassigned DNA
atgccgccgcccagccccgactcagagaacggcttctaccccgggctgccgtcgtccatgaacccggccttcttccctagcttctcgcccgtgtcgccgcacggctgcactgggctcagcgttccgccgccgcccgccatgaatatacctcaacagcagcccccgccgcccgcggcgccgcagcagccgcagagccggaggtcgcccgtcagcccgcagctccagcagcagcaccaggcggcggccgccgccttcctgcagcagaggaactcctataaccaccaccagcctcttctgaaacagtctccctggagcaaccatcagagcagtggctggggcactggaagtatgtcctggggagcaatgcatggcagagatcatcgtagaaccggaaacatgggaatcccaggaactatgaatcagatatctccattgaagaaaccgttttctggtaatgtcatagcaccaccgaaatttactcgctcaactccatcactgactccaaaatcttggattgaagataatgtgttcagaacagacaacaatagtaatacactcttacccttacaggtgagatctagtttgcagttgccagcttggggctcagattcactccaagatagttggtgcactgcagccggaacatccagaatagaccaggatcgaagtagaatgtatgacagtttgaatatgcactctttggaaaattcccttatcgatattatgagagcagagcatgatcctcttaagggtcgattgagctatccacatccaggaactgacaatctgttgatgttaaatgcaaggagttatgggcgaagacgaggtcgttcttccctctttccaatagatgatggcttgcttgatgatggtcacagtgatcaagttggagttttaaattcacccacctgttattcagctcaccaaaatggagagcgaatagaacgcttctctcgaaaagtttttgttggtggtcttcctccagatattgatgaagatgaaataactgctagcttcagaagatttgggcctttggtagtagattggcctcataaagcagaaagcaagtcctattttccaccaaaaggctatgcatttcttctctttcaagaagagagctcagttcaggcactcattgatgcttgtattgaagaagatggaaaactctatctgtgtgtttctagccctactatcaaggacaaaccagttcaaatacgtccttggaatttaagtgatagtgattttgtaatggatggttctcagcctttggatccccgaaaaacaatttttgttggaggtgttcctaggccattaagggctgtggaacttgctatgatcatggaccggctgtatggtggagtttgttatgcaggaattgatacagatcctgagctaaaatacccaaaaggtgctgggcgagttgctttctccaatcagcagagctatattgctgccattagtgctcggtttgttcagcttcagcatggtgatattgataaacgtgtggaggtaaagccatatgtgctagatgaccagatgtgtgatgaatgccagggcgcacgctgtggtggaaaatttgctccctttttttgtgccaatgtcacttgcctgcagtattactgtgagttttgttgggcaaatatccactctcgtgctggacgtgagttccataagccattggtaaaggaaggtgctgatcgcccacgtcagatccacttccgctggaactaagaatagcaaactggcctctgtttaacaaggaaagaaagggtgcatgtggcttactgtgtctgaagatactgacatgcagaagaaataagtgcattcttctgcttttcaccccagctatcaatacatgcatctttatcagcagccaaaacactacaagcctcttgtttttcaccaaaaccctacatctcaggcttactaatttttgtgatattttcatgttcaaataaaatgtttttttgtattttctccaagttatttttatatgtaaagttaaaattagatatgagaatgttttgcgtaggggcaacacagtctgctgctatatagtgggggaagcgtgcacttatttctaaacatgggtttttaacttcaagatctgccccagtaatttaccaaaggtagcaaaataatagtgaagatggaatatgtctgctacaaatgcttatttttattgttgctattttcagtgtatacataaactaaaaattagggttgatttttttgctctccattttgacttgcaagaaataatacctcaagataatctgatttattagctatttttaaacatttttaatcacaagctgtattagctttgctgctatataggtgttatgtgtaaatgccacctattaatacgggactgaaaacgttagagacacactgcattgcagataaaatgcaggcagcacaatatggcctaaactgccatagttttagaatgtgaaaaaaatgcatgtttacttacctgtatacaccatatgcatgcactagaattattaactaacgaggtgaggtattgcaaatgttcaaaaaagctctcttgaatctaggtagcatgaacaaattataaaatttgtttaaaaaagcaaacttgcatgcattattgtgacttcaagtttaaaaaatcgtcttacatgtgtacaatatgcaaattagttttagattagagagtgcagccattttgtgatctggtcagtagtggaattcgattttatgcagactggatgtaatatttgtaatccctgtgcaattttgtgacgtgcggttctaattcatgtgcagtgatatagtatagataaaagaatgagtaaaagaaaatacaagaattctaaagaaagttggttttagcccctttgatagtccatggttaagacatcctttataaaccaaagatggccagcacactgctaaccagtcaccaaatgtaagacccataagaaacccatatttaaaaatctgaattttttagaagaatgcaaaactttagtaaaccctaagtaaagtcaaaatggagaaggggaaatatacagatggctagttgcataaaattaaattttacctttataagacaatggtgaaatctggcttgaacttgcttatgtgtttaacctataaatattggggtcttctgtctaaactggggtcactgttgcatggaacattgttcttaatagttgagaattgcttttttgaaaattttcatgaaggaattttggtaatgactttgcttgcaggttttttggggtgttttgagaaagtggcatggaaacatgcagtagttaatgagtttctcttggtactgaacactattagaatatcattagtgatattttttctctttagagcatttttaatgcaactagcccctatattttaatgtaagagttactctgcaatctaagcaaagcacccaacaatggtaaatgttttttaaaaatgcagaactaagatttttgactctaaagagagaaaattacaagggtgttgccttatagcaaacccttgggacaatccttcatgtgagcaaagtgttgatcttaatattggttgtctgtggtgtgcttttttgtactgtaaaaatatgtggttcatgtctaactctgctgttttattgtggttgtggttcaagtttttaatgtttaaagttgatgctgttttcagaagagctttttactaatttatttgtcagtgttccctatttgttacttaaccatgatcctccagattttttggagtattcttttctaaccttaaccctgccaaaccttgatccattttgacatttgttatgcactatttttatatctctgtgagagatttttccaacagtcagctattttatggcacactttttttgactgatgacatctcctttgctatacctcaatttttggaatttagagaagaaatcagtagttttgcaatgttaattatttagatatttaatttcgcagatttttaaactttattttcataatttctgcttaatgtttaaaattgaagagccttttcatgtattaaataatgaacacaaattatataattaaaataattggagatgttgaaaatcattttcccttcttaaacagaaataaatatttggaatgaaggggaatgtactagaacaccctttttgccacgggtaaaaataacagaaatgtatggtttgttttaccttcatttctgtacaagtaaagcttattagtctaatgttttgttcctttcccacctcacccctacctcttttgttttgttttgtttttgccctttatgtactacattcttattttctaacttttaaacactgtattggaggtttttttttaatttacagatcatatttattttactatttttgtagaaaattattaattttgattgtatttttgtattttaaaagcttcttcacttgtgttccctaaatattcatattgctgcccaaaagtatgactgtggaggaaaaaaaaatactttaaaaatccacactttttgttaagaaggaaacatttagcatttatatatttgtgtatggaaaacacttgatattttatccctgttgcatctggctgcacagagcctctcctcaaagatgctacaaaacttgaatataacacattttggaaggctgactaacctcgattctgtgttgtgatgtgcaatactgtttctaatgtttgtataaaaaaaaacagtgtaaacctttttaatgcaaatttatttttttcattgcatattttgcagattttatccacagtgtcattttttactgtcagaaaagataccccttttgtcattgcaactattttttaaatccagaaatctttgtactgatgtaaatgattgtagttattttggatagtgttttgctaacaaaaggagagacttttttcatgcatatttctattttgtttttttgggttttattttattttaatagtagtaaaatacttggaataatttttcatattcttgtcattaatattattttgtatttttatgtggaaatatataattttatgacactaattgctaaagtttattttatgttgaattatttttggagctgaaatctttgtaatattaaagcaactagtttctaattcccagtttctgtatagaatcgcacaagtggtttatggagtgtttggattgtaattataaatggttctttgatatgcaaattaatattttcagttgattttattttatattcctaatggggtgttaaagccgttttttatttttttctaaataaaaagagaacccatgcttttatggacactaggtaaacaccttcagcttaaatttttcgttaaatattttagtttattttattgttatcttccaggtgtctaaatctccagtctgtctgttgtactggtaatttaactctgtaatggaatagtttgctgccaactatttatattaagtaatttttaaatatttgtaatattgttgactgactaataaactattaagttattggcata

SEQ ID NO: 7551 - DNA, 5524 bp, Homo sapiens
  source 1..5524: mol_type = unassigned DNA
ctcgtctgccaccaccccgggcggcggcagcggcggctcgctcagcgccatgccgccgcccagccccgactcagagaacggcttctaccccgggctgccgtcgtccatgaacccggccttcttccctagcttctcgcccgtgtcgccgcacggctgcactgggctcagcgttccgacgagcggcggcggcggcggcggcttcggcggccccttctcggctaccgctgtgccccctccgccgccgcccgccatgaatatacctcaacagcagcccccgccgcccgcggcgccgcagcagccgcagagccggaggtcgcccgtcagcccgcagctccagcagcagcaccaggcggcggccgccgccttcctgcagcagaggaactcctataaccaccaccagcctcttctgaaacagtctccctggagcaaccatcagagcagtggctggggcactggaagtatgtcctggggagcaatgcatggcagagatcatcgtagaaccggaaacatgggaatcccaggaactatgaatcagatatctccattgaagaaaccgttttctggtaatgtcatagcaccaccgaaatttactcgctcaactccatcactgactccaaaatcttggattgaagataatgtgttcagaacagacaacaatagtaatacactcttacccttacaggatcgaagtagaatgtatgacagtttgaatatgcactctttggaaaattcccttatcgatattatgagagcagagcatgatcctcttaagggtcgattgagctatccacatccaggaactgacaatctgttgatgttaaatgcaaggagttatgggcgaagacgaggtcgttcttccctctttccaatagatgatggcttgcttgatgatggtcacagtgatcaagttggagttttaaattcacccacctgttattcagctcaccaaaatggagagcgaatagaacgcttctctcgaaaagtttttgttggtggtcttcctccagatattgatgaagatgaaataactgctagcttcagaagatttgggcctttggtagtagattggcctcataaagcagaaagcaagtcctattttccaccaaaaggctatgcatttcttctctttcaagaagagagctcagttcaggcactcattgatgcttgtattgaagaagatggaaaactctatctgtgtgtttctagccctactatcaaggacaaaccagttcaaatacgtccttggaatttaagtgatagtgattttgtaatggatggttctcagcctttggatccccgaaaaacaatttttgttggaggtgttcctaggccattaagggctgtggaacttgctatgatcatggaccggctgtatggtggagtttgttatgcaggaattgatacagatcctgagctaaaatacccaaaaggtgctgggcgagttgctttctccaatcagcagagctatattgctgccattagtgctcggtttgttcagcttcagcatggtgatattgataaacgtgtggaggtaaagccatatgtgctagatgaccagatgtgtgatgaatgccagggcgcacgctgtggtggaaaatttgctccctttttttgtgccaatgtcacttgcctgcagtattactgtgagttttgttgggcaaatatccactctcgtgctggacgtgagttccataagccattggtaaaggaaggtgctgatcgcccacgtcagatccacttccgctggaactaagaatagcaaactggcctctgtttaacaaggaaagaaagggtgcatgtggcttactgtgtctgaagatactgacatgcagaagaaataagtgcattcttctgcttttcaccccagctatcaatacatgcatctttatcagcagccaaaacactacaagcctcttgtttttcaccaaaaccctacatctcaggcttactaatttttgtgatattttcatgttcaaataaaatgtttttttgtattttctccaagttatttttatatgtaaagttaaaattagatatgagaatgttttgcgtaggggcaacacagtctgctgctatatagtgggggaagcgtgcacttatttctaaacatgggtttttaacttcaagatctgccccagtaatttaccaaaggtagcaaaataatagtgaagatggaatatgtctgctacaaatgcttatttttattgttgctattttcagtgtatacataaactaaaaattagggttgatttttttgctctccattttgacttgcaagaaataatacctcaagataatctgatttattagctatttttaaacatttttaatcacaagctgtattagctttgctgctatataggtgttatgtgtaaatgccacctattaatacgggactgaaaacgttagagacacactgcattgcagataaaatgcaggcagcacaatatggcctaaactgccatagttttagaatgtgaaaaaaatgcatgtttacttacctgtatacaccatatgcatgcactagaattattaactaacgaggtgaggtattgcaaatgttcaaaaaagctctcttgaatctaggtagcatgaacaaattataaaatttgtttaaaaaagcaaacttgcatgcattattgtgacttcaagtttaaaaaatcgtcttacatgtgtacaatatgcaaattagttttagattagagagtgcagccattttgtgatctggtcagtagtggaattcgattttatgcagactggatgtaatatttgtaatccctgtgcaattttgtgacgtgcggttctaattcatgtgcagtgatatagtatagataaaagaatgagtaaaagaaaatacaagaattctaaagaaagttggttttagcccctttgatagtccatggttaagacatcctttataaaccaaagatggccagcacactgctaaccagtcaccaaatgtaagacccataagaaacccatatttaaaaatctgaattttttagaagaatgcaaaactttagtaaaccctaagtaaagtcaaaatggagaaggggaaatatacagatggctagttgcataaaattaaattttacctttataagacaatggtgaaatctggcttgaacttgcttatgtgtttaacctataaatattggggtcttctgtctaaactggggtcactgttgcatggaacattgttcttaatagttgagaattgcttttttgaaaattttcatgaaggaattttggtaatgactttgcttgcaggttttttggggtgttttgagaaagtggcatggaaacatgcagtagttaatgagtttctcttggtactgaacactattagaatatcattagtgatattttttctctttagagcatttttaatgcaactagcccctatattttaatgtaagagttactctgcaatctaagcaaagcacccaacaatggtaaatgttttttaaaaatgcagaactaagatttttgactctaaagagagaaaattacaagggtgttgccttatagcaaacccttgggacaatccttcatgtgagcaaagtgttgatcttaatattggttgtctgtggtgtgcttttttgtactgtaaaaatatgtggttcatgtctaactctgctgttttattgtggttgtggttcaagtttttaatgtttaaagttgatgctgttttcagaagagctttttactaatttatttgtcagtgttccctatttgttacttaaccatgatcctccagattttttggagtattcttttctaaccttaaccctgccaaaccttgatccattttgacatttgttatgcactatttttatatctctgtgagagatttttccaacagtcagctattttatggcacactttttttgactgatgacatctcctttgctatacctcaatttttggaatttagagaagaaatcagtagttttgcaatgttaattatttagatatttaatttcgcagatttttaaactttattttcataatttctgcttaatgtttaaaattgaagagccttttcatgtattaaataatgaacacaaattatataattaaaataattggagatgttgaaaatcattttcccttcttaaacagaaataaatatttggaatgaaggggaatgtactagaacaccctttttgccacgggtaaaaataacagaaatgtatggtttgttttaccttcatttctgtacaagtaaagcttattagtctaatgttttgttcctttcccacctcacccctacctcttttgttttgttttgtttttgccctttatgtactacattcttattttctaacttttaaacactgtattggaggtttttttttaatttacagatcatatttattttactatttttgtagaaaattattaattttgattgtatttttgtattttaaaagcttcttcacttgtgttccctaaatattcatattgctgcccaaaagtatgactgtggaggaaaaaaaaatactttaaaaatccacactttttgttaagaaggaaacatttagcatttatatatttgtgtatggaaaacacttgatattttatccctgttgcatctggctgcacagagcctctcctcaaagatgctacaaaacttgaatataacacattttggaaggctgactaacctcgattctgtgttgtgatgtgcaatactgtttctaatgtttgtataaaaaaaaacagtgtaaacctttttaatgcaaatttatttttttcattgcatattttgcagattttatccacagtgtcattttttactgtcagaaaagataccccttttgtcattgcaactattttttaaatccagaaatctttgtactgatgtaaatgattgtagttattttggatagtgttttgctaacaaaaggagagacttttttcatgcatatttctattttgtttttttgggttttattttattttaatagtagtaaaatacttggaataatttttcatattcttgtcattaatattattttgtatttttatgtggaaatatataattttatgacactaattgctaaagtttattttatgttgaattatttttggagctgaaatctttgtaatattaaagcaactagtttctaattcccagtttctgtatagaatcgcacaagtggtttatggagtgtttggattgtaattataaatggttctttgatatgcaaattaatattttcagttgattttattttatattcctaatggggtgttaaagccgttttttatttttttctaaataaaaagagaacccatgcttttatggacactaggtaaacaccttcagcttaaatttttcgttaaatattttagtttattttattgttatcttccaggtgtctaaatctccagtctgtctgttgtactggtaatttaactctgtaatggaatagtttgctgccaactatttatattaagtaatttttaaatatttgtaatattgttgactgactaataaactattaagttattggca

SEQ ID NO: 7552 - DNA, 5509 bp, Homo sapiens
  source 1..5509: mol_type = unassigned DNA
ctcgtctgccaccaccccgggcggcggcagcggcggctcgctcagcgccatgccgccgcccagccccgactcagagaacggcttctaccccgggctgccgtcgtccatgaacccggccttcttccctagcttctcgcccgtgtcgccgcacggctgcactgggctcagcgttccgacgagcggcggcggcggcggcggcttcggcggccccttctcggctaccgctgtgccccctccgccgccgcccgccatgaatatacctcaacagcagcccccgccgcccgcggcgccgcagcagccgcagagccggaggtcgcccgtcagcccgcagctccagcagcagcaccaggcggcggccgccgccttcctgcagcagaggaactcctataaccaccaccagcctcttctgaaacagtctccctggagcaaccatcagagcagtggctggggcactggaagtatgtcctggggagcaatgcatggcagagatcatcgtagaaccggaaacatgggaatcccaggaactatgaatcagatatctccattgaagaaaccgttttctggtaatgtcatagcaccaccgaaatttactcgctcaactccatcactgactccaaaatcttggattgaagataatgtgttcagaacagacaacaatagtaatacactcttacccttacaggtaagaatggatcgaagtagaatgtatgacagtttgaatatgcactctttggaaaattcccttatcgatattatgagagcagagcatgatcctcttaagggtcgattgagctatccacatccaggaactgacaatctgttgatgttaaatggtcgttcttccctctttccaatagatgatggcttgcttgatgatggtcacagtgatcaagttggagttttaaattcacccacctgttattcagctcaccaaaatggagagcgaatagaacgcttctctcgaaaagtttttgttggtggtcttcctccagatattgatgaagatgaaataactgctagcttcagaagatttgggcctttggtagtagattggcctcataaagcagaaagcaagtcctattttccaccaaaaggctatgcatttcttctctttcaagaagagagctcagttcaggcactcattgatgcttgtattgaagaagatggaaaactctatctgtgtgtttctagccctactatcaaggacaaaccagttcaaatacgtccttggaatttaagtgatagtgattttgtaatggatggttctcagcctttggatccccgaaaaacaatttttgttggaggtgttcctaggccattaagggctgtggaacttgctatgatcatggaccggctgtatggtggagtttgttatgcaggaattgatacagatcctgagctaaaatacccaaaaggtgctgggcgagttgctttctccaatcagcagagctatattgctgccattagtgctcggtttgttcagcttcagcatggtgatattgataaacgtgtggaggtaaagccatatgtgctagatgaccagatgtgtgatgaatgccagggcgcacgctgtggtggaaaatttgctccctttttttgtgccaatgtcacttgcctgcagtattactgtgagttttgttgggcaaatatccactctcgtgctggacgtgagttccataagccattggtaaaggaaggtgctgatcgcccacgtcagatccacttccgctggaactaagaatagcaaactggcctctgtttaacaaggaaagaaagggtgcatgtggcttactgtgtctgaagatactgacatgcagaagaaataagtgcattcttctgcttttcaccccagctatcaatacatgcatctttatcagcagccaaaacactacaagcctcttgtttttcaccaaaaccctacatctcaggcttactaatttttgtgatattttcatgttcaaataaaatgtttttttgtattttctccaagttatttttatatgtaaagttaaaattagatatgagaatgttttgcgtaggggcaacacagtctgctgctatatagtgggggaagcgtgcacttatttctaaacatgggtttttaacttcaagatctgccccagtaatttaccaaaggtagcaaaataatagtgaagatggaatatgtctgctacaaatgcttatttttattgttgctattttcagtgtatacataaactaaaaattagggttgatttttttgctctccattttgacttgcaagaaataatacctcaagataatctgatttattagctatttttaaacatttttaatcacaagctgtattagctttgctgctatataggtgttatgtgtaaatgccacctattaatacgggactgaaaacgttagagacacactgcattgcagataaaatgcaggcagcacaatatggcctaaactgccatagttttagaatgtgaaaaaaatgcatgtttacttacctgtatacaccatatgcatgcactagaattattaactaacgaggtgaggtattgcaaatgttcaaaaaagctctcttgaatctaggtagcatgaacaaattataaaatttgtttaaaaaagcaaacttgcatgcattattgtgacttcaagtttaaaaaatcgtcttacatgtgtacaatatgcaaattagttttagattagagagtgcagccattttgtgatctggtcagtagtggaattcgattttatgcagactggatgtaatatttgtaatccctgtgcaattttgtgacgtgcggttctaattcatgtgcagtgatatagtatagataaaagaatgagtaaaagaaaatacaagaattctaaagaaagttggttttagcccctttgatagtccatggttaagacatcctttataaaccaaagatggccagcacactgctaaccagtcaccaaatgtaagacccataagaaacccatatttaaaaatctgaattttttagaagaatgcaaaactttagtaaaccctaagtaaagtcaaaatggagaaggggaaatatacagatggctagttgcataaaattaaattttacctttataagacaatggtgaaatctggcttgaacttgcttatgtgtttaacctataaatattggggtcttctgtctaaactggggtcactgttgcatggaacattgttcttaatagttgagaattgcttttttgaaaattttcatgaaggaattttggtaatgactttgcttgcaggttttttggggtgttttgagaaagtggcatggaaacatgcagtagttaatgagtttctcttggtactgaacactattagaatatcattagtgatattttttctctttagagcatttttaatgcaactagcccctatattttaatgtaagagttactctgcaatctaagcaaagcacccaacaatggtaaatgttttttaaaaatgcagaactaagatttttgactctaaagagagaaaattacaagggtgttgccttatagcaaacccttgggacaatccttcatgtgagcaaagtgttgatcttaatattggttgtctgtggtgtgcttttttgtactgtaaaaatatgtggttcatgtctaactctgctgttttattgtggttgtggttcaagtttttaatgtttaaagttgatgctgttttcagaagagctttttactaatttatttgtcagtgttccctatttgttacttaaccatgatcctccagattttttggagtattcttttctaaccttaaccctgccaaaccttgatccattttgacatttgttatgcactatttttatatctctgtgagagatttttccaacagtcagctattttatggcacactttttttgactgatgacatctcctttgctatacctcaatttttggaatttagagaagaaatcagtagttttgcaatgttaattatttagatatttaatttcgcagatttttaaactttattttcataatttctgcttaatgtttaaaattgaagagccttttcatgtattaaataatgaacacaaattatataattaaaataattggagatgttgaaaatcattttcccttcttaaacagaaataaatatttggaatgaaggggaatgtactagaacaccctttttgccacgggtaaaaataacagaaatgtatggtttgttttaccttcatttctgtacaagtaaagcttattagtctaatgttttgttcctttcccacctcacccctacctcttttgttttgttttgtttttgccctttatgtactacattcttattttctaacttttaaacactgtattggaggtttttttttaatttacagatcatatttattttactatttttgtagaaaattattaattttgattgtatttttgtattttaaaagcttcttcacttgtgttccctaaatattcatattgctgcccaaaagtatgactgtggaggaaaaaaaaatactttaaaaatccacactttttgttaagaaggaaacatttagcatttatatatttgtgtatggaaaacacttgatattttatccctgttgcatctggctgcacagagcctctcctcaaagatgctacaaaacttgaatataacacattttggaaggctgactaacctcgattctgtgttgtgatgtgcaatactgtttctaatgtttgtataaaaaaaaacagtgtaaacctttttaatgcaaatttatttttttcattgcatattttgcagattttatccacagtgtcattttttactgtcagaaaagataccccttttgtcattgcaactattttttaaatccagaaatctttgtactgatgtaaatgattgtagttattttggatagtgttttgctaacaaaaggagagacttttttcatgcatatttctattttgtttttttgggttttattttattttaatagtagtaaaatacttggaataatttttcatattcttgtcattaatattattttgtatttttatgtggaaatatataattttatgacactaattgctaaagtttattttatgttgaattatttttggagctgaaatctttgtaatattaaagcaactagtttctaattcccagtttctgtatagaatcgcacaagtggtttatggagtgtttggattgtaattataaatggttctttgatatgcaaattaatattttcagttgattttattttatattcctaatggggtgttaaagccgttttttatttttttctaaataaaaagagaacccatgcttttatggacactaggtaaacaccttcagcttaaatttttcgttaaatattttagtttattttattgttatcttccaggtgtctaaatctccagtctgtctgttgtactggtaatttaactctgtaatggaatagtttgctgccaactatttatattaagtaatttttaaatatttgtaatattgttgactgactaataaactattaagttattggca

SEQ ID NO: 7553 - DNA, 6797 bp, Homo sapiens
  source 1..6797: mol_type = unassigned DNA
atgagggatttcgggtttggggtgctgcagaccgccccgctccgaagtagcagtcctgggcccctgttctgcggcgaggcgtatggtccttacgccgtggggtccgtcaacccgctgccctccgccacgcccttcggcccactgtcgccaccaccgttgcctgtcaccggcttcttagaggccgcctcccccttctccgtccccctcggcggcggcgcgggcagcccggccgccgccgcttcctcttcctccccgttcctggcgcatcagcagaccatgcaggatgagctgcttctggggctgacacagcagccggcgcggccgctttcgggggcggcggccacggagaaactccccgaccaccaccccggcggcggcacgatcgcgggtgtgacccacctcctcccctcccaggacttcaaaccgagtctgcaccacccctcctcctcctccgcctcctcctgctgctgctgccgcacctcctccccgcaggacttcagtaagcggcagcagcagcagctgagcagccagaagaggaaagagttcagccctccccaccttccccaccctccggactcgaagccgccgccgccgcctccgccgctccactgccccggtcggttcagcccgccgccgccgccagccggcccgctcctccagccggcgcagctcgctcagcgccagcagcaacagccgccgcagcagttcagcctcctgcatcagcagcacctctcgccgcaggacttcgccccgcggcagcgtccggcagacctgcccccgctcccgcagctccctccctcgccgcctgcagccccgcggcgccgccacggaggcgcgggcagccctcgcaagaccccagccgcgggcgagggcagcgccgccgagtcccccaatgcgggcttggcctcctcgacgccggtgaaccccgcgccgggctccatggagtcccccaaccaccctctgctcaacagtcccagtaacctcctgcccggaggtgcgcttggcgcgggcgccttcagcagcctgcagagcccggaccttccacacccgggcggcggcggcggcggcgggggcggggggcccccaggaggcggagggggaggcggctccgcgtcgccgccgccgctgcccggcttcggcaccccctggtcggtgcagaccgcgtcgccgccaccccagccccagcagccgccgccgacccagccgcagcagcagccgccgccaccccagcagccgccccagccgcagccgcagccgcccggctcgtctgccaccaccccgggcggcggcagcggcggctcgctcagcgccatgccgccgcccagccccgactcagagaacggcttctaccccgggctgccgtcgtccatgaacccggccttcttccctagcttctcgcccgtgtcgccgcacggctgcactgggctcagcgttccgacgagcggcggcggcggcggcggcttcggcggccccttctcggctaccgctgtgccccctccgccgccgcccgccatgaatatacctcaacagcagcccccgccgcccgcggcgccgcagcagccgcagagccggaggtcgcccgtcagcccgcagctccagcagcagcaccaggcggcggccgccgccttcctgcagcagaggaactcctataaccaccaccagcctcttctgaaacagtctccctggagcaaccatcagagcagtggctggggcactggaagtatgtcctggggagcaatgcatggcagagatcatcgtagaaccggaaacatgggaatcccaggaactatgaatcagatatctccattgaagaaaccgttttctggtaatgtcatagcaccaccgaaatttactcgctcaactccatcactgactccaaaatcttggattgaagataatgtgttcagaacagacaacaatagtaatacactcttacccttacaggtaagaatggatcgaagtagaatgtatgacagtttgaatatgcactctttggaaaattcccttatcgatattatgagagcagagcatgatcctcttaagggtcgattgagctatccacatccaggaactgacaatctgttgatgttaaatgcaaggagttatgggcgaagacgaggtcgttcttccctctttccaatagatgatggcttgcttgatgatggtcacagtgatcaagttggagttttaaattcacccacctgttattcagctcaccaaaatggagagcgaatagaacgcttctctcgaaaagtttttgttggtggtcttcctccagatattgatgaagatgaaataactgctagcttcagaagatttgggcctttggtagtagattggcctcataaagcagaaagcaagtcctattttccaccaaaaggctatgcatttcttctctttcaagaagagagctcagttcaggcactcattgatgcttgtattgaagaagatggaaaactctatctgtgtgtttctagccctactatcaaggacaaaccagttcaaatacgtccttggaatttaagtgatagtgattttgtaatggatggttctcagcctttggatccccgaaaaacaatttttgttggaggtgttcctaggccattaagggctgtggaacttgctatgatcatggaccggctgtatggtggagtttgttatgcaggaattgatacagatcctgagctaaaatacccaaaaggtgctgggcgagttgctttctccaatcagcagagctatattgctgccattagtgctcggtttgttcagcttcagcatggtgatattgataaacgtgtggaggtaaagccatatgtgctagatgaccagatgtgtgatgaatgccagggcgcacgctgtggtggaaaatttgctccctttttttgtgccaatgtcacttgcctgcagtattactgtgagttttgttgggcaaatatccactctcgtgctggacgtgagttccataagccattggtaaaggaaggtgctgatcgcccacgtcagatccacttccgctggaactaagaatagcaaactggcctctgtttaacaaggaaagaaagggtgcatgtggcttactgtgtctgaagatactgacatgcagaagaaataagtgcattcttctgcttttcaccccagctatcaatacatgcatctttatcagcagccaaaacactacaagcctcttgtttttcaccaaaaccctacatctcaggcttactaatttttgtgatattttcatgttcaaataaaatgtttttttgtattttctccaagttatttttatatgtaaagttaaaattagatatgagaatgttttgcgtaggggcaacacagtctgctgctatatagtgggggaagcgtgcacttatttctaaacatgggtttttaacttcaagatctgccccagtaatttaccaaaggtagcaaaataatagtgaagatggaatatgtctgctacaaatgcttatttttattgttgctattttcagtgtatacataaactaaaaattagggttgatttttttgctctccattttgacttgcaagaaataatacctcaagataatctgatttattagctatttttaaacatttttaatcacaagctgtattagctttgctgctatataggtgttatgtgtaaatgccacctattaatacgggactgaaaacgttagagacacactgcattgcagataaaatgcaggcagcacaatatggcctaaactgccatagttttagaatgtgaaaaaaatgcatgtttacttacctgtatacaccatatgcatgcactagaattattaactaacgaggtgaggtattgcaaatgttcaaaaaagctctcttgaatctaggtagcatgaacaaattataaaatttgtttaaaaaagcaaacttgcatgcattattgtgacttcaagtttaaaaaatcgtcttacatgtgtacaatatgcaaattagttttagattagagagtgcagccattttgtgatctggtcagtagtggaattcgattttatgcagactggatgtaatatttgtaatccctgtgcaattttgtgacgtgcggttctaattcatgtgcagtgatatagtatagataaaagaatgagtaaaagaaaatacaagaattctaaagaaagttggttttagcccctttgatagtccatggttaagacatcctttataaaccaaagatggccagcacactgctaaccagtcaccaaatgtaagacccataagaaacccatatttaaaaatctgaattttttagaagaatgcaaaactttagtaaaccctaagtaaagtcaaaatggagaaggggaaatatacagatggctagttgcataaaattaaattttacctttataagacaatggtgaaatctggcttgaacttgcttatgtgtttaacctataaatattggggtcttctgtctaaactggggtcactgttgcatggaacattgttcttaatagttgagaattgcttttttgaaaattttcatgaaggaattttggtaatgactttgcttgcaggttttttggggtgttttgagaaagtggcatggaaacatgcagtagttaatgagtttctcttggtactgaacactattagaatatcattagtgatattttttctctttagagcatttttaatgcaactagcccctatattttaatgtaagagttactctgcaatctaagcaaagcacccaacaatggtaaatgttttttaaaaatgcagaactaagatttttgactctaaagagagaaaattacaagggtgttgccttatagcaaacccttgggacaatccttcatgtgagcaaagtgttgatcttaatattggttgtctgtggtgtgcttttttgtactgtaaaaatatgtggttcatgtctaactctgctgttttattgtggttgtggttcaagtttttaatgtttaaagttgatgctgttttcagaagagctttttactaatttatttgtcagtgttccctatttgttacttaaccatgatcctccagattttttggagtattcttttctaaccttaaccctgccaaaccttgatccattttgacatttgttatgcactatttttatatctctgtgagagatttttccaacagtcagctattttatggcacactttttttgactgatgacatctcctttgctatacctcaatttttggaatttagagaagaaatcagtagttttgcaatgttaattatttagatatttaatttcgcagatttttaaactttattttcataatttctgcttaatgtttaaaattgaagagccttttcatgtattaaataatgaacacaaattatataattaaaataattggagatgttgaaaatcattttcccttcttaaacagaaataaatatttggaatgaaggggaatgtactagaacaccctttttgccacgggtaaaaataacagaaatgtatggtttgttttaccttcatttctgtacaagtaaagcttattagtctaatgttttgttcctttcccacctcacccctacctcttttgttttgttttgtttttgccctttatgtactacattcttattttctaacttttaaacactgtattggaggtttttttttaatttacagatcatatttattttactatttttgtagaaaattattaattttgattgtatttttgtattttaaaagcttcttcacttgtgttccctaaatattcatattgctgcccaaaagtatgactgtggaggaaaaaaaaatactttaaaaatccacactttttgttaagaaggaaacatttagcatttatatatttgtgtatggaaaacacttgatattttatccctgttgcatctggctgcacagagcctctcctcaaagatgctacaaaacttgaatataacacattttggaaggctgactaacctcgattctgtgttgtgatgtgcaatactgtttctaatgtttgtataaaaaaaaacagtgtaaacctttttaatgcaaatttatttttttcattgcatattttgcagattttatccacagtgtcattttttactgtcagaaaagataccccttttgtcattgcaactattttttaaatccagaaatctttgtactgatgtaaatgattgtagttattttggatagtgttttgctaacaaaaggagagacttttttcatgcatatttctattttgtttttttgggttttattttattttaatagtagtaaaatacttggaataatttttcatattcttgtcattaatattattttgtatttttatgtggaaatatataattttatgacactaattgctaaagtttattttatgttgaattatttttggagctgaaatctttgtaatattaaagcaactagtttctaattcccagtttctgtatagaatcgcacaagtggtttatggagtgtttggattgtaattataaatggttctttgatatgcaaattaatattttcagttgattttattttatattcctaatggggtgttaaagccgttttttatttttttctaaataaaaagagaacccatgcttttatggacactaggtaaacaccttcagcttaaatttttcgttaaatattttagtttattttattgttatcttccaggtgtctaaatctccagtctgtctgttgtactggtaatttaactctgtaatggaatagtttgctgccaactatttatattaagtaatttttaaatatttgtaatattgttgactgactaataaactattaagttattggcata

SEQ ID NO: 7554 - DNA, 2103 bp, Homo sapiens
  source 1..2103: mol_type = unassigned DNA
ccccagcagccgccccagccgcagccgcagccgcccggctcgtctgccaccaccccgggcggcggcagcggcggctcgctcagcgccatgccgccgcccagccccgactcagagaacggcttctaccccgggctgccgtcgtccatgaacccggccttcttccctagcttctcgcccgtgtcgccgcacggctgcactgggctcagcgttccgacgagcggcggcggcggcggcggcttcggcggccccttctcggctaccgctgtgccccctccgccgccgcccgccatgaatatacctcaacagcagcccccgccgcccgcggcgccgcagcagccgcagagccggaggtcgcccgtcagcccgcagctccagcagcagcaccaggcggcggccgccgccttcctgcagcagaggaactcctataaccaccaccagcctcttctgaaacagtctccctggagcaaccatcagagcagtggctggggcactggaagtatgtcctggggagcaatgcatggcagagatcatcgtagaaccggaaacatgggaatcccaggaactatgaatcagatatctccattgaagaaaccgttttctggtaatgtcatagcaccaccgaaatttactcgctcaactccatcactgactccaaaatcttggattgaagataatgtgttcagaacagacaacaatagtaatacactcttacccttacaggtgagatctagtttgcagttgccagcttggggctcagattcactccaagatagttggtgcactgcagccggaacatccagaatagaccaggatcgaagtagaatgtatgacagtttgaatatgcactctttggaaaattcccttatcgatattatgagagcagagcatgatcctcttaagggtcgattgagctatccacatccaggaactgacaatctgttgatgttaaatggtcgttcttccctctttccaatagatgatggcttgcttgatgatggtcacagtgatcaagttggagttttaaattcacccacctgttattcagctcaccaaaatggagagcgaatagaacgcttctctcgaaaagtttttgttggtggtcttcctccagatattgatgaagatgaaataactgctagcttcagaagatttgggcctttggtagtagattggcctcataaagcagaaagcaagtcctattttccaccaaaaggctatgcatttcttctctttcaagaagagagctcagttcaggcactcattgatgcttgtattgaagaagatggaaaactctatctgtgtgtttctagccctactatcaaggacaaaccagttcaaatacgtccttggaatttaagtgatagtgattttgtaatggatggttctcagcctttggatccccgaaaaacaatttttgttggaggtgttcctaggccattaagggctgtggaacttgctatgatcatggaccggctgtatggtggagtttgttatgcaggaattgatacagatcctgagctaaaatacccaaaaggtgctgggcgagttgctttctccaatcagcagagctatattgctgccattagtgctcggtttgttcagcttcagcatggtgatattgataaacgtgtggaggtaaagccatatgtgctagatgaccagatgtgtgatgaatgccagggcgcacgctgtggtggaaaatttgctccctttttttgtgccaatgtcacttgcctgcagtattactgtgagttttgttgggcaaatatccactctcgtgctggacgtgagttccataagccattggtaaaggaaggtgctgatcgcccacgtcagatccacttccgctggaactaagaatagcaaactggcctctgtttaacaaggaaagaaagggtgcatgtggcttactgtgtctgaagatactgacatgcagaagaaataagtgcattcttctgcttttcaccccagctatcaatacatgcatctttatcagcagccaaaacactacaagcctcttgtttttcaccaaaaccctacatctcaggcttactaatttttgtgatattttcatgttcaaataaaatgtttttttgtattttc

SEQ ID NO: 7555 - DNA, 6878 bp, Homo sapiens
  source 1..6878: mol_type = unassigned DNA
atgagggatttcgggtttggggtgctgcagaccgccccgctccgaagtagcagtcctgggcccctgttctgcggcgaggcgtatggtccttacgccgtggggtccgtcaacccgctgccctccgccacgcccttcggcccactgtcgccaccaccgttgcctgtcaccggcttcttagaggccgcctcccccttctccgtccccctcggcggcggcgcgggcagcccggccgccgccgcttcctcttcctccccgttcctggcgcatcagcagaccatgcaggatgagctgcttctggggctgacacagcagccggcgcggccgctttcgggggcggcggccacggagaaactccccgaccaccaccccggcggcggcacgatcgcgggtgtgacccacctcctcccctcccaggacttcaaaccgagtctgcaccacccctcctcctcctccgcctcctcctgctgctgctgccgcacctcctccccgcaggacttcagtaagcggcagcagcagcagctgagcagccagaagaggaaagagttcagccctccccaccttccccaccctccggactcgaagccgccgccgccgcctccgccgctccactgccccggtcggttcagcccgccgccgccgccagccggcccgctcctccagccggcgcagctcgctcagcgccagcagcaacagccgccgcagcagttcagcctcctgcatcagcagcacctctcgccgcaggacttcgccccgcggcagcgtccggcagacctgcccccgctcccgcagctccctccctcgccgcctgcagccccgcggcgccgccacggaggcgcgggcagccctcgcaagaccccagccgcgggcgagggcagcgccgccgagtcccccaatgcgggcttggcctcctcgacgccggtgaaccccgcgccgggctccatggagtcccccaaccaccctctgctcaacagtcccagtaacctcctgcccggaggtgcgcttggcgcgggcgccttcagcagcctgcagagcccggaccttccacacccgggcggcggcggcggcggcgggggcggggggcccccaggaggcggagggggaggcggctccgcgtcgccgccgccgctgcccggcttcggcaccccctggtcggtgcagaccgcgtcgccgccaccccagccccagcagccgccgccgacccagccgcagcagcagccgccgccaccccagcagccgccccagccgcagccgcagccgcccggctcgtctgccaccaccccgggcggcggcagcggcggctcgctcagcgccatgccgccgcccagccccgactcagagaacggcttctaccccgggctgccgtcgtccatgaacccggccttcttccctagcttctcgcccgtgtcgccgcacggctgcactgggctcagcgttccgacgagcggcggcggcggcggcggcttcggcggccccttctcggctaccgctgtgccccctccgccgccgcccgccatgaatatacctcaacagcagcccccgccgcccgcggcgccgcagcagccgcagagccggaggtcgcccgtcagcccgcagctccagcagcagcaccaggcggcggccgccgccttcctgcagcagaggaactcctataaccaccaccagcctcttctgaaacagtctccctggagcaaccatcagagcagtggctggggcactggaagtatgtcctggggagcaatgcatggcagagatcatcgtagaaccggaaacatgggaatcccaggaactatgaatcagatatctccattgaagaaaccgttttctggtaatgtcatagcaccaccgaaatttactcgctcaactccatcactgactccaaaatcttggattgaagataatgtgttcagaacagacaacaatagtaatacactcttacccttacaggtgagatctagtttgcagttgccagcttggggctcagattcactccaagatagttggtgcactgcagccggaacatccagaatagaccaggatcgaagtagaatgtatgacagtttgaatatgcactctttggaaaattcccttatcgatattatgagagcagagcatgatcctcttaagggtcgattgagctatccacatccaggaactgacaatctgttgatgttaaatgcaaggagttatgggcgaagacgaggtcgttcttccctctttccaatagatgatggcttgcttgatgatggtcacagtgatcaagttggagttttaaattcacccacctgttattcagctcaccaaaatggagagcgaatagaacgcttctctcgaaaagtttttgttggtggtcttcctccagatattgatgaagatgaaataactgctagcttcagaagatttgggcctttggtagtagattggcctcataaagcagaaagcaagtcctattttccaccaaaaggctatgcatttcttctctttcaagaagagagctcagttcaggcactcattgatgcttgtattgaagaagatggaaaactctatctgtgtgtttctagccctactatcaaggacaaaccagttcaaatacgtccttggaatttaagtgatagtgattttgtaatggatggttctcagcctttggatccccgaaaaacaatttttgttggaggtgttcctaggccattaagggctgtggaacttgctatgatcatggaccggctgtatggtggagtttgttatgcaggaattgatacagatcctgagctaaaatacccaaaaggtgctgggcgagttgctttctccaatcagcagagctatattgctgccattagtgctcggtttgttcagcttcagcatggtgatattgataaacgtgtggaggtaaagccatatgtgctagatgaccagatgtgtgatgaatgccagggcgcacgctgtggtggaaaatttgctccctttttttgtgccaatgtcacttgcctgcagtattactgtgagttttgttgggcaaatatccactctcgtgctggacgtgagttccataagccattggtaaaggaaggtgctgatcgcccacgtcagatccacttccgctggaactaagaatagcaaactggcctctgtttaacaaggaaagaaagggtgcatgtggcttactgtgtctgaagatactgacatgcagaagaaataagtgcattcttctgcttttcaccccagctatcaatacatgcatctttatcagcagccaaaacactacaagcctcttgtttttcaccaaaaccctacatctcaggcttactaatttttgtgatattttcatgttcaaataaaatgtttttttgtattttctccaagttatttttatatgtaaagttaaaattagatatgagaatgttttgcgtaggggcaacacagtctgctgctatatagtgggggaagcgtgcacttatttctaaacatgggtttttaacttcaagatctgccccagtaatttaccaaaggtagcaaaataatagtgaagatggaatatgtctgctacaaatgcttatttttattgttgctattttcagtgtatacataaactaaaaattagggttgatttttttgctctccattttgacttgcaagaaataatacctcaagataatctgatttattagctatttttaaacatttttaatcacaagctgtattagctttgctgctatataggtgttatgtgtaaatgccacctattaatacgggactgaaaacgttagagacacactgcattgcagataaaatgcaggcagcacaatatggcctaaactgccatagttttagaatgtgaaaaaaatgcatgtttacttacctgtatacaccatatgcatgcactagaattattaactaacgaggtgaggtattgcaaatgttcaaaaaagctctcttgaatctaggtagcatgaacaaattataaaatttgtttaaaaaagcaaacttgcatgcattattgtgacttcaagtttaaaaaatcgtcttacatgtgtacaatatgcaaattagttttagattagagagtgcagccattttgtgatctggtcagtagtggaattcgattttatgcagactggatgtaatatttgtaatccctgtgcaattttgtgacgtgcggttctaattcatgtgcagtgatatagtatagataaaagaatgagtaaaagaaaatacaagaattctaaagaaagttggttttagcccctttgatagtccatggttaagacatcctttataaaccaaagatggccagcacactgctaaccagtcaccaaatgtaagacccataagaaacccatatttaaaaatctgaattttttagaagaatgcaaaactttagtaaaccctaagtaaagtcaaaatggagaaggggaaatatacagatggctagttgcataaaattaaattttacctttataagacaatggtgaaatctggcttgaacttgcttatgtgtttaacctataaatattggggtcttctgtctaaactggggtcactgttgcatggaacattgttcttaatagttgagaattgcttttttgaaaattttcatgaaggaattttggtaatgactttgcttgcaggttttttggggtgttttgagaaagtggcatggaaacatgcagtagttaatgagtttctcttggtactgaacactattagaatatcattagtgatattttttctctttagagcatttttaatgcaactagcccctatattttaatgtaagagttactctgcaatctaagcaaagcacccaacaatggtaaatgttttttaaaaatgcagaactaagatttttgactctaaagagagaaaattacaagggtgttgccttatagcaaacccttgggacaatccttcatgtgagcaaagtgttgatcttaatattggttgtctgtggtgtgcttttttgtactgtaaaaatatgtggttcatgtctaactctgctgttttattgtggttgtggttcaagtttttaatgtttaaagttgatgctgttttcagaagagctttttactaatttatttgtcagtgttccctatttgttacttaaccatgatcctccagattttttggagtattcttttctaaccttaaccctgccaaaccttgatccattttgacatttgttatgcactatttttatatctctgtgagagatttttccaacagtcagctattttatggcacactttttttgactgatgacatctcctttgctatacctcaatttttggaatttagagaagaaatcagtagttttgcaatgttaattatttagatatttaatttcgcagatttttaaactttattttcataatttctgcttaatgtttaaaattgaagagccttttcatgtattaaataatgaacacaaattatataattaaaataattggagatgttgaaaatcattttcccttcttaaacagaaataaatatttggaatgaaggggaatgtactagaacaccctttttgccacgggtaaaaataacagaaatgtatggtttgttttaccttcatttctgtacaagtaaagcttattagtctaatgttttgttcctttcccacctcacccctacctcttttgttttgttttgtttttgccctttatgtactacattcttattttctaacttttaaacactgtattggaggtttttttttaatttacagatcatatttattttactatttttgtagaaaattattaattttgattgtatttttgtattttaaaagcttcttcacttgtgttccctaaatattcatattgctgcccaaaagtatgactgtggaggaaaaaaaaatactttaaaaatccacactttttgttaagaaggaaacatttagcatttatatatttgtgtatggaaaacacttgatattttatccctgttgcatctggctgcacagagcctctcctcaaagatgctacaaaacttgaatataacacattttggaaggctgactaacctcgattctgtgttgtgatgtgcaatactgtttctaatgtttgtataaaaaaaaacagtgtaaacctttttaatgcaaatttatttttttcattgcatattttgcagattttatccacagtgtcattttttactgtcagaaaagataccccttttgtcattgcaactattttttaaatccagaaatctttgtactgatgtaaatgattgtagttattttggatagtgttttgctaacaaaaggagagacttttttcatgcatatttctattttgtttttttgggttttattttattttaatagtagtaaaatacttggaataatttttcatattcttgtcattaatattattttgtatttttatgtggaaatatataattttatgacactaattgctaaagtttattttatgttgaattatttttggagctgaaatctttgtaatattaaagcaactagtttctaattcccagtttctgtatagaatcgcacaagtggtttatggagtgtttggattgtaattataaatggttctttgatatgcaaattaatattttcagttgattttattttatattcctaatggggtgttaaagccgttttttatttttttctaaataaaaagagaacccatgcttttatggacactaggtaaacaccttcagcttaaatttttcgttaaatattttagtttattttattgttatcttccaggtgtctaaatctccagtctgtctgttgtactggtaatttaactctgtaatggaatagtttgctgccaactatttatattaagtaatttttaaatatttgtaatattgttgactgactaataaactattaagttattggcata

SEQ ID NO: 7556 - DNA, 6854 bp, Homo sapiens
  source 1..6854: mol_type = unassigned DNA
atgagggatttcgggtttggggtgctgcagaccgccccgctccgaagtagcagtcctgggcccctgttctgcggcgaggcgtatggtccttacgccgtggggtccgtcaacccgctgccctccgccacgcccttcggcccactgtcgccaccaccgttgcctgtcaccggcttcttagaggccgcctcccccttctccgtccccctcggcggcggcgcgggcagcccggccgccgccgcttcctcttcctccccgttcctggcgcatcagcagaccatgcaggatgagctgcttctggggctgacacagcagccggcgcggccgctttcgggggcggcggccacggagaaactccccgaccaccaccccggcggcggcacgatcgcgggtgtgacccacctcctcccctcccaggacttcaaaccgagtctgcaccacccctcctcctcctccgcctcctcctgctgctgctgccgcacctcctccccgcaggacttcagtaagcggcagcagcagcagctgagcagccagaagaggaaagagttcagccctccccaccttccccaccctccggactcgaagccgccgccgccgcctccgccgctccactgccccggtcggttcagcccgccgccgccgccagccggcccgctcctccagccggcgcagctcgctcagcgccagcagcaacagccgccgcagcagttcagcctcctgcatcagcagcacctctcgccgcaggacttcgccccgcggcagcgtccggcagacctgcccccgctcccgcagctccctccctcgccgcctgcagccccgcggcgccgccacggaggcgcgggcagccctcgcaagaccccagccgcgggcgagggcagcgccgccgagtcccccaatgcgggcttggcctcctcgacgccggtgaaccccgcgccgggctccatggagtcccccaaccaccctctgctcaacagtcccagtaacctcctgcccggaggtgcgcttggcgcgggcgccttcagcagcctgcagagcccggaccttccacacccgggcggcggcggcggcggcgggggcggggggcccccaggaggcggagggggaggcggctccgcgtcgccgccgccgctgcccggcttcggcaccccctggtcggtgcagaccgcgtcgccgccaccccagccccagcagccgccgccgacccagccgcagcagcagccgccgccaccccagcagccgccccagccgcagccgcagccgcccggctcgtctgccaccaccccgggcggcggcagcggcggctcgctcagcgccatgccgccgcccagccccgactcagagaacggcttctaccccgggctgccgtcgtccatgaacccggccttcttccctagcttctcgcccgtgtcgccgcacggctgcactgggctcagcgttccgacgagcggcggcggcggcggcggcttcggcggccccttctcggctaccgctgtgccccctccgccgccgcccgccatgaatatacctcaacagcagcccccgccgcccgcggcgccgcagcagccgcagagccggaggtcgcccgtcagcccgcagctccagcagcagcaccaggcggcggccgccgccttcctgcagcagaggaactcctataaccaccaccagcctcttctgaaacagtctccctggagcaaccatcagagcagtggctggggcactggaagtatgtcctggggagcaatgcatggcagagatcatcgtagaaccggaaacatgggaatcccaggaactatgaatcagatatctccattgaagaaaccgttttctggtaatgtcatagcaccaccgaaatttactcgctcaactccatcactgactccaaaatcttggattgaagataatgtgttcagaacagacaacaatagtaatacactcttacccttacaggtgagatctagtttgcagttgccagcttggggctcagattcactccaagatagttggtgcactgcagccggaacatccagaatagaccaggatcgaagtagaatgtatgacagtttgaatatgcactctttggaaaattcccttatcgatattatgagagcagagcatgatcctcttaagggtcgattgagctatccacatccaggaactgacaatctgttgatgttaaatggtcgttcttccctctttccaatagatgatggcttgcttgatgatggtcacagtgatcaagttggagttttaaattcacccacctgttattcagctcaccaaaatggagagcgaatagaacgcttctctcgaaaagtttttgttggtggtcttcctccagatattgatgaagatgaaataactgctagcttcagaagatttgggcctttggtagtagattggcctcataaagcagaaagcaagtcctattttccaccaaaaggctatgcatttcttctctttcaagaagagagctcagttcaggcactcattgatgcttgtattgaagaagatggaaaactctatctgtgtgtttctagccctactatcaaggacaaaccagttcaaatacgtccttggaatttaagtgatagtgattttgtaatggatggttctcagcctttggatccccgaaaaacaatttttgttggaggtgttcctaggccattaagggctgtggaacttgctatgatcatggaccggctgtatggtggagtttgttatgcaggaattgatacagatcctgagctaaaatacccaaaaggtgctgggcgagttgctttctccaatcagcagagctatattgctgccattagtgctcggtttgttcagcttcagcatggtgatattgataaacgtgtggaggtaaagccatatgtgctagatgaccagatgtgtgatgaatgccagggcgcacgctgtggtggaaaatttgctccctttttttgtgccaatgtcacttgcctgcagtattactgtgagttttgttgggcaaatatccactctcgtgctggacgtgagttccataagccattggtaaaggaaggtgctgatcgcccacgtcagatccacttccgctggaactaagaatagcaaactggcctctgtttaacaaggaaagaaagggtgcatgtggcttactgtgtctgaagatactgacatgcagaagaaataagtgcattcttctgcttttcaccccagctatcaatacatgcatctttatcagcagccaaaacactacaagcctcttgtttttcaccaaaaccctacatctcaggcttactaatttttgtgatattttcatgttcaaataaaatgtttttttgtattttctccaagttatttttatatgtaaagttaaaattagatatgagaatgttttgcgtaggggcaacacagtctgctgctatatagtgggggaagcgtgcacttatttctaaacatgggtttttaacttcaagatctgccccagtaatttaccaaaggtagcaaaataatagtgaagatggaatatgtctgctacaaatgcttatttttattgttgctattttcagtgtatacataaactaaaaattagggttgatttttttgctctccattttgacttgcaagaaataatacctcaagataatctgatttattagctatttttaaacatttttaatcacaagctgtattagctttgctgctatataggtgttatgtgtaaatgccacctattaatacgggactgaaaacgttagagacacactgcattgcagataaaatgcaggcagcacaatatggcctaaactgccatagttttagaatgtgaaaaaaatgcatgtttacttacctgtatacaccatatgcatgcactagaattattaactaacgaggtgaggtattgcaaatgttcaaaaaagctctcttgaatctaggtagcatgaacaaattataaaatttgtttaaaaaagcaaacttgcatgcattattgtgacttcaagtttaaaaaatcgtcttacatgtgtacaatatgcaaattagttttagattagagagtgcagccattttgtgatctggtcagtagtggaattcgattttatgcagactggatgtaatatttgtaatccctgtgcaattttgtgacgtgcggttctaattcatgtgcagtgatatagtatagataaaagaatgagtaaaagaaaatacaagaattctaaagaaagttggttttagcccctttgatagtccatggttaagacatcctttataaaccaaagatggccagcacactgctaaccagtcaccaaatgtaagacccataagaaacccatatttaaaaatctgaattttttagaagaatgcaaaactttagtaaaccctaagtaaagtcaaaatggagaaggggaaatatacagatggctagttgcataaaattaaattttacctttataagacaatggtgaaatctggcttgaacttgcttatgtgtttaacctataaatattggggtcttctgtctaaactggggtcactgttgcatggaacattgttcttaatagttgagaattgcttttttgaaaattttcatgaaggaattttggtaatgactttgcttgcaggttttttggggtgttttgagaaagtggcatggaaacatgcagtagttaatgagtttctcttggtactgaacactattagaatatcattagtgatattttttctctttagagcatttttaatgcaactagcccctatattttaatgtaagagttactctgcaatctaagcaaagcacccaacaatggtaaatgttttttaaaaatgcagaactaagatttttgactctaaagagagaaaattacaagggtgttgccttatagcaaacccttgggacaatccttcatgtgagcaaagtgttgatcttaatattggttgtctgtggtgtgcttttttgtactgtaaaaatatgtggttcatgtctaactctgctgttttattgtggttgtggttcaagtttttaatgtttaaagttgatgctgttttcagaagagctttttactaatttatttgtcagtgttccctatttgttacttaaccatgatcctccagattttttggagtattcttttctaaccttaaccctgccaaaccttgatccattttgacatttgttatgcactatttttatatctctgtgagagatttttccaacagtcagctattttatggcacactttttttgactgatgacatctcctttgctatacctcaatttttggaatttagagaagaaatcagtagttttgcaatgttaattatttagatatttaatttcgcagatttttaaactttattttcataatttctgcttaatgtttaaaattgaagagccttttcatgtattaaataatgaacacaaattatataattaaaataattggagatgttgaaaatcattttcccttcttaaacagaaataaatatttggaatgaaggggaatgtactagaacaccctttttgccacgggtaaaaataacagaaatgtatggtttgttttaccttcatttctgtacaagtaaagcttattagtctaatgttttgttcctttcccacctcacccctacctcttttgttttgttttgtttttgccctttatgtactacattcttattttctaacttttaaacactgtattggaggtttttttttaatttacagatcatatttattttactatttttgtagaaaattattaattttgattgtatttttgtattttaaaagcttcttcacttgtgttccctaaatattcatattgctgcccaaaagtatgactgtggaggaaaaaaaaatactttaaaaatccacactttttgttaagaaggaaacatttagcatttatatatttgtgtatggaaaacacttgatattttatccctgttgcatctggctgcacagagcctctcctcaaagatgctacaaaacttgaatataacacattttggaaggctgactaacctcgattctgtgttgtgatgtgcaatactgtttctaatgtttgtataaaaaaaaacagtgtaaacctttttaatgcaaatttatttttttcattgcatattttgcagattttatccacagtgtcattttttactgtcagaaaagataccccttttgtcattgcaactattttttaaatccagaaatctttgtactgatgtaaatgattgtagttattttggatagtgttttgctaacaaaaggagagacttttttcatgcatatttctattttgtttttttgggttttattttattttaatagtagtaaaatacttggaataatttttcatattcttgtcattaatattattttgtatttttatgtggaaatatataattttatgacactaattgctaaagtttattttatgttgaattatttttggagctgaaatctttgtaatattaaagcaactagtttctaattcccagtttctgtatagaatcgcacaagtggtttatggagtgtttggattgtaattataaatggttctttgatatgcaaattaatattttcagttgattttattttatattcctaatggggtgttaaagccgttttttatttttttctaaataaaaagagaacccatgcttttatggacactaggtaaacaccttcagcttaaatttttcgttaaatattttagtttattttattgttatcttccaggtgtctaaatctccagtctgtctgttgtactggtaatttaactctgtaatggaatagtttgctgccaactatttatattaagtaatttttaaatatttgtaatattgttgactgactaataaactattaagttattggcata

SEQ ID NO: 7557 - DNA, 4851 bp, Homo sapiens
  source 1..4851: mol_type = unassigned DNA
gtctccactagaggctgcacagcccgcccggaccaacgcctccgcgcctgccgccgtctggccggcgccctcccgtttccttcctccagggggaaaaaatgtctttcgggccgctttccaggaagcagcaggatgcgccgctccactgtcggtagcaacaagctgcgcaaaccatgcaggatgatttactgatggacaaaagcaaaacccagccccagccccagcagcagcagcggcagcagcagcagccccaacctgagtccagcgtatccgaagccccgtccacgcccctctcctcagagacccccaagccggaggaaaacagcgcagtgccggccctcagcccagccgctgcccccccggcccccaacggcccggacaagatgcagatggaatcaccgctcctgccaggcttgagtttccatcagcctcctcagcagccgccgccgcctcaggagcccgcggcaccgggcgcgtcgctgtcgccgtccttcggcagcacctggtccacgggcaccaccaacgcggtagaggacagcttcttccaggggatcaccccagtcaacgggaccatgctcttccagaacttcccgcaccatgtcaacccagtcttcggaggcactttctccccgcagatcggcctggcgcagacccagcaccaccagcagccgccgccgcctgcgcccgcgccgcagccggcacagccagcgcagccaccacaggcgcagcccccgcagcagcgccgctcacccgccagccccagccaggcgccctacgcgcagaggagcgccgccgcggcgtacggccaccagcccatcatgaccagcaagccgtcctcgtcttcggcggttgcagccgctgctgccgcagccgccgcctcgtcggcctcgtccagctggaacacgcaccaaagcgtgaatgcagcctggagcgcaccgtccaacccctggggcggcctgcaggcgggccgggaccctcgccgggcggtcggtgtgggcgtgggtgtgggtgtcggggtgccttccccgctcaaccccatctcgccgctcaaaaagcccttctccagcaacgtgatcgcgccgcccaagttccctcgcgcggcccctctcacttccaagtcctggatggaggataacgctttccggaccgataatggtaacaatctgttgccatttcaggaccggagtaggccctatgatacttttaacttgcactcgttggagaactccttaatggatatgataaggactgatcatgaacctctgaaaggtaaacactaccctcccagtggcccaccaatgagtttcgctgatataatgtggaggaatcattttgcaggacgcatggggataaatttccatcatccaggaacagataatattatggcacttaacaatgccttcctggatgatagccatggtgatcaagccttgtcatctggcttaagttctcccactcgctgtcaaaatggggaacgagtagaacgctactctagaaaggtgtttgttggaggacttcctcctgatattgatgaagatgagatcactgccagctttcgcaggtttggacctctcgtagtagactggcctcacaaagctgaaagcaagtcttattttcctcctaaaggctatgcctttctgctgttccaagaggaaagctcagtacaagctttgatagatgcctgcctagaagaagatgggaaactctacctgtgtgtgtcaagccccaccatcaaggacaagccagtgcaaattcgaccatggaacctaagtgacagtgactttgtaatggatggttctcagcctttggaccccagaaaaactatctttgttgggggagttccacgaccccttcgagctgttgaactggcaatgatcatggaccgtttgtatggtggtgtctgctatgctggcattgatacggacccagagctgaagtaccccaaaggtgctggccgcgtggcattctccaatcagcagagttacattgcagccatcagcgctcgttttgtgcagcttcagcacaatgacattgacaaacgggttgaagtaaagccatatgtgctggatgatcagatgtgtgatgagtgccagggcacacgctgtggtgggaagtttgccccgttcttctgtgccaacgtcacctgtctgcagtattactgtgaatactgctgggcgagcatacattcccgagccgggcgggagttccacaaaccgctggtgaaggagggaggcgaccgccctcgtcacgtcccgttccgctggagctgagccacgggccgacccagccacaagtactggagtagataacaaggagggaaaagagagggcactgcctcagggcttacagtgttctggaaatctgtgcattcgttctcgatttttaaagaagaattgggtctttttattattattattattatttacagtcatattactgaactcagtgtccagtataatgcagaattgcagagtgtagaatggtactgatttgcactttgattcacacctttgtctgcttggtaccttaattttttatacctgatttgtcactcgtgacagtatgtagactgccattctcatcagcggccgtcaggctactgtctgtgattcttttgtttgttgttgtggtgttgttctgattgttttgaactggagcatgcacttattttcagaaacttagagagttgcccctaggacaagacttaccaaaggtaatactcgtgagtaggtggcagatgtagcaaaaacttcacaacaattcagcaatcattagctcgggtcacttagagtaaggataacccttcatgaaaataagcctttagttgctctctattttgacttgtaaggatacctcataagctggatcttttatttttccttcatgtttgatttttgttttgccgaggattttggttagatcttttagtattatgtaaatttatgctgcaatagcttttgctgctattaaaatggtattattaataccataatactctattcaggctaggatatcaattaaacacaaaaacccaacaacacacttttgtgattttagggatagagtcagctgccgaacggagatcagaatagacttcagaaagcttcggtggaaggtcactatttctgactgcatgtttacttaatcaggttgctgcatgcaataaattttatatccaatgtctagtataaaacgttcccacaatgcacaaattaagaatctatataagctataaaaatactcattttttaaaaaaagtttttttcattcaaagaattggtaattgaccggaggaaggcatgcctcaataaatggaatgctctgaatgggaagagcccataacagaatgacctatattacaaccgatataaaacctaggtgtaggatattcttcaagcaaatttgtggatggtagatgaagtactttgcggtgctctgttatatattgtgaaatttattttatatagtaaagtgattatgtctaactgtgatcaaacttaactgtttaaagcctctgtcagacattaatgaacttgacagttcataactgatatattataaactaacacatgagctcttagttacaatctcttagtgcttgcaccattttacatagcttcagaccttgtccagaaaaccaaagagctcatcttagcttacaaacactaagaatatatacaggatatagagataagttgtcagattgacaaactaggcacatttttaagaaagttgtgtaatggtgatgctaaagaaatgtctgtacaaaataagatggcctgggcagagttggttgtctgagtgagaaactaactacttaattccctggatttatcctgttaagcttgagtagaatgaaggcctgctagcactagcgtggtctagaatgaaggcctgctagcactagcgtggacatttttctagcattcacccttgggctgcagatagtaatatataaacacacacaatgattgcaagactatgtaaatctttttttaatcttcttcctatgttttggaattctggggacaatctgactggatatgacactgcagaatagatttaagtcgctgtgttttctgtgctgtgatgtccttgtactgtcttaagttagtgttgcttgtttttgttttgttctcccatgtttagttgcaattactggctctcaagctatagtttgttttcaaaaaggaaaaacaaaatagttttttactggattaaaaatgcttattttagaatcctcccctttttgaggctttttggtaataattgcttttttccagcccaggtgtggttttgtttgtttttttctatgtttgtgggttttttttcatctgtacaagaaattttgttatgcactactactttttgtattctagacagttttcaaaagttggcagatttttttttttgtttttaaggaaaaaggcatgctttctgactgacatgatcttttgcaatacctcaattttgaaatataggaaagaaaatgatattttctaagtaagtttattcagaaaaatatatattaatttaattctgcaagaaaatgatttaacagatgggtaactttatttttttcatgcttatttgtgttttttgaaaatgaagaagttagagctttataactataatattaaagatcatatctaacctacagaaatctacctaattatgtgaaagaagcaaaactttttgaagaagcacccctctttcatgtattaaaataacactgagatttttttaaaagctggaagattgtacagcataaagctaaagtgaaggcaaaaaacattgtcctgaagaataggttacaaaaaataaactccatttggtgctgaaagttgtgaa

SEQ ID NO: 7558 - DNA, 5876 bp, Homo sapiens
  source 1..5876: mol_type = unassigned DNA
gtctccactagaggctgcacagcccgcccggaccaacgcctccgcgcctgccgccgtctggccggcgccctcccgtttccttcctccagggggaaaaaatgtctttcgggccgctttccaggaagcagcaggatgcgccgctccactgtcggtagcaacaagcataatcaacctgaaagaagaaaataaatactgtatacttttaaattttatcgattcttaaaaactggacactcaaagctgcgcaaaccatgcaggatgatttactgatggacaaaagcaaaacccagccccagccccagcagcagcagcggcagcagcagcagccccaacctgagtccagcgtatccgaagccccgtccacgcccctctcctcagagacccccaagccggaggaaaacagcgcagtgccggccctcagcccagccgctgcccccccggcccccaacggcccggacaagatgcagatggaatcaccgctcctgccaggcttgagtttccatcagcctcctcagcagccgccgccgcctcaggagcccgcggcaccgggcgcgtcgctgtcgccgtccttcggcagcacctggtccacgggcaccaccaacgcggtagaggacagcttcttccaggggatcaccccagtcaacgggaccatgctcttccagaacttcccgcaccatgtcaacccagtcttcggaggcactttctccccgcagatcggcctggcgcagacccagcaccaccagcagccgccgccgcctgcgcccgcgccgcagccggcacagccagcgcagccaccacaggcgcagcccccgcagcagcgccgctcacccgccagccccagccaggcgccctacgcgcagaggagcgccgccgcggcgtacggccaccagcccatcatgaccagcaagccgtcctcgtcttcggcggttgcagccgctgctgccgcagccgccgcctcgtcggcctcgtccagctggaacacgcaccaaagcgtgaatgcagcctggagcgcaccgtccaacccctggggcggcctgcaggcgggccgggaccctcgccgggcggtcggtgtgggcgtgggtgtgggtgtcggggtgccttccccgctcaaccccatctcgccgctcaaaaagcccttctccagcaacgtgatcgcgccgcccaagttccctcgcgcggcccctctcacttccaagtcctggatggaggataacgctttccggaccgataatggtaacaatctgttgccatttcaggaccggagtaggccctatgatacttttaacttgcactcgttggagaactccttaatggatatgataaggactgatcatgaacctctgaaaggacgcatggggataaatttccatcatccaggaacagataatattatggcacttaacagtcgatcttctctctttccctttgaagatgccttcctggatgatagccatggtgatcaagccttgtcatctggcttaagttctcccactcgctgtcaaaatggggaacgagtagaacgctactctagaaaggtgtttgttggaggacttcctcctgatattgatgaagatgagatcactgccagctttcgcaggtttggacctctcgtagtagactggcctcacaaagctgaaagcaagtcttattttcctcctaaaggctatgcctttctgctgttccaagaggaaagctcagtacaagctttgatagatgcctgcctagaagaagatgggaaactctacctgtgtgtgtcaagccccaccatcaaggacaagccagtgcaaattcgaccatggaacctaagtgacagtgactttgtaatggatggttctcagcctttggaccccagaaaaactatctttgttgggggagttccacgaccccttcgagctgttgaactggcaatgatcatggaccgtttgtatggtggtgtctgctatgctggcattgatacggacccagagctgaagtaccccaaaggtgctggccgcgtggcattctccaatcagcagagttacattgcagccatcagcgctcgttttgtgcagcttcagcacaatgacattgacaaacgggttgaagtaaagccatatgtgctggatgatcagatgtgtgatgagtgccagggcacacgctgtggtgggaagtttgccccgttcttctgtgccaacgtcacctgtctgcagtattactgtgaatactgctgggcgagcatacattcccgagccgggcgggagttccacaaaccgctggtgaaggagggaggcgaccgccctcgtcacgtcccgttccgctggagctgagccacgggccgacccagccacaagtactggagtagataacaaggagggaaaagagagggcactgcctcagggcttacagtgttctggaaatctgtgcattcgttctcgatttttaaagaagaattgggtctttttattattattattattatttacagtcatattactgaactcagtgtccagtataatgcagaattgcagagtgtagaatggtactgatttgcactttgattcacacctttgtctgcttggtaccttaattttttatacctgatttgtcactcgtgacagtatgtagactgccattctcatcagcggccgtcaggctactgtctgtgattcttttgtttgttgttgtggtgttgttctgattgttttgaactggagcatgcacttattttcagaaacttagagagttgcccctaggacaagacttaccaaaggtaatactcgtgagtaggtggcagatgtagcaaaaacttcacaacaattcagcaatcattagctcgggtcacttagagtaaggataacccttcatgaaaataagcctttagttgctctctattttgacttgtaaggatacctcataagctggatcttttatttttccttcatgtttgatttttgttttgccgaggattttggttagatcttttagtattatgtaaatttatgctgcaatagcttttgctgctattaaaatggtattattaataccataatactctattcaggctaggatatcaattaaacacaaaaacccaacaacacacttttgtgattttagggatagagtcagctgccgaacggagatcagaatagacttcagaaagcttcggtggaaggtcactatttctgactgcatgtttacttaatcaggttgctgcatgcaataaattttatatccaatgtctagtataaaacgttcccacaatgcacaaattaagaatctatataagctataaaaatactcattttttaaaaaaagtttttttcattcaaagaattggtaattgaccggaggaaggcatgcctcaataaatggaatgctctgaatgggaagagcccataacagaatgacctatattacaaccgatataaaacctaggtgtaggatattcttcaagcaaatttgtggatggtagatgaagtactttgcggtgctctgttatatattgtgaaatttattttatatagtaaagtgattatgtctaactgtgatcaaacttaactgtttaaagcctctgtcagacattaatgaacttgacagttcataactgatatattataaactaacacatgagctcttagttacaatctcttagtgcttgcaccattttacatagcttcagaccttgtccagaaaaccaaagagctcatcttagcttacaaacactaagaatatatacaggatatagagataagttgtcagattgacaaactaggcacatttttaagaaagttgtgtaatggtgatgctaaagaaatgtctgtacaaaataagatggcctgggcagagttggttgtctgagtgagaaactaactacttaattccctggatttatcctgttaagcttgagtagaatgaaggcctgctagcactagcgtggtctagaatgaaggcctgctagcactagcgtggacatttttctagcattcacccttgggctgcagatagtaatatataaacacacacaatgattgcaagactatgtaaatctttttttaatcttcttcctatgttttggaattctggggacaatctgactggatatgacactgcagaatagatttaagtcgctgtgttttctgtgctgtgatgtccttgtactgtcttaagttagtgttgcttgtttttgttttgttctcccatgtttagttgcaattactggctctcaagctatagtttgttttcaaaaaggaaaaacaaaatagttttttactggattaaaaatgcttattttagaatcctcccctttttgaggctttttggtaataattgcttttttccagcccaggtgtggttttgtttgtttttttctatgtttgtgggttttttttcatctgtacaagaaattttgttatgcactactactttttgtattctagacagttttcaaaagttggcagatttttttttttgtttttaaggaaaaaggcatgctttctgactgacatgatcttttgcaatacctcaattttgaaatataggaaagaaaatgatattttctaagtaagtttattcagaaaaatatatattaatttaattctgcaagaaaatgatttaacagatgggtaactttatttttttcatgcttatttgtgttttttgaaaatgaagaagttagagctttataactataatattaaagatcatatctaacctacagaaatctacctaattatgtgaaagaagcaaaactttttgaagaagcacccctctttcatgtattaaaataacactgagatttttttaaaagctggaagattgtacagcataaagctaaagtgaaggcaaaaaacattgtcctgaagaataggttacaaaaaataaactccatttggtgctgaaagttgtgaatagatggtggaaactactttcccttaatttgtatatttctaatcaagtgttgattgtgcgcgactgaccaggattgtgaaagagttcttctgtttgtatttttttaaagagaacttttttagtttattaaattataacatgttcccttttgttttgtaaataaatgtgcccccaagttgttaatgttatattaaaagagagggtccttcaaaaaaattattttttaaaacacagaggtgttctgacctgcaacttgactgggaagcccctgggtaacacaggtcctgctgtggcctttccttggtgtgacacttgaactagtcgattttttgaaggctataacctaacctcgactatttgttgttatgtgcaatactgtttgtactgtttgtataaaaaatagaaaaaaaaaagaaaagaaaaaaggcataaatctttattgcagatttattttcattgcaaactttagacattgtgattcactgaaatcatttttctactgtcaaatatgtaccttttcttcatgctggtattttttcaatagtaatgtagcctttgtactgagacaaattttcattgttatttttagaaagattttttgctaagaaaaaaattaaacatatttacatatttttcattttatttcgtattttctttaaggagtgctttctcaatcattaatagagttgtttctgggagggactttcatatctggtcaatgtcataatattattttgtatttttattggaataaattaattttatgatgctaattctttaaaagtttatttttttcattttcagttatttttgaagctaaaacctttgtaatattgttactaaagtgtctagttttttgaaatgcaaagctttatgtattaacttgctgatgtggtttacaatagtgtgacaacgatgaaaatgcttggttatgtaaagtgattggaaatgtaatggataattgggtaataaaatgacagaatgagcag

SEQ ID NO: 7559 - DNA, 5745 bp, Homo sapiens
  source 1..5745: mol_type = unassigned DNA
acagttgtcaaagtgcttttgccagagcggtcacataatcaacctgaaagaagaaaataaatactgtatacttttaaattttatcgattcttaaaaactggacactcaaagctgcgcaaaccatgcaggatgatttactgatggacaaaagcaaaacccagccccagccccagcagcagcagcggcagcagcagcagccccaacctgagtccagcgtatccgaagccccgtccacgcccctctcctcagagacccccaagccggaggaaaacagcgcagtgccggccctcagcccagccgctgcccccccggcccccaacggcccggacaagatgcagatggaatcaccgctcctgccaggcttgagtttccatcagcctcctcagcagccgccgccgcctcaggagcccgcggcaccgggcgcgtcgctgtcgccgtccttcggcagcacctggtccacgggcaccaccaacgcggtagaggacagcttcttccaggggatcaccccagtcaacgggaccatgctcttccagaacttcccgcaccatgtcaacccagtcttcggaggcactttctccccgcagatcggcctggcgcagacccagcaccaccagcagccgccgccgcctgcgcccgcgccgcagccggcacagccagcgcagccaccacaggcgcagcccccgcagcagcgccgctcacccgccagccccagccaggcgccctacgcgcagaggagcgccgccgcggcgtacggccaccagcccatcatgaccagcaagccgtcctcgtcttcggcggttgcagccgctgctgccgcagccgccgcctcgtcggcctcgtccagctggaacacgcaccaaagcgtgaatgcagcctggagcgcaccgtccaacccctggggcggcctgcaggcgggccgggaccctcgccgggcggtcggtgtgggcgtgggtgtgggtgtcggggtgccttccccgctcaaccccatctcgccgctcaaaaagcccttctccagcaacgtgatcgcgccgcccaagttccctcgcgcggcccctctcacttccaagtcctggatggaggataacgctttccggaccgataatggtaacaatctgttgccatttcaggaccggagtaggccctatgatacttttaacttgcactcgttggagaactccttaatggatatgataaggactgatcatgaacctctgaaaggacgcatggggataaatttccatcatccaggaacagataatattatggcacttaacagtcgatcttctctctttccctttgaagatgccttcctggatgatagccatggtgatcaagccttgtcatctggcttaagttctcccactcgctgtcaaaatggggaacgagtagaacgctactctagaaaggtgtttgttggaggacttcctcctgatattgatgaagatgagatcactgccagctttcgcaggtttggacctctcgtagtagactggcctcacaaagctgaaagcaagtcttattttcctcctaaaggctatgcctttctgctgttccaagaggaaagctcagtacaagctttgatagatgcctgcctagaagaagatgggaaactctacctgtgtgtgtcaagccccaccatcaaggacaagccagtgcaaattcgaccatggaacctaagtgacagtgactttgtaatggatggttctcagcctttggaccccagaaaaactatctttgttgggggagttccacgaccccttcgagctgttgaactggcaatgatcatggaccgtttgtatggtggtgtctgctatgctggcattgatacggacccagagctgaagtaccccaaaggtgctggccgcgtggcattctccaatcagcagagttacattgcagccatcagcgctcgttttgtgcagcttcagcacaatgacattgacaaacgggttgaagtaaagccatatgtgctggatgatcagatgtgtgatgagtgccagggcacacgctgtggtgggaagtttgccccgttcttctgtgccaacgtcacctgtctgcagtattactgtgaatactgctgggcgagcatacattcccgagccgggcgggagttccacaaaccgctggtgaaggagggaggcgaccgccctcgtcacgtcccgttccgctggagctgagccacgggccgacccagccacaagtactggagtagataacaaggagggaaaagagagggcactgcctcagggcttacagtgttctggaaatctgtgcattcgttctcgatttttaaagaagaattgggtctttttattattattattattatttacagtcatattactgaactcagtgtccagtataatgcagaattgcagagtgtagaatggtactgatttgcactttgattcacacctttgtctgcttggtaccttaattttttatacctgatttgtcactcgtgacagtatgtagactgccattctcatcagcggccgtcaggctactgtctgtgattcttttgtttgttgttgtggtgttgttctgattgttttgaactggagcatgcacttattttcagaaacttagagagttgcccctaggacaagacttaccaaaggtaatactcgtgagtaggtggcagatgtagcaaaaacttcacaacaattcagcaatcattagctcgggtcacttagagtaaggataacccttcatgaaaataagcctttagttgctctctattttgacttgtaaggatacctcataagctggatcttttatttttccttcatgtttgatttttgttttgccgaggattttggttagatcttttagtattatgtaaatttatgctgcaatagcttttgctgctattaaaatggtattattaataccataatactctattcaggctaggatatcaattaaacacaaaaacccaacaacacacttttgtgattttagggatagagtcagctgccgaacggagatcagaatagacttcagaaagcttcggtggaaggtcactatttctgactgcatgtttacttaatcaggttgctgcatgcaataaattttatatccaatgtctagtataaaacgttcccacaatgcacaaattaagaatctatataagctataaaaatactcattttttaaaaaaagtttttttcattcaaagaattggtaattgaccggaggaaggcatgcctcaataaatggaatgctctgaatgggaagagcccataacagaatgacctatattacaaccgatataaaacctaggtgtaggatattcttcaagcaaatttgtggatggtagatgaagtactttgcggtgctctgttatatattgtgaaatttattttatatagtaaagtgattatgtctaactgtgatcaaacttaactgtttaaagcctctgtcagacattaatgaacttgacagttcataactgatatattataaactaacacatgagctcttagttacaatctcttagtgcttgcaccattttacatagcttcagaccttgtccagaaaaccaaagagctcatcttagcttacaaacactaagaatatatacaggatatagagataagttgtcagattgacaaactaggcacatttttaagaaagttgtgtaatggtgatgctaaagaaatgtctgtacaaaataagatggcctgggcagagttggttgtctgagtgagaaactaactacttaattccctggatttatcctgttaagcttgagtagaatgaaggcctgctagcactagcgtggtctagaatgaaggcctgctagcactagcgtggacatttttctagcattcacccttgggctgcagatagtaatatataaacacacacaatgattgcaagactatgtaaatctttttttaatcttcttcctatgttttggaattctggggacaatctgactggatatgacactgcagaatagatttaagtcgctgtgttttctgtgctgtgatgtccttgtactgtcttaagttagtgttgcttgtttttgttttgttctcccatgtttagttgcaattactggctctcaagctatagtttgttttcaaaaaggaaaaacaaaatagttttttactggattaaaaatgcttattttagaatcctcccctttttgaggctttttggtaataattgcttttttccagcccaggtgtggttttgtttgtttttttctatgtttgtgggttttttttcatctgtacaagaaattttgttatgcactactactttttgtattctagacagttttcaaaagttggcagatttttttttttgtttttaaggaaaaaggcatgctttctgactgacatgatcttttgcaatacctcaattttgaaatataggaaagaaaatgatattttctaagtaagtttattcagaaaaatatatattaatttaattctgcaagaaaatgatttaacagatgggtaactttatttttttcatgcttatttgtgttttttgaaaatgaagaagttagagctttataactataatattaaagatcatatctaacctacagaaatctacctaattatgtgaaagaagcaaaactttttgaagaagcacccctctttcatgtattaaaataacactgagatttttttaaaagctggaagattgtacagcataaagctaaagtgaaggcaaaaaacattgtcctgaagaataggttacaaaaaataaactccatttggtgctgaaagttgtgaatagatggtggaaactactttcccttaatttgtatatttctaatcaagtgttgattgtgcgcgactgaccaggattgtgaaagagttcttctgtttgtatttttttaaagagaacttttttagtttattaaattataacatgttcccttttgttttgtaaataaatgtgcccccaagttgttaatgttatattaaaagagagggtccttcaaaaaaattattttttaaaacacagaggtgttctgacctgcaacttgactgggaagcccctgggtaacacaggtcctgctgtggcctttccttggtgtgacacttgaactagtcgattttttgaaggctataacctaacctcgactatttgttgttatgtgcaatactgtttgtactgtttgtataaaaaatagaaaaaaaaaagaaaagaaaaaaggcataaatctttattgcagatttattttcattgcaaactttagacattgtgattcactgaaatcatttttctactgtcaaatatgtaccttttcttcatgctggtattttttcaatagtaatgtagcctttgtactgagacaaattttcattgttatttttagaaagattttttgctaagaaaaaaattaaacatatttacatatttttcattttatttcgtattttctttaaggagtgctttctcaatcattaatagagttgtttctgggagggactttcatatctggtcaatgtcataatattattttgtatttttattggaataaattaattttatgatgctaattctttaaaagtttatttttttcattttcagttatttttgaagctaaaacctttgtaatattgttactaaagtgtctagttttttgaaatgcaaagctttatgtattaacttgctgatgtggtttacaatagtgtgacaacgatgaaaatgcttggttatgtaaagtgattggaaatgtaatggataattgggtaataaaatgacagaatgagc

SEQ ID NO: 7560 - DNA, 9483 bp, Homo sapiens
  source 1..9483: mol_type = unassigned DNA
agtgctacccccacccctccctcttcgaaccggaagtgtctctgggtctttccagctggttgtcatttcactcggctcggtcctgaggagaaggactcagccgcggctgcgggacccgggcaccgggaggcggtggcggcggcggcggcggcagcagcggcgacagcagaggaggaagaggaggaagaaggaaagaaaaagaagaaccaggaggagtcctcaacaacgacagcggggactgcgggaccagggtaaagcggcgacggcggcgacggcccagcaaccgtgaggagaaacaaaagccttctaaattatagtttaaaaaaaaattctgggggaaaagagagagaaagccgaggggggaggcccttctcctttaaaataactacggtagtgggtttttcctttttttcctcttttttccctctctgcggagaatcgaactgagggaactgaacaaaccgcccctgggtcccatgagggaaaaaaaccccggagccgcagagaggggaagaggcagaaaccgcaggaccttccaggtcgccccctcggtccccgcacccccaggccgcccgctcaccctcgtcgagtctcgctaatccctcctgatcgcgacccccgcaagagggagaaacgggtgtttccaacccctttcatgggggagaggaagccgcggggagcccaggaacagcgaccgcagcaagatctgcacccggagcctcaggaacagccccagaggccaaaactgcaccctgcgaaagagcagaaaacaggaccaggaacagcagaaacctccctgcaatcatctttccattagtcaatgctgatttcctctcccgaaaccaggaattcacttcccaccccagataacctaatataatctatatatataaatatataatatataatgttcttaaattattcctgatttttttttaaccaagctgccaagaaaagaacgtattcccctcttagtcctattctaatttttatgtgagtgaatctaaactgctgaggaaaaccatatgtgattgttaaattatatatatctatatttttactccgcgcaaggcttattcttctacatccatagatgcttgagaagctctgtttttgtcattcatgtacattttcctttggaaaaagaaagcgcctattttactaaccaaagacttgatttttaccctcttcatttttattccctcctaaaaataagcccaattggatccaagtcaatgttttaagagatttttttaagagttgttttttctttcagagaccagaattccaaatcagaacaatttaaggtgataagctgcgatctttgagctagctataaataagacatttcaagcaagcaagcaaacaacttaaatttggggtagaggaaaaaaaaggcgtgagacatcaggttgtcattttttattgtgagattctgctcctaaagataataaatgggggattacgggtttggagtgctagtgcaaagcaatactgggaataaatctgcttttccagtcagattccatccacatctgcagcctccacaccatcaccaaaatgccacccccagccctgctgcttttataaataataacacagctgccaatggcagcagtgctgggtcagcttggctttttcctgctccagctacccataacattcaggatgagatcttggggtcagaaaaagcaaaaagtcagcaacaggaacagcaagaccccttagaaaagcagcagctttccccaagtccaggtcaggaagctggaatactgcctgaaacagagaaggcaaaatcagaagaaaatcaaggggacaattcttcggaaaatggcaatgggaaggagaaaataaggatcgaatctccagtgttgacagggtttgattatcaagaagccactgggctaggtacttcaacccaacccttgacatctagcgcatcgtctcttactggtttcagtaactggtcagcagcgatagcgccttcctcctctacaataatcaatgaagatgcaagtttctttcaccagggaggggtccctgctgcttcggctaataacggtgctctgttgtttcaaaatttcccccatcatgtcagccctggctttggaggcagcttctctcctcagatcgggcctctctcacagcaccacccacatcaccctcatttccagcatcatcacagccagcatcagcagcaaaggaggtctcctgccagtccccatcccccacccttcacacatagaaatgctgcttttaaccagctgcctcatttggcgaataatcttaacaaacccccctctccgtggagcagctaccagagtccgtcaccaacaccctcctcttcctggagcccgggcggtggtggatatggtggctggggaggttcccaaggccgagatcaccgcagagggctgaatggtggaataacgcccctgaactccatctcgcctttgaagaaaaattttgcaagcaatcatattcagctccagaagtatgctcgccccagctctgcctttgcacctaaatcctggatggaagatagcttgaacagggctgacaacatttttccttttccggatcgccccaggacattcgacatgcactcactggagagttcactcattgacataatgagagctgaaaatgataccattaaaggtcgtctaaactattcatatccaggatccgatagctctctgcttattaatgcaaggacatatgggcgaaggagaggtcagtcttcactgtttccaatggaagatggattcttggatgatggccgtggggatcagcctcttcatagtggcctgggttcacctcactgcttcagtcaccagaatggggaaagagtggaacgatattctcgaaaggtgtttgtaggcggattgcctccagacattgatgaagatgagatcacagctagttttcgtcgctttggccctctgattgtggattggcctcataaagctgagagcaaatcctattttcctcctaaaggctatgcattcctgctgtttcaagatgaaagctctgtgcaggctctcattgatgcatgcattgaagaagatggaaaactctacctttgtgtatcaagtcccactatcaaggataagccagtccagattcggccttggaatctcagtgacagtgactttgtgatggatggttcacagccacttgacccacgaaaaactatatttgttggtggtgttcctcgaccattacgagctgtggagcttgcgatgataatggatcggctatatggaggtgtgtgctacgctgggattgataccgaccctgagctaaaatacccaaaaggagctgggagagttgcgttctctaatcaacagagttacatagctgctatcagtgcccgctttgttcagctgcagcatggagagatagataaacgggtggaagttaagccatatgtcttggatgatcagctgtgtgatgaatgtcagggggcccgttgtggggggaaatttgctccatttttctgtgctaatgttacctgtctgcagtattactgtgaatattgctgggctgctatccattctcgtgctggcagggaattccacaagcccctggtgaaggaaggcggtgaccgccctcggcatatttcattccgctggaactaaaggataactgcagtgctcattttcaggcctcagaataagtgcactcttctgttcattctgaccccttcctcaacctcttcacgctggcatgtccttttgtagcagtctgtaacttaactatagtataatgaaaagaatgacctataatataggtgttttgtagattcttgtgtcactgcaaacaatatgaactcctttttcgtattgccatcgggttgcatggaagttttattctcttgttttgctggaaaccaagaggatccaaacttcctgcaacattttcttagaggagagagagaaatattaaaagagaaatgaaacaatagagtattttgggtttttaattaaattattgttaataatataacatataagaatacttttattaaaataaccatgcaacaataacactatcggtctatctgacagtttttcccccagggaagtgcttttgccttttcctttcttttttttttttttttcatcttttttgtctctctcttttttccatccctttttaatttttttaacagcaatggaggaagttaacaatttttaatggaaagagcatgttagagcaaacaaatgcataagcaagactgagcagcattataattaattttcagggttttgaggctgaacataatttcattatccctcaaaaagttaccaccacatcagaaaaaataaaaaaaaaatagtaaagtaggcagagctaggtttattttctcttaaacaatttttaaaattcagaatgtaaaaattgggtaaatttactactgaggggagtgcacttatttatttaacttacttatctggtcaaagccccaggaaacctaccaaagctagaattaatgacaactggtgggaaacctagcatttcctctcctgaagaataaatgtataaatgttatttttgatgtttatatataaactctatatcctaatttactaatactcatcagatgtcagcctttgctctccattttgacgttaaaaaacaacaacagatctagagatacctcaaggatatcatttttgattttgtgttacagtacacttgtagccaaaactggaagacaaaaccaatatataatttggctgctgattggcttacttttagatttaaagttactttgggtatcctgtaatttagttgtaacatagaaaatgaaaaaacagttaaaaaaagtgaagtagttgcaaagtgttttgcactgttgaactaagtaactgtgtaaatctgtgcaaaggtacgtatgtttatcttactcttcctataaactaaaataacattacagtttccgaatttagcatgggacatagtcagtgtttgaagtgccaacttcatcaagtaatgcatgctttattataaataaaattctagctttgaaaggcgttatgtgttgaacagtatgcttcaggggtaaatttaaaatagtctcttgaagccctagtcatggaagtaacttttattttaattgacattctcttattaaatgccctatccatcattaaaaggtttattatcagtgggcaaaacatgaaataatatgatcgaatggcaatcttgctagttgcgctacctaacagtaccatcttggatccttcaaaaccaaagacttgccccagcactgctgtggaaccacctggcttatgacccctatggatgatctttaggaaaagcagccctttacttttaatacaggctttaatgaactatacctgttaagttccaaaggtcaaaatggaggcatttgctgtctaatattcaaacatagaaagggagctgcttttaaagaattccctgcaaatactgaaagcagtcatgcgaatggagggtgctcttgtgtagctggtcagggacttttttttcttttctcctgaactacatgattctaattggaatgttcatttgcctctttttactcttttaaatgcttgtaggtggcttggggtgtgctatcgtgctgttcctactcagtaaacaggtgtgatgagttaacaagaaataacactgtttgagaactagctttgaataataatttttccctttgtacatgacctgctgaatttcggtacagtgtttttgtagctaacttattttgtcatgcacataatgtatatttgttatgcactacttttgtatatcttgtttttccaacagtgaacatttttaggcacacttttcactgacgggatatctctttatgcaatacctcaatttttcatattgcaaagagtagctttttgtacttttattactgagagatcttcatatacttcattttttaatataaataattttaataaattttattttcttatattctgctttttatacatttcagtgctctgcatacattttaaattatgaatgtcgtgcactggcaatgctattttagagtctgcagagaagagaaagcatgttgcttaaacatccttccccagcaccagctattggtgtacctataatttaagaaatagtctatgtaaagtcacaaattaatgaaaaaaattcgcatgaaaatgacagataacactgtagttcctaaaaaaaaaattaaatgcataagcataaggtagaaattaaaataacaaaattgtctacagcttcttactaagtttttaaaattattcataaaatgcagacatttttggtgaatgtttagccatttttaatattaataaattgatgttaagtgtttgattcagagatgtctgctcttttaaattatatataaggaaaaaaaatagcctgccttgggacaggtgtgtaatgttagtgtgcatgactaatgtaagaaattgttattctactaatatttacttgtgattgtgtgacaagtgtgtttacagattattggttacacttcaatttacagggcataaacaatgattatctattactctgaactttatgattacatgttcttcagattacatgggattgtagttgggagttaccatgtaactcaaacataattaacatgtaattagtttacagattgtagggcatcacttcaattcaccaagcatgtagttctagcgcactagcatggcgccagccatgtacttacaatgtagttacagagtaattacatggtgatttttgcaatgtaaaataaagtgtttctgattattttctatgtaaaggaaccctctcctttccccttctggtccctgcgctttggtataatatatatacttctccatacacagacctctgcagaatgcaaaataaaacttgcagtgaatgaatttagcattttatgagagtgctgttggaaagacttgataattcaccccttttgttttgaagagttgaatcttctgttaaaaggtgatttaaaacttgaatgtgatgaattgtggcaagttaacttcaagttatgtgcaatacttatttcaaacttttgaaagatctttgcagtgtaattctttgtttttaattgcagacatttaaaaatgtcattttctactgttaagagtaatcctctttcttgctggtgtttctaaagaaaagaatcagaaatcaatctttctactaatgtaaatttgagattatttttaaaaatggaataaaagaggttttggtcatttgctttattttattattttaaagctactgtgattgatagcattgtaagaatcgggacaatattgtattcaactgttttattttttatatttttaaaatttaaagtataattagtttttataattttcatcagatttttgttatattttttggaagtgaaacttttagcaagtgggtgtctagtttttactaatccctaattttttttccagtgtattgctcatattatcagaaggaaaagttatttaagtatgtcagttaattgtactacttggctgaatttccatatagtttttactgtgtatggggaggttgtagtatttattatagcattttaaataagggtaattcattttttattaaagtcattttcacgttaagttcctatttttgtatgttctactcttaagttatataacacagttccttttttaaaagagttcatttgttgaagtgctagtgaaaaattaatgttattaaatagtttgcaaatgactatttataccagtatgcatataatttttaaatatttgtaatgtgagatgttgaatgaataaaacttttaactcagatttcttttaatatacttatttctttttaacacaagtagatgatgctttcttgactgggaatgtaacattttaaaatattaggaatatactgttcagctaatgcagcacaaaccaataggaaaaaatcttcagtcatataagtactgtggccagtgtgcattcttatgtaagcctataagcgtcggtgggtggttgtgtctttggcctgtactgttagttcacctgctgcctgccctgcagagttctttttatttgtagccttcaatatgtatacagggagtaagcccaggatctaagcattcagttatcagttgaaggccaaatgcccaacaaaagtgaaaaacccaatgtttagttaataatgaaagtccgtatctgggaggttcagttttgagtctttgtcaatgaatagtcttgatttgtggccacactaccaaagggcttgaaaacaagtctcttttgacttccaattcccagttcctccatagaccttaatgtcataggatacggtgtgtgggattataatctctatggcatgtcaattgaaaatattatctttgatttgatccattaatcatgtggactaccaagtgctgtaatgtgttagtatttatattttaaactgcattctcaaacttttaacataaggatttattataacaaaatataacactgagaatatcctgttttgtcagatttaatatctgttctttcttgagtatagtattctcaagactagaagaggttcttgtcctgagagaaatggactatgagatcttttgcgtctaagttgtctttcccaacaggcagctcttctaactatagagattactgagggtaagggcaggctggacagcttcccctttctctcatctggcaattcccaaaccttacgttgagcattcaatgaagggccttgaggaaaccccagggatgggacactggagatgtgggtggcatttggttatcaagtctataatattcctaggcattctgggatggtttcactattttaagaaaagaaaaaaaagatagcccaagcatatttagtttattttaggaaatgtttatttcaggtaagtgagatatcaatgatatgtgatataacaactctatcttgaaattacataggtgcattgctttgggtgttttaaatcacagaatggtgtgtctggaaagggtgtaagaggcttcctgggctatatttcttcattcactgattgcctaaacctacccaacgaggaaaattctttttatttttatcttttgtttttactgtctaaccagatgaataaacagtggaaattctctaccacactcttaacaatcaagtcatttcataaccccttttggtaatgggtgtttgtgtccacagctagatcagaaagtaagtactttttctagggatttttttttttttttaagtttgggaaatagtttgatcaaaagtcatggggaaagtaatctctgattttaaaaattgaagaatactgaaggtgtcagtgagttagaaatttttaaggagtaattattttctgaaatgtgtaataaccgaataataaacaagacaaaactctaatatttcagactgtgatcttcagaggactaggatagtcctttccacaagaaaaagacaaaaaaaaataaagttttaccattaaataca

SEQ ID NO: 7561 - DNA, 6705 bp, Homo sapiens
  source 1..6705: mol_type = unassigned DNA
ctccgcgcaaggcttattcttctacatccatagatgcttgagaagctctgtttttgtcattcatgtacattttcctttggaaaaagaaagcgcctattttactaaccaaagacttgatttttaccctcttcatttttattccctcctaaaaataagcccaattggatccaagtcaatgttttaagagatttttttaagagttgttttttctttcagagaccagaattccaaatcagaacaatttaaggtgataagctgcgatctttgagctagctataaataagacatttcaagcaagcaagcaaacaacttaaatttggggtagaggaaaaaaaaggcgtgagacatcaggttgtcattttttattgtgagattctgctcctaaagataataaatgggggattacgggtttggagtgctagtgcaaagcaatactgggaataaatctgcttttccagtcagattccatccacatctgcagcctccacaccatcaccaaaatgccacccccagccctgctgcttttataaataataacacagctgccaatggcagcagtgctgggtcagcttggctttttcctgctccagctacccataacattcaggatgagatcttggggtcagaaaaagcaaaaagtcagcaacaggaacagcaagaccccttagaaaagcagcagctttccccaagtccaggtcaggaagctggaatactgcctgaaacagagaaggcaaaatcagaagaaaatcaaggggacaattcttcggaaaatggcaatgggaaggagaaaataaggatcgaatctccagtgttgacagggtttgattatcaagaagccactgggctaggtacttcaacccaacccttgacatctagcgcatcgtctcttactggtttcagtaactggtcagcagcgatagcgccttcctcctctacaataatcaatgaagatgcaagtttctttcaccagggaggggtccctgctgcttcggctaataacggtgctctgttgtttcaaaatttcccccatcatgtcagccctggctttggaggcagcttctctcctcagatcgggcctctctcacagcaccacccacatcaccctcatttccagcatcatcacagccagcatcagcagcaaaggaggtctcctgccagtccccatcccccacccttcacacatagaaatgctgcttttaaccagctgcctcatttggcgaataatcttaacaaacccccctctccgtggagcagctaccagagtccgtcaccaacaccctcctcttcctggagcccgggcggtggtggatatggtggctggggaggttcccaaggccgagatcaccgcagagggctgaatggtggaataacgcccctgaactccatctcgcctttgaagaaaaattttgcaagcaatcatattcagctccagaagtatgctcgccccagctctgcctttgcacctaaatcctggatggaagatagcttgaacagggctgacaacatttttccttttccggatcgccccaggacattcgacatgcactcactggagagttcactcattgacataatgagagctgaaaatgataccattaaagcaaggacatatgggcgaaggagaggtcagtcttcactgtttccaatggaagatggattcttggatgatggccgtggggatcagcctcttcatagtggcctgggttcacctcactgcttcagtcaccagaatggggaaagagtggaacgatattctcgaaaggtgtttgtaggcggattgcctccagacattgatgaagatgagatcacagctagttttcgtcgctttggccctctgattgtggattggcctcataaagctgagagcaaatcctattttcctcctaaaggctatgcattcctgctgtttcaagatgaaagctctgtgcaggctctcattgatgcatgcattgaagaagatggaaaactctacctttgtgtatcaagtcccactatcaaggataagccagtccagattcggccttggaatctcagtgacagtgactttgtgatggatggttcacagccacttgacccacgaaaaactatatttgttggtggtgttcctcgaccattacgagctgtggagcttgcgatgataatggatcggctatatggaggtgtgtgctacgctgggattgataccgaccctgagctaaaatacccaaaaggagctgggagagttgcgttctctaatcaacagagttacatagctgctatcagtgcccgctttgttcagctgcagcatggagagatagataaacgggtggaagttaagccatatgtcttggatgatcagctgtgtgatgaatgtcagggggcccgttgtggggggaaatttgctccatttttctgtgctaatgttacctgtctgcagtattactgtgaatattgctgggctgctatccattctcgtgctggcagggaattccacaagcccctggtgaaggaaggcggtgaccgccctcggcatatttcattccgctggaactaaaggataactgcagtgctcattttcaggcctcagaataagtgcactcttctgttcattctgaccccttcctcaacctcttcacgctggcatgtccttttgtagcagtctgtaacttaactatagtataatgaaaagaatgacctataatataggtgttttgtagattcttgtgtcactgcaaacaatatgaactcctttttcgtattgccatcgggttgcatggaagttttattctcttgttttgctggaaaccaagaggatccaaacttcctgcaacattttcttagaggagagagagaaatattaaaagagaaatgaaacaatagagtattttgggtttttaattaaattattgttaataatataacatataagaatacttttattaaaataaccatgcaacaataacactatcggtctatctgacagtttttcccccagggaagtgcttttgccttttcctttcttttttttttttttttcatcttttttgtctctctcttttttccatccctttttaatttttttaacagcaatggaggaagttaacaatttttaatggaaagagcatgttagagcaaacaaatgcataagcaagactgagcagcattataattaattttcagggttttgaggctgaacataatttcattatccctcaaaaagttaccaccacatcagaaaaaataaaaaaaaaatagtaaagtaggcagagctaggtttattttctcttaaacaatttttaaaattcagaatgtaaaaattgggtaaatttactactgaggggagtgcacttatttatttaacttacttatctggtcaaagccccaggaaacctaccaaagctagaattaatgacaactggtgggaaacctagcatttcctctcctgaagaataaatgtataaatgttatttttgatgtttatatataaactctatatcctaatttactaatactcatcagatgtcagcctttgctctccattttgacgttaaaaaacaacaacagatctagagatacctcaaggatatcatttttgattttgtgttacagtacacttgtagccaaaactggaagacaaaaccaatatataatttggctgctgattggcttacttttagatttaaagttactttgggtatcctgtaatttagttgtaacatagaaaatgaaaaaacagttaaaaaaagtgaagtagttgcaaagtgttttgcactgttgaactaagtaactgtgtaaatctgtgcaaaggtacgtatgtttatcttactcttcctataaactaaaataacattacagtttccgaatttagcatgggacatagtcagtgtttgaagtgccaacttcatcaagtaatgcatgctttattataaataaaattctagctttgaaaggcgttatgtgttgaacagtatgcttcaggggtaaatttaaaatagtctcttgaagccctagtcatggaagtaacttttattttaattgacattctcttattaaatgccctatccatcattaaaaggtttattatcagtgggcaaaacatgaaataatatgatcgaatggcaatcttgctagttgcgctacctaacagtaccatcttggatccttcaaaaccaaagacttgccccagcactgctgtggaaccacctggcttatgacccctatggatgatctttaggaaaagcagccctttacttttaatacaggctttaatgaactatacctgttaagttccaaaggtcaaaatggaggcatttgctgtctaatattcaaacatagaaagggagctgcttttaaagaattccctgcaaatactgaaagcagtcatgcgaatggagggtgctcttgtgtagctggtcagggacttttttttcttttctcctgaactacatgattctaattggaatgttcatttgcctctttttactcttttaaatgcttgtaggtggcttggggtgtgctatcgtgctgttcctactcagtaaacaggtgtgatgagttaacaagaaataacactgtttgagaactagctttgaataataatttttccctttgtacatgacctgctgaatttcggtacagtgtttttgtagctaacttattttgtcatgcacataatgtatatttgttatgcactacttttgtatatcttgtttttccaacagtgaacatttttaggcacacttttcactgacgggatatctctttatgcaatacctcaatttttcatattgcaaagagtagctttttgtacttttattactgagagatcttcatatacttcattttttaatataaataattttaataaattttattttcttatattctgctttttatacatttcagtgctctgcatacattttaaattatgaatgtcgtgcactggcaatgctattttagagtctgcagagaagagaaagcatgttgcttaaacatccttccccagcaccagctattggtgtacctataatttaagaaatagtctatgtaaagtcacaaattaatgaaaaaaattcgcatgaaaatgacagataacactgtagttcctaaaaaaaaaattaaatgcataagcataaggtagaaattaaaataacaaaattgtctacagcttcttactaagtttttaaaattattcataaaatgcagacatttttggtgaatgtttagccatttttaatattaataaattgatgttaagtgtttgattcagagatgtctgctcttttaaattatatataaggaaaaaaaatagcctgccttgggacaggtgtgtaatgttagtgtgcatgactaatgtaagaaattgttattctactaatatttacttgtgattgtgtgacaagtgtgtttacagattattggttacacttcaatttacagggcataaacaatgattatctattactctgaactttatgattacatgttcttcagattacatgggattgtagttgggagttaccatgtaactcaaacataattaacatgtaattagtttacagattgtagggcatcacttcaattcaccaagcatgtagttctagcgcactagcatggcgccagccatgtacttacaatgtagttacagagtaattacatggtgatttttgcaatgtaaaataaagtgtttctgattattttctatgtaaaggaaccctctcctttccccttctggtccctgcgctttggtataatatatatacttctccatacacagacctctgcagaatgcaaaataaaacttgcagtgaatgaatttagcattttatgagagtgctgttggaaagacttgataattcaccccttttgttttgaagagttgaatcttctgttaaaaggtgatttaaaacttgaatgtgatgaattgtggcaagttaacttcaagttatgtgcaatacttatttcaaacttttgaaagatctttgcagtgtaattctttgtttttaattgcagacatttaaaaatgtcattttctactgttaagagtaatcctctttcttgctggtgtttctaaagaaaagaatcagaaatcaatctttctactaatgtaaatttgagattatttttaaaaatggaataaaagaggttttggtcatttgctttattttattattttaaagctactgtgattgatagcattgtaagaatcgggacaatattgtattcaactgttttattttttatatttttaaaatttaaagtataattagtttttataattttcatcagatttttgttatattttttggaagtgaaacttttagcaagtgggtgtctagtttttactaatccctaattttttttccagtgtattgctcatattatcagaaggaaaagttatttaagtatgtcagttaattgtactacttggctgaatttccatatagtttttactgtgtatggggaggttgtagtatttattatagcattttaaataagggtaattcattttttattaaagtcattttcacgttaagttcctatttttgtatgttctactcttaagttatataacacagttccttttttaaaagagttcatttgttgaagtgctagtgaaaaattaatgttattaaatagtttgcaaatgactatttataccagtatgcatataatttttaaatatttgtaatgtgagatgttgaatgaataaaacttttaactcag

SEQ ID NO: 7562 - DNA, 3375 bp, Homo sapiens
  source 1..3375: mol_type = unassigned DNA
ggagacggcagccgcgccgtctgacggcttagccgcggtgcagactgcggcggcggtggtctgaggaagttctatcttggcgctaaagcggagacgcatcccccgacccgaggctacgatgagcacaccggccgtgccccaggacctgcagctgcccccgagtcagagggcgcagtccgcattcaaagagcaaagaagacaaaaactcaaggaacatctgttgagaagaaaaacgctttttgcatacaagcaggaaaatgagatgttatccagtagagatcagagagttgtgacatctgaggaccaagttcaagaagggactaaagtgctgaaacttaaaacaaaaatggctgataaagaaaacatgaagagacctgcagagagcaaaaataatacagtggtggggaaacattgtattcctttaaaaccttcaaatgaactaaccaattcaactgtagtaattgacacacataaacctaaggatagtaatcaaactccgcatttgttactaactgaagatgatccccaaagtcaacatatgacattaagccaggcatttcaccttaaaaacaatagtaaaaagaaacaaatgactacagaaaaacaaaagcaagatgctaacatgcccaagaaacctgtgcttggatcttatcgtggccagattgttcagtctaagattaattcatttagaaaacctctacaagtcaaagatgagagttctgcagcaacaaagaaactttcagccactatacctaaagccacaaaacctcagcctgtaaacaccagcagtgtaacagtgaaaagtaatagatcctccaatatgactgccactactaaatttgtgagcactacatctcagaacacacaacttgtgcgacctcctattagaagtcatcacagtaatacccgggacactgtgaaacaaggcatcagtagaacttctgccaatgttacaatccggaaagggcctcatgaaaaagaactattacaatcaaaaacagctttatctagtgtcaaaaccagttcttctcaaggtataataagaaataagactctatcaagatccatagcatctgaagttatagccaggcctgcttcattgtctaatgataaactgatggaaaagtcagagcccgttgaccagcgaagacatactgcaggaaaagcaattgttgatagtagatcagctcagcccaaagaaacctcggaagagagaaaagctcgtctgagtgagtggaaagctggcaaaggaagagtgctaaaaaggccccctaattcagtagttactcagcatgagcctgcaggacaaaatgaaaaaccagttgggtctttttggactaccatggcagaagaagatgaacaaagattatttactgaaaaagtaaacaacacattttctgaatgcctgaacttgattaatgagggatgtccaaaagaagatatactggtcacactgaatgacctgattaaaaatattccagatgccaaaaagcttgttaagtattggatatgtcttgcacttattgaaccaatcacaagtcctattgaaaatattattgcaatctatgagaaagccattctggcaggggctcagcctattgaagagatgcgacacacgattgtagatattctaacaatgaagagtcaagaaaaagctaatttaggagaaaatatggagaagtcttgtgcaagcaaggaagaagtcaaagaagtcagtattgaagatacaggtgttgatgtagatccagaaaaactggaaatggagagtaaacttcatagaaatttgctatttcaagattgtgaaaaagagcaagacaacaaaacaaaagatccaacccatgatgttaaaacccccaatacagaaacgaggacaagttgcttaattaaatataatgtgtctactacgccatacttgcaaagtgtgaaaaaaaaggtgcagtttgatggaacaaattccgcatttaaagagctgaagtttttaacaccagtgagacgttctcgacgtcttcaagagaaaacttctaaattgccagatatgttaaaagatcattatccttgtgtgtcttcattggaacagctaacggagttgggaagagaaactgatgcttttgtatgccgccctaatgcagcactgtgccgggtgtactatgaggctgatacaacataagagaaataaagctctgttagggaatggggtttttattatttgtggggtgttttgttttgagtagctttatattgctcttaggtctggagttggccatgtacctatgtatcctaagcattcacggcagtgagctcctttactaacattcatgttatggcaagagttgtcctctacattggaaagctaatcctaccttgtcagtttcaaccaactgagttttttctttaagaaaggtaaattttgtcagctagtttactatgttccttgaatataaacaggttataatactaccctgttcactttactaaatataagtacagtaatgatgcataattagaaaatgaggtattctaggtaaaatgtatgtttgccttgacatgtttttaaaagttatgatgtacctccctgcctttaaacagaatacttttttcttttttttggcctttctcagattagtcaaaaattctatagaatgactcacttcgaatactaagacacaggaggtttagcctgctttcttaccaaattcatgttacccagacttgtgttctcttgcgtcccttggactgcctgttgattgatggaaagtgtctgcactgacacttttcgtcagtagtctgtagtttcgtggcctcttttgattataactggggtcaccaagaaggtttacttaattaaataccgcatttctaagagaagatactttgtgtaagaaaagatgccacatttagtggtttaacttttgtaacttcacttgatagtttttaagcaattagaatggagttagggaaagaacatatcatactgaacaaatgtcattctagtttagatagcatttctaagataactgatactaatacttgttttcttccctataacataaaaaacttcactgttaagtcatgtcccttgaaacatgatagttacatacacagttttctctccacacataaataacaccactaaagttgttttgtaaggttccaaactaatatggcatatatcaactctacagtttcaaataaatgactttttaattgtaaaagattagttgaaaaactgtatgaatgtgaagatcacatgcttagtcatttttatgttcattccactttgtatatcttttctatttattgacttctcatgttctagagagtaggacttttattccgtgtacctgatatatatacaattaaaatatctgtgtaatt

SEQ ID NO: 7563 - DNA, 1939 bp, Homo sapiens
  source 1..1939: mol_type = unassigned DNA
ggagacggcagccgcgccgtctgacggcttagccgcggtgcagactgcggcggcggtggtctgaggaagttctatcttggcgctaaagcggagacgcatcccccgacccgaggctacgatgagcacaccggccgtgccccaggacctgcagctgcccccgagtcagagggcgcagtccgcattcaaagagcaaagaagacaaaaactcaaggaacatctgttgagaagaaaaacgctttttgcatacaagcaggaaaatgagatgttatccagtagagatcagagagttgtgacatctgaggaccaagttcaagaagggactaaagtgctgaaacttaaaacaaaaatggctgataaagaaaacatgaagagacctgcagagagcaaaaataatacagtggtggggaaacattgtattcctttaaaaccttcaaatgaactaaccaattcaactgtagtaattgacacacataaacctaaggatagtaatcaaactccgcatttgttactaactgaagatgatccccaaagtcaacatatgacattaagccaggcatttcaccttaaaaacaatagtaaaaagaaacaaatgactacagaaaaacaaaagcaagatgctaacatgcccaagaaacctgtgcttggatcttatcgtggccagattgttcagtctaagattaattcatttagaaaacctctacaagtcaaagatgagagttctgcagcaacaaagaaactttcagccactatacctaaagccacaaaacctcagcctgtaaacaccagcagtgtaacagtgaaaagtaatagatcctccaatatgactgccactactaaatttgtgagcactacatctcagaacacacaacttgtgcgacctcctattagaagtcatcacagtaatacccgggacactgtgaaacaaggcatcagtagaacttctgccaatgttacaatccggaaagggcctcatgaaaaagaactattacaatcaaaaacagctttatctagtgtcaaaaccagttcttctcaaggtataataagaaataagactctatcaagatccatagcatctgaagttatagccaggcctgcttcattgtctaatgataaactgatggaaaagtcagagcccgttgaccagcgaagacatactgcaggaaaagcaattgttgatagtagatcagctcagcccaaagaaacctcggaagagagaaaagctcgtctgagtgagtggaaagctggcaaaggaagagtgctaaaaaggccccctaattcagtagttactcagcatgagcctgcaggacaaaatgaaaaaccagttgggtctttttggactaccatggcagaagaagatgaacaaagattatttactgaaaaagtaaacaacacattttctgaatgcctgaacttgattaatgagggatgtccaaaagaagatatactggtcacactgaatgacctgattaaaaatattccagatgccaaaaagcttgttaagtattggatatgtcttgcacttattgaaccaatcacaagtcctattgaaaatattattgcaatctatgagaaagccattctggcaggggctcaggtaagataaaaatttactgatctttacaattacagtgtagtagacaattcggaattaatttgaaacacatcacaacataacttgagaaaattttctttgtatatgtagtggtaataaatgtttaaaggctgcaaggattgcattataaaagctgtttgttggctttctaagtcttttattcctgtattgggaataatcagattttagaaaatggatataagctgaaatgtatatttaatgaaactttctgcatgaaatgttttagcatattattgtatgcatttcctggttggaagtttactgggagactgaatgtaatattaaaatttgtttattgaatataaa

SEQ ID NO: 7564 - DNA, 3351 bp, Homo sapiens
  source 1..3351: mol_type = unassigned DNA
ttagccgcggtgcagactgcggcggcggtggtctgaggaagttctatcttggcgctaaagcggagacgcatcccccgacccgaggctacgatgagcacaccggccgtgccccaggacctgcagctgcccccgagtcagagggcgcagtccgcattcaaagagcaaagaagacaaaaactcaaggaacatctgttgagaagaaaaacgctttttgcatacaagcaggaaaatgagatgttatccagtagtagagatcagagagttgtgacatctgaggaccaagttcaagaagggactaaagtgctgaaacttaaaacaaaaatggctgataaagaaaacatgaagagacctgcagagagcaaaaataatacagtggtggggaaacattgtattcctttaaaaccttcaaatgaactaaccaattcaactgtagtaattgacacacataaacctaaggatagtaatcaaactccgcatttgttactaactgaagatgatccccaaagtcaacatatgacattaagccaggcatttcaccttaaaaacaatagtaaaaagaaacaaatgactacagaaaaacaaaagcaagatgctaacatgcccaagaaacctgtgcttggatcttatcgtggccagattgttcagtctaagattaattcatttagaaaacctctacaagtcaaagatgagagttctgcagcaacaaagaaactttcagccactatacctaaagccacaaaacctcagcctgtaaacaccagcagtgtaacagtgaaaagtaatagatcctccaatatgactgccactactaaatttgtgagcactacatctcagaacacacaacttgtgcgacctcctattagaagtcatcacagtaatacccgggacactgtgaaacaaggcatcagtagaacttctgccaatgttacaatccggaaagggcctcatgaaaaagaactattacaatcaaaaacagctttatctagtgtcaaaaccagttcttctcaaggtataataagaaataagactctatcaagatccatagcatctgaagttatagccaggcctgcttcattgtctaatgataaactgatggaaaagtcagagcccgttgaccagcgaagacatactgcaggaaaagcaattgttgatagtagatcagctcagcccaaagaaacctcggaagagagaaaagctcgtctgagtgagtggaaagctggcaaaggaagagtgctaaaaaggccccctaattcagtagttactcagcatgagcctgcaggacaaaatgaaaaaccagttgggtctttttggactaccatggcagaagaagatgaacaaagattatttactgaaaaagtaaacaacacattttctgaatgcctgaacttgattaatgagggatgtccaaaagaagatatactggtcacactgaatgacctgattaaaaatattccagatgccaaaaagcttgttaagtattggatatgtcttgcacttattgaaccaatcacaagtcctattgaaaatattattgcaatctatgagaaagccattctggcaggggctcagcctattgaagagatgcgacacacgattgtagatattctaacaatgaagagtcaagaaaaagctaatttaggagaaaatatggagaagtcttgtgcaagcaaggaagaagtcaaagaagtcagtattgaagatacaggtgttgatgtagatccagaaaaactggaaatggagagtaaacttcatagaaatttgctatttcaagattgtgaaaaagagcaagacaacaaaacaaaagatccaacccatgatgttaaaacccccaatacagaaacgaggacaagttgcttaattaaatataatgtgtctactacgccatacttgcaaagtgtgaaaaaaaaggtgcagtttgatggaacaaattccgcatttaaagagctgaagtttttaacaccagtgagacgttctcgacgtcttcaagagaaaacttctaaattgccagatatgttaaaagatcattatccttgtgtgtcttcattggaacagctaacggagttgggaagagaaactgatgcttttgtatgccgccctaatgcagcactgtgccgggtgtactatgaggctgatacaacataagagaaataaagctctgttagggaatggggtttttattatttgtggggtgttttgttttgagtagctttatattgctcttaggtctggagttggccatgtacctatgtatcctaagcattcacggcagtgagctcctttactaacattcatgttatggcaagagttgtcctctacattggaaagctaatcctaccttgtcagtttcaaccaactgagttttttctttaagaaaggtaaattttgtcagctagtttactatgttccttgaatataaacaggttataatactaccctgttcactttactaaatataagtacagtaatgatgcataattagaaaatgaggtattctaggtaaaatgtatgtttgccttgacatgtttttaaaagttatgatgtacctccctgcctttaaacagaatacttttttcttttttttggcctttctcagattagtcaaaaattctatagaatgactcacttcgaatactaagacacaggaggtttagcctgctttcttaccaaattcatgttacccagacttgtgttctcttgcgtcccttggactgcctgttgattgatggaaagtgtctgcactgacacttttcgtcagtagtctgtagtttcgtggcctcttttgattataactggggtcaccaagaaggtttacttaattaaataccgcatttctaagagaagatactttgtgtaagaaaagatgccacatttagtggtttaacttttgtaacttcacttgatagtttttaagcaattagaatggagttagggaaagaacatatcatactgaacaaatgtcattctagtttagatagcatttctaagataactgatactaatacttgttttcttccctataacataaaaaacttcactgttaagtcatgtcccttgaaacatgatagttacatacacagttttctctccacacataaataacaccactaaagttgttttgtaaggttccaaactaatatggcatatatcaactctacagtttcaaataaatgactttttaattgtaaaagattagttgaaaaactgtatgaatgtgaagatcacatgcttagtcatttttatgttcattccactttgtatatcttttctatttattgacttctcatgttctagagagtaggacttttattccgtgtacctgatatatatacaattaaaatatctgtgtaatta

SEQ ID NO: 7565 - DNA, 1682 bp, Homo sapiens
  source 1..1682: mol_type = unassigned DNA
accggccccggcaactgcagtccaggctccgcctccctacgcccattggcttattcaattcacgcaggaaccaatgggcggagacggcagccgcgccgtctgacggcttagccgcggtgcagactgcggcggcggtggtctgaggaagttctatcttggcgctaaagcggagacgcatcccccgacccgaggctacgatgagcacaccggccgtgccccaggacctgcagctgcccccgagtcagagggcgcagtccgcattcaaagagcaaagaagacaaaaactcaaggaacatctgttgagaagaaaaacgctttttgcatacaagcaggaaaatgagatgttatccagtagtagagatcagagagttgtgacatctgaggaccaagttcaagaagggactaaagtgctgaaacttaaaacaaaaatggctgataaagaaaacatgaagagacctgcagagagcaaaaataatacagtggtggggaaacattgtattcctttaaaaccttcaaatgaactaaccaattcaactgtagtaattgacacacataaacctaaggatagtaatcaaactccgcatttgttactaactgaagatgatccccaaagtcaacatatgacattaagccaggcatttcaccttaaaaacaatagtaaaaagaaacaaatgactacagaaaaacaaaagcaagatgctaacatgcccaagaaacctgtgcttggatcttatcgtggccagattgttcagtctaagattaattcatttagaaaacctctacaagtcaaagatgagagttctgcagcaacaaagaaactttcagccactatacctaaagccacaaaacctcagcctgtaaacaccagcagtgtaacagtgaaaagtaatagatcctccaatatgactgccactactaaatttgtgagcactacatctcagaacacacaacttgtgcgacctcctattagaagtcatcacagtaatacccgggacactgtgaaacaaggcatcagtagaacttctgccaatgttacaatccggaaagggcctcatgaaaaagaactattacaatcaaaaacagctttatctagtgtcaaaaccagttcttctcaaggtataataagaaataagactctatcaagatccatagcatctgaagttatagccaggcctgcttcattgtctaatgataaactgatggaaaagtcagagcccgttgaccagcgaagacatactgcaggaaaagcaattgttgatagtagatcagctcagcccaaagaaacctcggaagagagaaaagctcgtctgagtgagtggaaagctggcaaaggaagagtgctaaaaaggccccctaattcagtagttactcagcatgagcctgcaggacaaaatgaaaaaccagttgggtctttttggactaccatggcagaagaagatgaacaaagattatttactgaaaaagtaaacaacacattttctgaatgcctgaacttgattaatgagggatgtccaaaagaagatatactggtcacactgaatgacctgattaaaaatattccagatgccaaaaagcttgttaagtattggatatgtcttgcacttattgaaccaatcacaagtcctattgaaaatattattgcaatctatgagaaagccattctggcaggggctcagcatatt

SEQ ID NO: 7566 - DNA, 6516 bp, Homo sapiens
  source 1..6516: mol_type = unassigned DNA
actgcggggtgtgcggcggcccaagcggtttcaaacggcttagagcaggccgcttggttctgacccagctgaggaaatactcttaattctaaggaaaacctggaagcacaatgggagatgacagtgagtggttgaaactgccagttgatcagaaatgtgaacacaagctgtggaaagcaaggttaagtgggtatgaagaggccctgaagatcttccagaaaataaaggatgaaaagagcccagagtggtccaaatttttaggattgatcaaaaaatttgtcactgattccaatgcagtggttcaattgaaaggattagaagctgcacttgtttatgttgaaaatgcccatgtagcaggaaaaaccacaggagaagttgtgtcaggtgttgtaagtaaggtgttcaatcaacctaaagctaaagccaaggagctgggcatagagatctgtcttatgtacatagagattgagaaaggagaggctgttcaagaagagctcctgaaaggcttggacaataagaatcccaagatcatagtggcctgtatagagacactgaggaaagccttaagtgaatttggttccaaaatcatcttgcttaagccaattatcaaagtgttgccaaaactctttgagtctcgagagaaggctgttcgagatgaagccaaactaattgctgtggagatttacagatggattcgggatgctctgagacccccattacaaaatataaactctgttcagttgaaagaactagaagaagaatgggtcaaactgccaacaagtgctcctagacctactcgatttcttcgttcccaacaagaactagaagctaaattggaacaacaacagtctgctggtggagatgctgaaggaggtggtgatgatggtgatgaggtgccacaaatagatgcttatgagcttttagaagctgtagaaatcctttccaaacttcccaaagacttttatgacaaaattgaggcaaaaaaatggcaagagagaaaagaggccctggagtctgtagaagtactaataaaaaaccccaaactggaagctggcgattatgcagatttagtaaaagcattaaagaaggttgttggaaaggacaccaatgtcatgttggtggctttggcagcaaaatgtcttactggcctggctgttgggctaaggaagaaatttggacaatatgcaggacatgttgtgccaaccatcttggagaaattcaaagagaagaaacctcaagtggtacaagccctgcaggaggcaattgatgcaatcttccttactaccacactacagaacatcagtgaggatgttttagcagtaatggataataaaaatccaaccatcaagcagcagacatctctttttattgcaagaagtttccgccactgcactgcttctaccctgccaaagagcttgctaaagcccttttgtgctgcactacttaagcacatcaatgattctgctcctgaagtcagagatgccgcatttgaagcattgggtactgctttgaaggtggttggcgagaaagcagtaaacccattcctagctgatgtggacaaactcaagcttgataagatcaaagaatgttcagaaaaggtagaactgatacatggtaagaaagctggactagctgctgataagaaggaattcaaacctctgcctggaaggactgctgcttcaggggctgcaggagataaggacacaaaggacatttctgcacccaaaccaggacctctaaaaaaggcacctgctgctaaggctggtgggccaccaaaaaaggggaaaccagctgcaccaggaggcgcagggaatactggaaccaagaacaagaaaggactggagactaaagaaatagtggagcctgagctctcgatagaagtatgtgaagaaaaagcttcagctgttcttccccctacctgtatacagcttcttgacagcagtaactggaaagaaaggctggcttgtatggaagagttccagaaggctgttgagctaatggaccgaactgaaatgccatgccaggcattagtgaggatgctagccaagaaacctggatggaaagaaactaattttcaggtgatgcaaatgaagcttcatatagttgctttgattgcccagaagggaaatttttccaaaacgtcagctcaggttgtattagatggccttgtggacaagattggagatgtgaaatgtgggaacaatgcaaaagaagctatgacagcaatagccgaagcctgtatgttaccatggactgctgaacaggttgtgtcaatggctttctcacaaaagaatcccaaaaatcagtcagaaactctgaattggctatcaaatgccataaaagaatttggtttttctgggttgaatgtcaaagctttcattagcaatgtgaagacagctcttgctgcaacaaacccagctgtgaggactgctgccataaccctgcttggcgtgatgtatctgtatgttggtccctctttgcgaatgttctttgaggatgagaagcctgccctcctatcccagatagatgcagaatttgagaagatgcagggacaaagtccacctgctccaaccagaggaatttccaagcatagcacaagtggtacagatgaaggagaagatggagatgaaccagatgacgggagcaatgatgtcgttgatcttttgccgaggacggagatcagtgataaaatcacttcagagttggtatctaagattggtgataagaattggaagattaggaaagaaggcctagatgaagtggcaggtattattaatgacgcaaaatttatccaaccgaatataggtgaacttccaactgccttgaagggtcgactcaatgattcaaataaaatcttggtacagcaaacgctgaatatcctgcaacaactggcagtagccatgggcccaaatattaagcaacatgtaaaaaatttaggcatccctatcatcacagtccttggagacagcaagaacaatgttcgagctgctgccctagcgactgtgaatgcttgggcagaacagactggcatgaaggaatggctggaaggagaagatctttctgaagagctcaaaaaggaaaatcctttcttgaggcaagagcttctgggctggctggctgagaaactacctactcttcgttccacccctacagaccttatcctttgtgttcctcatctctactcctgcctagaagatcgaaatggagatgtgcgaaagaaggcccaagatgccttgccattcttcatgatgcatttaggatatgaaaaaatggccaaggctactgggaaactaaagccaacttctaaagatcaggtattggccatgctagagaaagccaaagttaacatgccagccaagcctgctccacccactaaagcaacttctaaaccaatgggagggtccgctccagccaaattccagcctgcatcagcacctgctgaagattgtatttccagcagtacagaacccaaacctgatccaaaaaaggccaaagctccaggattatcctctaaagcaaagagtgcacaagggaagaagatgccaagcaaaaccagcttaaaggaggatgaagacaaatccgggcctatttttattgttgttccaaatggaaaagagcaaaggatgaaagatgaaaaaggattgaaggtgctaaagtggaattttactaccccacgggatgaatacattgagcaactaaagactcaaatgtctagctgtgtggctaaatggttacaagatgagatgtttcactcagactttcagcatcataacaaagcccttgctgttatggttgatcacttggagagtgaaaaagaaggagttattggttgcctggatcttatcttaaagtggcttaccctgaggttttttgacaccaatacaagcgtcctgatgaaagcactagaatatttaaaattgctcttcaccttgctaagtgaagaagaatatcatcttactgagaatgaagcatcttccttcatcccctatcttgtcgtcaaggttggagaaccaaaggatgtcattcgtaaagatgttcgtgccatcctgaaccggatgtgccttgtctacccagctagcaagatgtttccctttatcatggaaggaaccaaatccaaaaactctaagcagagagcagagtgcctggaagagctgggatgtctggttgagtcctatggcatgaatgtttgccaaccaaccccaggaaaagccttaaaggaaatagctgttcacataggagaccgtgacaatgctgtacgcaatgctgcactcaacaccattgtaacggtgtacaatgtacatggggatcaggtgttcaaactgattggaaatctttctgaaaaggatatgagcatgctcgaggagaggattaagcggtcagcaaagagaccctctgctgcaccaataaaacaggtggaagagaaacctcagcgtgcacagaacataagctccaatgccaacatgttacgcaagggaccagctgaggacatgtcttccaaactcaaccaagcccgaagcatgagtgggcatcctgaggcagcccagatggtccgccgagaattccagctggatctagatgagattgagaatgacaatggtacagtccgatgtgaaatgccagaacttgttcagcacaaactggatgacatttttgagccagtccttattcctgaacccaagatccgggctgtttctccacacttcgatgacatgcacagtaatacagcatccacaatcaatttcattatctcccaagtagccagtggtgacatcaacacaagtatccaagctctgacacagctgtttcagatagagagccttgcccgggaggcctccactggagtactaaaagacctaatgcatggcctcatcaccttaatgctggattctcggattgaagatcttgaggaaggacaacaggtcatccgctctgtgaacctcttggtggtgaaggttctggagaagtcagaccagaccaacatcctgagtgccctacttgttttgctccaagacagcctgctagcaacagccagttctcccaaattctcagagcttgttatgaagtgtctctggagaatggttcgactgttgcctgataccatcaatagcattaacctagacagaattcttctggatatccacattttcatgaaggtcttccccaaagagaaactgaagcaatgcaaaagtgaatttcccataaggaccctaaagaccctgctacacaccttatgcaaattaaaagggcccaagatcctggaccacctaacgatgatcgacaacaaaaacgagtctgagctggaggcccatctctgccggatgatgaagcacagtatggaccagactgggagcaagtctgataaggaaacagaaaagggagcatctcgaatagatgaaaaatcatcaaaggccaaagtgaatgatttcttagctgagatttttaagaagattggctctaaagaaaacactaaagagggactagcagagttatatgaatataagaagaaatactcagatgctgacattgaaccatttctgaaaaattcctcacagttcttccagagctatgtcgaaagaggccttcgggtgattgagatggagagggagggcaaaggtcgtatttccacttcaacaggcatctcccctcagatggaagtcacatgtgtgcccacgcccacaagcacagtgtcctccataggtaacacaaatggggaagaagtggggccatctgtctacttggaaaggctaaagatcctccgacagcgatgtggtctggacaacacaaagcaagatgaccgacctcctttgacctctttgctctccaaaccagcagttcctactgtcgcctcttccacagacatgctccacagcaaactctctcagctccgggagtcacgggagcagcaccagcattcagacctggattctaaccagactcactcttcaggaactgtgacctcctcctcctccacagctaacatagacgacttgaaaaaaagactggagagaataaagagcagtcgcaaatgaagctgccccactcccccggcaccctgcagctttagtttactaaactagaagtcctcatagtttaaaatggcctcagcaggcctagtgtatacaaactggttgtatgtatcatgccgtggagctagggggaggagtcattgtggcacaagtatttgtacatactctgcttctctctgtcagcgtcctgctgctctagaagactgtccgtggatgagtttagtgtacagacttgtaaacagctgccccctctctgctcagtctagttcccagatccttttcttttctttttaattgctcatttgtaaaattgtcctaatctttcctagctttttaatagttaatattagaaactctttaatagttttcctttcagtttgtgagctcttctctgtcgccctgaagggtcactgtattctgtatgaatgcatggcatgatacaactaatttaagagtcttttataaataaagtttgcattaactatacctg

SEQ ID NO: 7567 - DNA, 6428 bp, Homo sapiens
  source 1..6428: mol_type = unassigned DNA
aattctaaggaaaacctggaagcacaatgggagatgacagtgagtggttgaaactgccagttgatcagaaatgtgaacacaagctgtggaaagcaaggttaagtgggtatgaagaggccctgaagatcttccagaaaataaaggatgaaaagagcccagagtggtccaaatttttaggattgatcaaaaaatttgtcactgattccaatgcagtggttcaattgaaaggattagaagctgcacttgtttatgttgaaaatgcccatgtagcaggaaaaaccacaggagaagttgtgtcaggtgttgtaagtaaggtgttcaatcaacctaaagctaaagccaaggagctgggcatagagatctgtcttatgtacatagagattgagaaaggagaggctgttcaagaagagctcctgaaaggcttggacaataagaatcccaagatcatagtggcctgtatagagacactgaggaaagccttaagtgaatttggttccaaaatcatcttgcttaagccaattatcaaagtgttgccaaaactctttgagtctcgagagaaggctgttcgagatgaagccaaactaattgctgtggagatttacagatggattcgggatgctctgagacccccattacaaaatataaactctgttcagttgaaagaactagaagaagaatgggtcaaactgccaacaagtgctcctagacctactcgatttcttcgttcccaacaagaactagaagctaaattggaacaacaacagtctgctggtggagatgctgaaggaggtggtgatgatggtgatgaggtgccacaaatagatgcttatgagcttttagaagctgtagaaatcctttccaaacttcccaaagacttttatgacaaaattgaggcaaaaaaatggcaagagagaaaagaggccctggagtctgtagaagtactaataaaaaaccccaaactggaagctggcgattatgcagatttagtaaaagcattaaagaaggttgttggaaaggacaccaatgtcatgttggtggctttggcagcaaaatgtcttactggcctggctgttgggctaaggaagaaatttggacaatatgcaggacatgttgtgccaaccatcttggagaaattcaaagagaagaaacctcaagtggtacaagccctgcaggaggcaattgatgcaatcttccttactaccacactacagaacatcagtgaggatgttttagcagtaatggataataaaaatccaaccatcaagcagcagacatctctttttattgcaagaagtttccgccactgcactgcttctaccctgccaaagagcttgctaaagcccttttgtgctgcactacttaagcacatcaatgattctgctcctgaagtcagagatgccgcatttgaagcattgggtactgctttgaaggtggttggcgagaaagcagtaaacccattcctagctgatgtggacaaactcaagcttgataagatcaaagaatgttcagaaaaggtagaactgatacatggtaagaaagctggactagctgctgataagaaggaattcaaacctctgcctggaaggactgctgcttcaggggctgcaggagataaggacacaaaggacatttctgcacccaaaccaggacctctaaaaaaggcacctgctgctaaggctggtgggccaccaaaaaaggggaaaccagctgcaccaggaggcgcagggaatactggaaccaagaacaagaaaggactggagactaaagaaatagtggagcctgagctctcgatagaagtatgtgaagaaaaagcttcagctgttcttccccctacctgtatacagcttcttgacagcagtaactggaaagaaaggctggcttgtatggaagagttccagaaggctgttgagctaatggaccgaactgaaatgccatgccaggcattagtgaggatgctagccaagaaacctggatggaaagaaactaattttcaggtgatgcaaatgaagcttcatatagttgctttgattgcccagaagggaaatttttccaaaacgtcagctcaggttgtattagatggccttgtggacaagattggagatgtgaaatgtgggaacaatgcaaaagaagctatgacagcaatagccgaagcctgtatgttaccatggactgctgaacaggttgtgtcaatggctttctcacaaaagaatcccaaaaatcagtcagaaactctgaattggctatcaaatgccataaaagaatttggtttttctgggttgaatgtcaaagctttcattagcaatgtgaagacagctcttgctgcaacaaacccagctgtgaggactgctgccataaccctgcttggcgtgatgtatctgtatgttggtccctctttgcgaatgttctttgaggatgagaagcctgccctcctatcccagatagatgcagaatttgagaagatgcagggacaaagtccacctgctccaaccagaggaatttccaagcatagcacaagtggtacagatgaaggagaagatggagatgaaccagatgacgggagcaatgatgtcgttgatcttttgccgaggacggagatcagtgataaaatcacttcagagttggtatctaagattggtgataagaattggaagattaggaaagaaggcctagatgaagtggcaggtattattaatgacgcaaaatttatccaaccgaatataggtgaacttccaactgccttgaagggtcgactcaatgattcaaataaaatcttggtacagcaaacgctgaatatcctgcaacaactggcagtagccatgggcccaaatattaagcaacatgtaaaaaatttaggcatccctatcatcacagtccttggagacagcaagaacaatgttcgagctgctgccctagcgactgtgaatgcttgggcagaacagactggcatgaaggaatggctggaaggagaagatctttctgaagagctcaaaaaggaaaatcctttcttgaggcaagagcttctgggctggctggctgagaaactacctactcttcgttccacccctacagaccttatcctttgtgttcctcatctctactcctgcctagaagatcgaaatggagatgtgcgaaagaaggcccaagatgccttgccattcttcatgatgcatttaggatatgaaaaaatggccaaggctactgggaaactaaagccaacttctaaagatcaggtattggccatgctagagaaagccaaagttaacatgccagccaagcctgctccacccactaaagcaacttctaaaccaatgggagggtccgctccagccaaattccagcctgcatcagcacctgctgaagattgtatttccagcagtacagaacccaaacctgatccaaaaaaggccaaagctccaggattatcctctaaagcaaagagtgcacaagggaagaagatgccaagcaaaaccagcttaaaggaggatgaagacaaatccgggcctatttttattgttgttccaaatggaaaagagcaaaggatgaaagatgaaaaaggattgaaggtgctaaagtggaattttactaccccacgggatgaatacattgagcaactaaagactcaaatgtctagctgtgtggctaaatggttacaagatgagatgtttcactcagactttcagcatcataacaaagcccttgctgttatggttgatcacttggagagtgaaaaagaaggagttattggttgcctggatcttatcttaaagtggcttaccctgaggttttttgacaccaatacaagcgtcctgatgaaagcactagaatatttaaaattgctcttcaccttgctaagtgaagaagaatatcatcttactgagaatgaagcatcttccttcatcccctatcttgtcgtcaaggttggagaaccaaaggatgtcattcgtaaagatgttcgtgccatcctgaaccggatgtgccttgtctacccagctagcaagatgtttccctttatcatggaaggaaccaaatccaaaaactctaagcagagagcagagtgcctggaagagctgggatgtctggttgagtcctatggcatgaatgtttgccaaccaaccccaggaaaagccttaaaggaaatagctgttcacataggagaccgtgacaatgctgtacgcaatgctgcactcaacaccattgtaacggtgtacaatgtacatggggatcaggtgttcaaactgattggaaatctttctgaaaaggatatgagcatgctcgaggagaggattaagcggtcagcaaagagaccctctgctgcaccaataaaacaggtggaagagaaacctcagcgtgcacagaacataagctccaatgccaacatgttacgcaagggaccagctgaggacatgtcttccaaactcaaccaagcccgaagcatgagtgggcatcctgaggcagcccagatggtccgccgagaattccagctggatctagatgagattgagaatgacaatggtacagtccgatgtgaaatgccagaacttgttcagcacaaactggatgacatttttgagccagtccttattcctgaacccaagatccgggctgtttctccacacttcgatgacatgcacagtaatacagcatccacaatcaatttcattatctcccaagtagccagtggtgacatcaacacaagtatccaagctctgacacagctgtttcagatagagagccttgcccgggaggcctccactggagtactaaaagacctaatgcatggcctcatcaccttaatgctggattctcggattgaagatcttgaggaaggacaacaggtcatccgctctgtgaacctcttggtggtgaaggttctggagaagtcagaccagaccaacatcctgagtgccctacttgttttgctccaagacagcctgctagcaacagccagttctcccaaattctcagagcttgttatgaagtgtctctggagaatggttcgactgttgcctgataccatcaatagcattaacctagacagaattcttctggatatccacattttcatgaaggtcttccccaaagagaaactgaagcaatgcaaaagtgaatttcccataaggaccctaaagaccctgctacacaccttatgcaaattaaaagggcccaagatcctggaccacctaacgatgatcgacaacaaaaacgagtctgagctggaggcccatctctgccggatgatgaagcacagtatggaccagactgggagcaagtctgataaggaaacagaaaagggagcatctcgaatagatgaaaaatcatcaaaggccaaagtgaatgatttcttagctgagatttttaagaagattggctctaaagaaaacactaaagagggactagcagagttatatgaatataagaagaaatactcagatgctgacattgaaccatttctgaaaaattcctcacagttcttccagagctatgtcgaaagaggccttcgggtgattgagatggagagggagggcaaaggtcgtatttccacttcaacaggcatctcccctcagatggaagtcacatgtgtgcccacgcccacaagcacagtgtcctccataggtaacacaaatggggaagaagtggggccatctgtctacttggaaaggctaaagatcctccgacagcgatgtggtctggacaacacaaagcaagatgaccgacctcctttgacctctttgctctccaaaccagcagttcctactgtcgcctcttccacagacatgctccacagcaaactctctcagctccgggagtcacgggagcagcaccagcattcagacctggattctaaccagactcactcttcaggaactgtgacctcctcctcctccacagctaacatagacgacttgaaaaaaagactggagagaataaagagcagtcgcaaatgaagctgccccactcccccggcaccctgcagctttagtttactaaactagaagtcctcatagtttaaaatggcctcagcaggcctagtgtatacaaactggttgtatgtatcatgccgtggagctagggggaggagtcattgtggcacaagtatttgtacatactctgcttctctctgtcagcgtcctgctgctctagaagactgtccgtggatgagtttagtgtacagacttgtaaacagctgccccctctctgctcagtctagttcccagatccttttcttttctttttaattgctcatttgtaaaattgtcctaatctttcctagctttttaatagttaatattagaaactctttaatagttttcctttcagtttgtgagctcttctctgtcgccctgaagggtcactgtattctgtatgaatgcatggcatgatacaactaatttaagagtcttttataaataaagtttgcattaactata

SEQ ID NO: 7568 - DNA, 6692 bp, Homo sapiens
  source 1..6692: mol_type = unassigned DNA
actgcggggtgtgcggcggcccaagcggtttcaaacggcttagagcaggccgcttggttctgacccagctgaggaaatactcttaattctaaggaaaacctggaagcacaatgggagatgacagtgagtggttgaaactgccagttgatcagaaatgtgaacacaagctgtggaaagcaaggttaagtgggtatgaagaggccctgaagatcttccagaaaataaaggatgaaaagagcccagagtggtccaaatttttaggattgatcaaaaaatttgtcactgattccaatgcagtggttcaattgaaaggattagaagctgcacttgtttatgttgaaaatgcccatgtagcaggaaaaaccacaggagaagttgtgtcaggtgttgtaagtaaggtgttcaatcaacctaaagctaaagccaaggagctgggcatagagatctgtcttatgtacatagagattgagaaaggagaggctgttcaagaagagctcctgaaaggcttggacaataagaatcccaagatcatagtggcctgtatagagacactgaggaaagccttaagtgaatttggttccaaaatcatcttgcttaagccaattatcaaagtgttgccaaaactctttgagtctcgagagaaggctgttcgagatgaagccaaactaattgctgtggagatttacagatggattcgggatgctctgagacccccattacaaaatataaactctgttcagttgaaagaactagaagaagaatgggtcaaactgccaacaagtgctcctagacctactcgatttcttcgttcccaacaagaactagaagctaaattggaacaacaacagtctgctggtggagatgctgaaggaggtggtgatgatggtgatgaggtgccacaaatagatgcttatgagcttttagaagctgtagaaatcctttccaaaccaaagacttttatgacaaaattgaggcaaaaaaatggcaagagagaaaagaggccctggagtctgtagaagtactaataaaaaaccccaaactggaagctggcgattatgcagatttagtaaaagcattaaagaaggttgttggaaaggacaccaatgtcatgttggtggctttggcagcaaaatgtcttactggcctggctgttgggctaaggaagaaatttggacaatatgcaggacatgttgtgccaaccatcttggagaaattcaaagagaagaaacctcaagtggtacaagccctgcaggaggcaattgatgcaatcttccttactaccacactacagaacatcagtgaggatgttttagcagtaatggataataaaaatccaaccatcaagcagcagacatctctttttattgcaagaagtttccgccactgcactgcttctaccctgccaaagagcttgctaaagcccttttgtgctgcactacttaagcacatcaatgattctgctcctgaagtcagagatgccgcatttgaagcattgggtactgctttgaaggtggttggcgagaaagcagtaaacccattcctagctgatgtggacaaactcaagcttgataagatcaaagaatgttcagaaaaggtagaactgatacatggtaagaaagctggactagctgctgataagaaggaattcaaacctctgcctggaaggactgctgcttcaggggctgcaggagataaggacacaaaggacatttctgcacccaaaccaggacctctaaaaaaggcacctgctgctaaggctggtgggccaccaaaaaaggggaaaccagctgcaccaggaggcgcagggaatactggaaccaagaacaagaaaggactggagactaaagaaatagtggagcctgagctctcgatagaagtatgtgaagaaaaagcttcagctgttcttccccctacctgtatacagcttcttgacagcagtaactggaaagaaaggctggcttgtatggaagagttccagaaggctgttgagctaatggaccgaactgaaatgccatgccaggcattagtgaggatgctagccaagaaacctggatggaaagaaactaattttcaggtgatgcaaatgaagcttcatatagttgctttgattgcccagaagggaaatttttccaaaacgtcagctcaggttgtattagatggccttgtggacaagattggagatgtgaaatgtgggaacaatgcaaaagaagctatgacagcaatagccgaagcctgtatgttaccatggactgctgaacaggttgtgtcaatggctttctcacaaaagaatcccaaaaatcagtcagaaactctgaattggctatcaaatgccataaaagaatttggtttttctgggttgaatgtcaaagctttcattagcaatgtgaagacagctcttgctgcaacaaacccagctgtgaggactgctgccataaccctgcttggcgtgatgtatctgtatgttggtccctctttgcgaatgttctttgaggatgagaagcctgccctcctatcccagatagatgcagaatttgagaagatgcagggacaaagtccacctgctccaaccagaggaatttccaagcatagcacaagtggtacagatgaaggagaagatggagatgaaccagatgacgggagcaatgatgtcgttgatcttttgccgaggacggagatcagtgataaaatcacttcagagttggtatctaagattggtgataagaattggaagattaggaaagaaggcctagatgaagtggcaggtattattaatgacgcaaaatttatccaaccgaatataggtgaacttccaactgccttgaagggtcgactcaatgattcaaataaaatcttggtacagcaaacgctgaatatcctgcaacaactggcagtagccatgggcccaaatattaagcaacatgtaaaaaatttaggcatccctatcatcacagtccttggagacagcaagaacaatgttcgagctgctgccctagcgactgtgaatgcttgggcagaacagactggcatgaaggaatggctggaaggagaagatctttctgaagagctcaaaaaggaaaatcctttcttgaggcaagagcttctgggctggctggctgagaaactacctactcttcgttccacccctacagaccttatcctttgtgttcctcatctctactcctgcctagaagatcgaaatggagatgtgcgaaagaaggcccaagatgccttgccattcttcatgatgcatttaggatatgaaaaaatggccaaggctactgggaaactaaagccaacttctaaagatcaggtattggccatgctagagaaagccaaagttaacatgccagccaagcctgctccacccactaaagcaacttctaaaccaatgggagggtccgctccagccaaattccagcctgcatcagcacctgctgaagattgtatttccagcagtacagaacccaaacctgatccaaaaaaggccaaagctccaggattatcctctaaagcaaagagtgcacaagggaagaagatgccaagcaaaaccagcttaaaggaggatgaagacaaatccgggcctatttttattgttgttccaaatggaaaagagcaaaggatgaaagatgaaaaaggattgaaggtgctaaagtggaattttactaccccacgggatgaatacattgagcaactaaagactcaaatgtctagctgtgtggctaaatggttacaagatgagatgtttcactcagactttcagcatcataacaaagcccttgctgttatggttgatcacttggagagtgaaaaagaaggagttattggttgcctggatcttatcttaaagtggcttaccctgaggttttttgacaccaatacaagcgtcctgatgaaagcactagaatatttaaaattgctcttcaccttgctaagtgaagaagaatatcatcttactgagaatgaagcatcttccttcatcccctatcttgtcgtcaaggttggagaaccaaaggatgtcattcgtaaagatgttcgtgccatcctgaaccggatgtgccttgtctacccagctagcaagatgtttccctttatcatggaaggaaccaaatccaaaaactctaagcagagagcagagtgcctggaagagctgggatgtctggttgagtcctatggcatgaatgtttgccaaccaaccccaggaaaagccttaaaggaaatagctgttcacataggagaccgtgacaatgctgtacgcaatgctgcactcaacaccattgtaacggtgtacaatgtacatggggatcaggtgttcaaactgattggaaatctttctgaaaaggatatgagcatgctcgaggagaggattaagcggtcagcaaagagaccctctgctgcaccaataaaacaggtggaagagaaacctcagcgtgcacagaacataagctccaatgccaacatgttacgcaagggaccagctgaggacatgtcttccaaactcaaccaagcccgaagcatgagtgggcatcctgaggcagcccagatggtccgccgagaattccagctggatctagatgagattgagaatgacaatggtacagtccgatgtgaaatgccagaacttgttcagcacaaactggatgacatttttgagccagtccttattcctgaacccaagatccgggctgtttctccacacttcgatgacatgcacagtaatacagcatccacaatcaatttcattatctcccaagtagccagtggtgacatcaacacaagtatccaagctctgacacagatcgatgaggtcctgagacaggaagacaaagctgaagccatgtccggccatattgatcagtttctgatagccacttttatgcagctaagactcatctacaacacacacatggcagatgagaaattggagaaggacgagatcatcaagttgtatagctgtatcattggcaacatgatttcgctgtttcagatagagagccttgcccgggaggcctccactggagtactaaaagacctaatgcatggcctcatcaccttaatgctggattctcggattgaagatcttgaggaaggacaacaggtcatccgctctgtgaacctcttggtggtgaaggttctggagaagtcagaccagaccaacatcctgagtgccctacttgttttgctccaagacagcctgctagcaacagccagttctcccaaattctcagagcttgttatgaagtgtctctggagaatggttcgactgttgcctgataccatcaatagcattaacctagacagaattcttctggatatccacattttcatgaaggtcttccccaaagagaaactgaagcaatgcaaaagtgaatttcccataaggaccctaaagaccctgctacacaccttatgcaaattaaaagggcccaagatcctggaccacctaacgatgatcgacaacaaaaacgagtctgagctggaggcccatctctgccggatgatgaagcacagtatggaccagactgggagcaagtctgataaggaaacagaaaagggagcatctcgaatagatgaaaaatcatcaaaggccaaagtgaatgatttcttagctgagatttttaagaagattggctctaaagaaaacactaaagagggactagcagagttatatgaatataagaagaaatactcagatgctgacattgaaccatttctgaaaaattcctcacagttcttccagagctatgtcgaaagaggccttcgggtgattgagatggagagggagggcaaaggtcgtatttccacttcaacaggcatctcccctcagatggaagtcacatgtgtgcccacgcccacaagcacagtgtcctccataggtaacacaaatggggaagaagtggggccatctgtctacttggaaaggctaaagatcctccgacagcgatgtggtctggacaacacaaagcaagatgaccgacctcctttgacctctttgctctccaaaccagcagttcctactgtcgcctcttccacagacatgctccacagcaaactctctcagctccgggagtcacgggagcagcaccagcattcagacctggattctaaccagactcactcttcaggaactgtgacctcctcctcctccacagctaacatagacgacttgaaaaaaagactggagagaataaagagcagtcgcaaatgaagctgccccactcccccggcaccctgcagctttagtttactaaactagaagtcctcatagtttaaaatggcctcagcaggcctagtgtatacaaactggttgtatgtatcatgccgtggagctagggggaggagtcattgtggcacaagtatttgtacatactctgcttctctctgtcagcgtcctgctgctctagaagactgtccgtggatgagtttagtgtacagacttgtaaacagctgccccctctctgctcagtctagttcccagatccttttcttttctttttaattgctcatttgtaaaattgtcctaatctttcctagctttttaatagttaatattagaaactctttaatagttttcctttcagtttgtgagctcttctctgtcgccctgaagggtcactgtattctgtatgaatgcatggcatgatacaactaatttaagagtcttttataaataaagtttgcattaactatacctg

SEQ ID NO: 7569 - DNA, 6717 bp, Homo sapiens
  source 1..6717: mol_type = unassigned DNA
actgcggggtgtgcggcggcccaagcggtttcaaacggcttagagcaggccgcttggttctgacccagctgaggaaatactcttaattctaaggaaaacctggaagcacaatgggagatgacagtgagtggttgaaactgccagttgatcagaaatgtgaacacaagctgtggaaagcaaggttaagtgggtatgaagaggccctgaagatcttccagaaaataaaggatgaaaagagcccagagtggtccaaatttttaggattgatcaaaaaatttgtcactgattccaatgcagtggttcaattgaaaggattagaagctgcacttgtttatgttgaaaatgcccatgtagcaggaaaaaccacaggagaagttgtgtcaggtgttgtaagtaaggtgttcaatcaacctaaagctaaagccaaggagctgggcatagagatctgtcttatgtacatagagattgagaaaggagaggctgttcaagaagagctcctgaaaggcttggacaataagaatcccaagatcatagtggcctgtatagagacactgaggaaagccttaagtgaatttggttccaaaatcatcttgcttaagccaattatcaaagtgttgccaaaactctttgagtctcgagagaaggctgttcgagatgaagccaaactaattgctgtggagatttacagatggattcgggatgctctgagacccccattacaaaatataaactctgttcagttgaaagaactagaagaagaatgggtcaaactgccaacaagtgctcctagacctactcgatttcttcgttcccaacaagaactagaagctaaattggaacaacaacagtctgctggtggagatgctgaaggaggtggtgatgatggtgatgaggtgccacaaatagatgcttatgagcttttagaagctgtagaaatcctttccaaacttcccaaagacttttatgacaaaattgaggcaaaaaaatggcaagagagaaaagaggccctggagtctgtagaagtactaataaaaaaccccaaactggaagctggcgattatgcagatttagtaaaagcattaaagaaggttgttggaaaggacaccaatgtcatgttggtggctttggcagcaaaatgtcttactggcctggctgttgggctaaggaagaaatttggacaatatgcaggacatgttgtgccaaccatcttggagaaattcaaagagaagaaacctcaagtggtacaagccctgcaggaggcaattgatgcaatcttccttactaccacactacagaacatcagtgaggatgttttagcagtaatggataataaaaatccaaccatcaagcagcagacatctctttttattgcaagaagtttccgccactgcactgcttctaccctgccaaagagcttgctaaagcccttttgtgctgcactacttaagcacatcaatgattctgctcctgaagtcagagatgccgcatttgaagcattgggtactgctttgaaggtggttggcgagaaagcagtaaacccattcctagctgatgtggacaaactcaagcttgataagatcaaagaatgttcagaaaaggtagaactgatacatggtaagaaagctggactagctgctgataagaaggaattcaaacctctgcctggaaggactgctgcttcaggggctgcaggagataaggacacaaaggacatttctgcacccaaaccaggacctctaaaaaaggcacctgctgctaaggctggtgggccaccaaaaaaggggaaaccagctgcaccaggaggcgcagggaatactggaaccaagaacaagaaaggactggagactaaagaaatagtggagcctgagctctcgatagaagtatgtgaagaaaaagcttcagctgttcttccccctacctgtatacagcttcttgacagcagtaactggaaagaaaggctggcttgtatggaagagttccagaaggctgttgagctaatggaccgaactgaaatgccatgccaggcattagtgaggatgctagccaagaaacctggatggaaagaaactaattttcaggtgatgcaaatgaagcttcatatagttgctttgattgcccagaagggaaatttttccaaaacgtcagctcaggttgtattagatggccttgtggacaagattggagatgtgaaatgtgggaacaatgcaaaagaagctatgacagcaatagccgaagcctgtatgttaccatggactgctgaacaggttgtgtcaatggctttctcacaaaagaatcccaaaaatcagtcagaaactctgaattggctatcaaatgccataaaagaatttggtttttctgggttgaatgtcaaagctttcattagcaatgtgaagacagctcttgctgcaacaaacccagctgtgaggactgctgccataaccctgcttggcgtgatgtatctgtatgttggtccctctttgcgaatgttctttgaggatgagaagcctgccctcctatcccagatagatgcagaatttgagaagatgcagggacaaagtccacctgctccaaccagaggaatttccaagcatagcacaagtggtacagatgaaggagaagatggagatgaaccagatgacgggagcaatgatgtcgttgatcttttgccgaggacggagatcagtgataaaatcacttcagagttggtatctaagattggtgataagaattggaagattaggaaagaaggcctagatgaagtggcaggtattattaatgacgcaaaatttatccaaccgaatataggtgaacttccaactgccttgaagggtcgactcaatgattcaaataaaatcttggtacagcaaacgctgaatatcctgcaacaactggcagtagccatgggcccaaatattaagcaacatgtaaaaaatttaggcatccctatcatcacagtccttggagacagcaagaacaatgttcgagctgctgccctagcgactgtgaatgcttgggcagaacagactggcatgaaggaatggctggaaggagaagatctttctgaagagctcaaaaaggaaaatcctttcttgaggcaagagcttctgggctggctggctgagaaactacctactcttcgttccacccctacagaccttatcctttgtgttcctcatctctactcctgcctagaagatcgaaatggagatgtgcgaaagaaggcccaagatgccttgccattcttcatgatgcatttaggatatgaaaaaatggccaaggctactgggaaactaaagccaacttctaaagatcaggtattggccatgctagagaaagccaaagttaacatgccagccaagcctgctccacccactaaagcaacttctaaaccaatgggagggtccgctccagccaaattccagcctgcatcagcacctgctgaagattgtatttccagcagtacagaacccaaacctgatccaaaaaaggccaaagctccaggattatcctctaaagcaaagagtgcacaagggaagaagatgccaagcaaaaccagcttaaaggaggatgaagacaaatccgggcctatttttattgttgttccaaatggaaaagagcaaaggatgaaagatgaaaaaggattgaaggtgctaaagtggaattttactaccccacgggatgaatacattgagcaactaaagactcaaatgtctagctgtgtggctaaatggttacaagatgagatgtttcactcagactttcagcatcataacaaagcccttgctgttatggttgatcacttggagagtgaaaaagaaggagttattggttgcctggatcttatcttaaagtggcttaccctgaggttttttgacaccaatacaagcgtcctgatgaaagcactagaatatttaaaattgctcttcaccttgctaagtgaagaagaatatcatcttactgagaatgaagcatcttccttcatcccctatcttgtcgtcaaggttggagaaccaaaggatgtcattcgtaaagatgttcgtgccatcctgaaccggatgtgccttgtctacccagctagcaagatgtttccctttatcatggaaggaaccaaatccaaaaactctaagcagagagcagagtgcctggaagagctgggatgtctggttgagtcctatggcatgaatgtttgccaaccaaccccaggaaaagccttaaaggaaatagctgttcacataggagaccgtgacaatgctgtacgcaatgctgcactcaacaccattgtaacggtgtacaatgtacatggggatcaggtgttcaaactgattggaaatctttctgaaaaggatatgagcatgctcgaggagaggattaagcggtcagcaaagagaccctctgctgcaccaataaaacaggtggaagagaaacctcagcgtgcacagaacataagctccaatgccaacatgttacgcaagggaccagctgaggacatgtcttccaaactcaaccaagcccgaagcatgagtgggcatcctgaggcagcccagatggtccgccgagaattccagctggatctagatgagattgagaatgacaatggtacagtccgatgtgaaatgccagaacttgttcagcacaaactggatgacatttttgagccagtccttattcctgaacccaagatccgggctgtttctccacacttcgatgacatgcacagtaatacagcatccacaatcaatttcattatctcccaagtagccagtggtgacatcaacacaagtatccaagctctgacacagatcgatgaggtcctgagacaggaagacaaagctgaagccatgtccggccatattgatcagtttctgatagccacttttatgcagctaagactcatctacaacacacacatggcagatgagaaattggagaaggacgagatcatcaagttgtatagctgtatcattggcaacatgatttcgctgtttcagatagagagccttgcccgggaggcctccactggagtactaaaagacctaatgcatggcctcatcaccttaatgctggattctcggattgaagatcttgaggaaggacaacaggtcatccgctctgtgaacctcttggtggtgaaggttctggagaagtcagaccagaccaacatcctgagtgccctacttgttttgctccaagacagcctgctagcaacagccagttctcccaaattctcagagcttgttatgaagtgtctctggagaatggttcgactgttgcctgataccatcaatagcattaacctagacagaattcttctggatatccacattttcatgaaggtcttccccaaagagaaactgaagcaatgcaaaagtgaatttcccataaggaccctaaagaccctgctacacaccttatgcaaattaaaagggcccaagtcatgcatgtgtctccctcagatcctggaccacctaacgatgatcgacaacaaaaacgagtctgagctggaggcccatctctgccggatgatgaagcacagtatggaccagactgggagcaagtctgataaggaaacagaaaagggagcatctcgaatagatgaaaaatcatcaaaggccaaagtgaatgatttcttagctgagatttttaagaagattggctctaaagaaaacactaaagagggactagcagagttatatgaatataagaagaaatactcagatgctgacattgaaccatttctgaaaaattcctcacagttcttccagagctatgtcgaaagaggccttcgggtgattgagatggagagggagggcaaaggtcgtatttccacttcaacaggcatctcccctcagatggaagtcacatgtgtgcccacgcccacaagcacagtgtcctccataggtaacacaaatggggaagaagtggggccatctgtctacttggaaaggctaaagatcctccgacagcgatgtggtctggacaacacaaagcaagatgaccgacctcctttgacctctttgctctccaaaccagcagttcctactgtcgcctcttccacagacatgctccacagcaaactctctcagctccgggagtcacgggagcagcaccagcattcagacctggattctaaccagactcactcttcaggaactgtgacctcctcctcctccacagctaacatagacgacttgaaaaaaagactggagagaataaagagcagtcgcaaatgaagctgccccactcccccggcaccctgcagctttagtttactaaactagaagtcctcatagtttaaaatggcctcagcaggcctagtgtatacaaactggttgtatgtatcatgccgtggagctagggggaggagtcattgtggcacaagtatttgtacatactctgcttctctctgtcagcgtcctgctgctctagaagactgtccgtggatgagtttagtgtacagacttgtaaacagctgccccctctctgctcagtctagttcccagatccttttcttttctttttaattgctcatttgtaaaattgtcctaatctttcctagctttttaatagttaatattagaaactctttaatagttttcctttcagtttgtgagctcttctctgtcgccctgaagggtcactgtattctgtatgaatgcatggcatgatacaactaatttaagagtcttttataaataaagtttgcattaactatacctg

SEQ ID NO: 7570 - DNA, 582 bp, Homo sapiens
  source 1..582: mol_type = unassigned DNA
aatgctgctgccgccgccgccgccgcctgccgggtattcctgctgatcctgctcggaccttagcttccctgacctctccctgcccggggagcgaaatactcttaattctaaggaaaacctggaagcacaatgggagatgacagtgagtggttgaaactgccagttgatcagaaatgtgaacacaagctgtggaaagcaaggttaagtgggtatgaagaggccctgaagatcttccagaaaataaaggatgaaaagagcccagagtggtccaaatttttaggattgatcaaaaaatttgtcactgattccaatgcagtggttcaattgaaaggattagaagctgcacttgtttatgttgaaaatgcccatgtagcaggaaaaaccacaggagaagttgtgtcaggtgttgtaagtaaggtgttcaatcaacctaaagctaaagccaaggagctgggcatagagatctgtcttatgtacatagagattgagaaaggagaggctgttcaagaagagctcctgaaaggcttggacaataagaatcccaagatcatagtggcctgtatagagacactgaggaaagcc

SEQ ID NO: 7571 - DNA, 7121 bp, Homo sapiens
  source 1..7121: mol_type = unassigned DNA
cccagctgaggaaatactcttaattctaaggaaaacctggaagcacaatgggagatgacagtgagtggttgaaactgccagttgatcagaaatgtgaacacaagctgtggaaagcaaggttaagtgggtatgaagaggccctgaagatcttccagaaaataaaggatgaaaagagcccagagtggtccaaatttttaggattgatcaaaaaatttgtcactgattccaatgcagtggttcaattgaaaggattagaagctgcacttgtttatgttgaaaatgcccatgtagcaggaaaaaccacaggagaagttgtgtcaggtgttgtaagtaaggtgttcaatcaacctaaagctaaagccaaggagctgggcatagagatctgtcttatgtacatagagattgagaaaggagaggctgttcaagaagagctcctgaaaggcttggacaataagaatcccaagatcatagtggcctgtatagagacactgaggaaagccttaagtgaatttggttccaaaatcatcttgcttaagccaattatcaaagtgttgccaaaactctttgagtctcgagagaaggctgttcgagatgaagccaaactaattgctgtggagatttacagatggattcgggatgctctgagacccccattacaaaatataaactctgttcagttgaaagaactagaagaagaatgggtcaaactgccaacaagtgctcctagacctactcgatttcttcgttcccaacaagaactagaagctaaattggaacaacaacagtctgctggtggagatgctgaaggaggtggtgatgatggtgatgaggtgccacaaatagatgcttatgagcttttagaagctgtagaaatcctttccaaacttcccaaagacttttatgacaaaattgaggcaaaaaaatggcaagagagaaaagaggccctggagtctgtagaagtactaataaaaaaccccaaactggaagctggcgattatgcagatttagtaaaagcattaaagaaggttgttggaaaggacaccaatgtcatgttggtggctttggcagcaaaatgtcttactggcctggctgttgggctaaggaagaaatttggacaatatgcaggacatgttgtgccaaccatcttggagaaattcaaagagaagaaacctcaagtggtacaagccctgcaggaggcaattgatgcaatcttccttactaccacactacagaacatcagtgaggatgttttagcagtaatggataataaaaatccaaccatcaagcagcagacatctctttttattgcaagaagtttccgccactgcactgcttctaccctgccaaagagcttgctaaagcccttttgtgctgcactacttaagcacatcaatgattctgctcctgaagtcagagatgccgcatttgaagcattgggtactgctttgaaggtggttggcgagaaagcagtaaacccattcctagctgatgtggacaaactcaagcttgataagatcaaagaatgttcagaaaaggtagaactgatacatggtaagaaagctggactagctgctgataagaaggaattcaaacctctgcctggaaggactgctgcttcaggggctgcaggagataaggacacaaaggacatttctgcacccaaaccaggacctctaaaaaaggcacctgctgctaaggctggtgggccaccaaaaaaggggaaaccagctgcaccaggaggcgcagggaatactggaaccaagaacaagaaaggactggagactaaagaaatagtggagcctgagctctcgatagaagtatgtgaagaaaaagcttcagctgttcttccccctacctgtatacagcttcttgacagcagtaactggaaagaaaggctggcttgtatggaagagttccagaaggctgttgagctaatggaccgaactgaaatgccatgccaggcattagtgaggatgctagccaagaaacctggatggaaagaaactaattttcaggtgatgcaaatgaagcttcatatagttgctttgattgcccagaagggaaatttttccaaaacgtcagctcaggttgtattagatggccttgtggacaagattggagatgtgaaatgtgggaacaatgcaaaagaagctatgacagcaatagccgaagcctgtatgttaccatggactgctgaacaggttgtgtcaatggctttctcacaaaagaatcccaaaaatcagtcagaaactctgaattggctatcaaatgccataaaagaatttggtttttctgggttgaatgtcaaagctttcattagcaatgtgaagacagctcttgctgcaacaaacccagctgtgaggactgctgccataaccctgcttggcgtgatgtatctgtatgttggtccctctttgcgaatgttctttgaggatgagaagcctgccctcctatcccagatagatgcagaatttgagaagatgcagggacaaagtccacctgctccaaccagaggaatttccaagcatagcacaagtggtacagatgaaggagaagatggagatgaaccagatgacgggagcaatgatgtcgttgatcttttgccgaggacggagatcagtgataaaatcacttcagagttggtatctaagattggtgataagaattggaagattaggaaagaaggcctagatgaagtggcaggtattattaatgacgcaaaatttatccaaccgaatataggtgaacttccaactgccttgaagggtcgactcaatgattcaaataaaatcttggtacagcaaacgctgaatatcctgcaacaactggcagtagccatgggcccaaatattaagcaacatgtaaaaaatttaggcatccctatcatcacagtccttggagacagcaagaacaatgttcgagctgctgccctagcgactgtgaatgcttgggcagaacagactggcatgaaggaatggctggaaggagaagatctttctgaagagctcaaaaaggaaaatcctttcttgaggcaagagcttctgggctggctggctgagaaactacctactcttcgttccacccctacagaccttatcctttgtgttcctcatctctactcctgcctagaagatcgaaatggagatgtgcgaaagaaggcccaagatgccttgccattcttcatgatgcatttaggatatgaaaaaatggccaaggctactgggaaactaaagccaacttctaaagatcaggtattggccatgctagagaaagccaaagttaacatgccagccaagcctgctccacccactaaagcaacttctaaaccaatgggagggtccgctccagccaaattccagcctgcatcagcacctgctgaagattgtatttccagcagtacagaacccaaacctgatccaaaaaaggccaaagctccaggattatcctctaaagcaaagagtgcacaagggaagaagatgccaagcaaaaccagcttaaaggaggatgaagacaaatccgggcctatttttattgttgttccaaatggaaaagagcaaaggatgaaagatgaaaaaggattgaaggtgctaaagtggaattttactaccccacgggatgaatacattgagcaactaaagactcaaatgtctagctgtgtggctaaatggttacaagatgagatgtttcactcagactttcagcatcataacaaagcccttgctgttatggttgatcacttggagagtgaaaaagaaggagttattggttgcctggatcttatcttaaagtggcttaccctgaggttttttgacaccaatacaagcgtcctgatgaaagcactagaatatttaaaattgctcttcaccttgctaagtgaagaagaatatcatcttactgagaatgaagcatcttccttcatcccctatcttgtcgtcaaggttggagaaccaaaggatgtcattcgtaaagatgttcgtgccatcctgaaccggatgtgccttgtctacccagctagcaagatgtttccctttatcatggaaggaaccaaatccaaaaactctaagcagagagcagagtgcctggaagagctgggatgtctggttgagtcctatggcatgaatgtttgccaaccaaccccaggaaaagccttaaaggaaatagctgttcacataggagaccgtgacaatgctgtacgcaatgctgcactcaacaccattgtaacggtgtacaatgtacatggggatcaggtgttcaaactgattggaaatctttctgaaaaggatatgagcatgctcgaggagaggattaagcggtcagcaaagagaccctctgctgcaccaataaaacaggtggaagagaaacctcagcgtgcacagaacataagctccaatgccaacatgttacgcaagggaccagctgaggacatgtcttccaaactcaaccaagcccgaagcatgagtgggcatcctgaggcagcccagatggtccgccgagaattccagctggatctagatgagattgagaatgacaatggtacagtccgatgtgaaatgccagaacttgttcagcacaaactggatgacatttttgagccagtccttattcctgaacccaagatccgggctgtttctccacacttcgatgacatgcacagtaatacagcatccacaatcaatttcattatctcccaagtagccagtggtgacatcaacacaagtatccaagctctgacacagatcgatgaggtcctgagacaggaagacaaagctgaagccatgtccggccatattgatcagtttctgatagccacttttatgcagctaagactcatctacaacacacacatggcagatgagaaattggagaaggacgagatcatcaagttgtatagctgtatcattggcaacatgatttcgctgtttcagatagagagccttgcccgggaggcctccactggagtactaaaagacctaatgcatggcctcatcaccttaatgctggattctcggattgaagatcttgaggaaggacaacaggtcatccgctctgtgaacctcttggtggtgaaggttctggagaagtcagaccagaccaacatcctgagtgccctacttgttttgctccaagacagcctgctagcaacagccagttctcccaaattctcagagcttgttatgaagtgtctctggagaatggttcgactgttgcctgataccatcaatagcattaacctagacagaattcttctggatatccacattttcatgaaggtcttccccaaagagaaactgaagcaatgcaaaagtgaatttcccataaggaccctaaagaccctgctacacaccttatgcaaattaaaagggcccaagatcctggaccacctaacgatgatcgacaacaaaaacgagtctgagctggaggcccatctctgccggatgatgaagcacagtatggaccagactgggagcaagtctgataaggaaacagaaaagggagcatctcgaatagatgaaaaatcatcaaaggccaaagtgaatgatttcttagctgagatttttaagaagattggctctaaagaaaacactaaagagggactagcagagttatatgaatataagaagaaatactcagatgctgacattgaaccatttctgaaaaattcctcacagttcttccagagctatgtcgaaagaggccttcgggtgattgagatggagagggagggcaaaggtcgtatttccacttcaacaggcatctcccctcagatggaagtcacatgtgtgcccacgcccacaagcacagtgtcctccataggtaacacaaatggggaagaagtggggccatctgtctacttggaaaggctaaagatcctccgacagcgatgtggtctggacaacacaaagcaagatgaccgacctcctttgacctctttgctctccaaaccagcagttcctactgtcgcctcttccacagacatgctccacagcaaactctctcagctccgggagtcacgggagcagcaccagcattcagacctggattctaaccagactcactcttcaggaactgtgacctcctcctcctccacagctaacatagacgacttgaaaaaaagactggagagaataaagagcagtcgcaaatgaagctgccccactcccccggcaccctgcagctttagtttactaaactagaagtcctcatagtttaaaatggcctcagcaggcctagtgtatacaaactggttgtatgtatcatgccgtggagctagggggaggagtcattgtggcacaagtatttgtacatactctgcttctctctgtcagcgtcctgctgctctagaagactgtccgtggatgagtttagtgtacagacttgtaaacagctgccccctctctgctcagtctagttcccagatccttttcttttctttttaattgctcatttgtaaaattgtcctaatctttcctagctttttaatagttaatattagaaactctttaatagttttcctttcagtttgtgagctcttctctgtcgccctgaagggtcactgtattctgtatgaatgcatggcatgatacaactaatttaagagtcttttataaataaagtttgcattaactatacctgactcccaagatgctccatatcatggagtgttgggcagcaattttttaacttttggtaccagctgggtattcagccagttagagaaaggttaattactgcttacagagcttccctttttcttggctcacagacttggagctgtcttttattcctttggaatggaaggaactctccttccctgctctccacaaacagctcctagggagcagaaaaatctcatccttccttgttttgagattttggtcatgatttccctccaattatcaccagtcgtttcaagaagctcttgggcatcctaccactttgctgaccaaaggcacacaagattgcgcccagagattggctgggcttcagtggttctcacactacaactagatttgtgttcatttgactaatggagtttgggaaatcttagtggtttgctgcttggttgtatgagtctcttttggtccaggctaacagttgcttcacattcagtcagagtaagg

SEQ ID NO: 7572 - DNA, 1533 bp, Homo sapiens
  source 1..1533: mol_type = unassigned DNA
ccctgccgaggtgaggggagcgactacaactcccagagggtatggcggccgcagcagtgggcagttgagtttccggggcgacccaggtcctccggcggaagcgggagcctctgtcggccgcggaagcctggagtgggcggtacgcagacgcgcgcggtgagacccgctgtctgctcagcggactctgcccgcccccacctccccctgcgtcgggccgacatgaaggactcgctggtgctgctgggccgtgtcccggcgcacccggactcccgctgctggttcctggcctggaaccccgcggggaccctgctggcctcgtgcggcggcgaccggagaatccgcatctggggcacggagggtgacagctggatctgcaagtctgtcctttctgaaggccaccagcgcaccgtgcggaaggtagcctggtccccctgcggtaattacctggcctctgccagctttgatgctaccacttgcatttggaagaagaaccaggatgactttgagtgtgtaaccactctcgagggccatgaaaatgaggtcaagtcagtggcttgggccccatctggcaacctcctggccacttgcagccgagataagagcgtttgggtctgggaagttgatgaagaggatgagtatgaatgtgtcagtgttctcaactcccacacacaggatgtcaagcatgtggtttggcacccaagtcaggagctcttagcttctgccagctatgatgacacagtgaagctgtaccgggaggaagaggatgactgggtatgctgtgccacccttgagggccatgaatccactgtgtggagcttggcctttgacccgagtggccagcgcctggcgtcttgtagtgatgaccgtactgtgcgtatctggcgtcagtatctaccaggcaatgaacaaggggtggcatgcagcggctctgaccccagttggaaatgtatctgtactttgtccggcttccactcaaggaccatttatgacattgcttggtgtcagctgacaggggctctggccacagcttgtggggatgacgcgatccgcgtgtttcaggaggatcccaactcggatccacagcagcccaccttctccctgacagcccacttgcatcaggcccattcccaggatgtcaactgtgtggcctggaaccccaaggagccagggctactggcctcctgcagtgatgatggggaggtggccttctggaagtatcagcggcctgaaggcctctgagctacctcgactttggacagagtaatgactccccagaaaacgtcatataagactttaccagcccctgagaggaccaggaggagcatccttgaccttcatttaacttggctcacttctcttcagacttgggtagaagtgcagagccacagaattgctttccttccccgcctttgacatgaggccttcagtaaagagctacagaacatgagtacattgttataccacagatttttcttgcattagggcacagtgttaaattttttggaggtaaatatactatttataatcactata

SEQ ID NO: 7573 - DNA, 2469 bp, Homo sapiens
  source 1..2469: mol_type = unassigned DNA
agaatctagaggaagttgacaaaggtgccacagcagcacagcacagtatgtggtggagagttctcagcttgctggcatggttccccttgcaagaggcctctctgactaaccacacagaaaccatcaccgtggaggaaggccagacgctcactctaaagtgtgtcacttctctgaggaagaactcctccctccagtggctgaccccctcagggttcaccatttttttaaatgagtatcctgctttaaaaaattccaaataccagcttcttcatcactcggccaatcagctctccatcactgtgcctaacgtaaccctgcaagatgaaggcgtgtacaagtgcttacattacagcgactctgtaagcacaaaggaagtgaaagtgattgtgctggcaactcctttcaagccaatcctggaagcttcagttatcagaaagcaaaatggagaagaacatgttgtactcatgtgctccaccatgagaagcaagccccctccgcagataacctggctacttgggaatagcatggaagtgtccggtggaacgctccatgaatttgaaactgatgggaagaaatgtaatactaccagcactctcataatccacacttatggcaaaaattcaacggtggactgcattatccgacacagaggcctgcaagggagaaaactagtagcacccttccggtttgaagatttggttactgatgaagagacagcttcagatgctctggagagaaactctctatcctctcaagacccacagcagcccaccagtactgtctcagtaacggaagattctagtacatcggagattgacaaggaagagaaagaacaaaccactcaagatcctgacttgaccaccgaagcaaatcctcagtatttaggactggcaagaaagaaaagtggcatcctgctgctcacgctggtgtccttcctcattttcatactcttcatcatagtccagctcttcatcatgaagctgaggaaagcacatgtgatatggaagaaagaaaacgaagtttcagaacacacactagaaagttacagatcaaggtcaaataatgaagaaacatcatctgaagagaaaaatggccaatcttcccaccctatgcgttgcatgaactacatcacaaagttgtactcagaagcaaaaacaaagaggaaggaaaatgtacaacattcaaaattagaagaaaagcacatccaagtaccagagagtattgtgtagtgctctctgcaatggaacatgtgatttcagggttgccgcagtgtcacctcagtggaccagcctgggggaaggagcttaattgctgagacattaataatgacctcttagtgcaatgcaagatggtgtcctcggataatgatctgccccggagctagggcagcaacatgaggaccaaaccatgcacataaagcttgtagtttaaaaaagaaaagcaaaaaaataattatgcctgacactacttcagagcaggaggattctacgaagccttggggatcagggtcagtgtgagcagctaacatcctacctcaaatggaacaggattttttgatgctttgctctaatggaactgtttaaaaaatttttttttctttttaatattttcttctggtcacaaaataaagaaatttgggatgcaaagtacctaaagatctctgatcctaagaagttacttctggccaggcgcggtggctcatgcctgtaatcctagcactttgggaggctgaggtaggcagatcacttgaggtcaggagttggagaccagcctggccaacatagtgaaaccccgtctctactaaaaatgcaaaaattagccaggcgtagtggtgcgcacctgtagtctcagatacttgggaggctgagggtggagaatcgcttgaacctgggaggtggagattgcagtgagtcaagatctcaccactgcactccagcctgggcaacagagggagactctgtctcaaaaaaaaagaagttacttccaagacagacttttaagatgtaaccagcacaaagcaatgtcagggaggagtgatacatgacaataaatgagtcagatgagcaagaaggccccagaacccatgccccaaggcacaaagaggagctcagggtaggcccaaagattcgaattccttagattactaaatcacatgagcggaccttgtctgtcagataagatttttacctggaaattccatgaccaatacatgtgcaaaagaaaatgatgggttgaatttactgattattgacctaatggatggctttttaaaatgttttaataaaaagcagaatagatgtttgtttttctagtggttataccaagttatacttcctgttttcacgtgtgaaagtaacatgggacatgcctttcttttccgatcagtttatttaagctatacagcaaactttggcatttatgtggagcatttctcattgttggaatctgaataaaccaattacaaaataa

SEQ ID NO: 7574 - DNA, 1929 bp, Homo sapiens
  source 1..1929: mol_type = unassigned DNA
aaaaaccagagcaggagccacagaacacacagttctggggtttctgcacaacctctacaagcaggtagccgctaaatatattctccaatctcttttactgagcacaatgtgggtaaaactgctctctatagtagcagaattttgtttttcccctttcctagttactgatgaagagacagcttcagatgctctggagagaaactctctatcctctcaagacccacagcagcccaccagtactgtctcagtaacggaagattctagtacatcggagattgacaaggaagagaaagaacaaaccactcaagatcctgacttgaccaccgaagcaaatcctcagtatttaggactggcaagaaagaaaagtggcatcctgctgctcacgctggtgtccttcctcattttcatactcttcatcatagtccagctcttcatcatgaagctgaggaaagcacatgtgatatggaagaaagaaaacgaagtttcagaacacacactagaaagttacagatcaaggtcaaataatgaagaaacatcatctgaagagaaaaatggccaatcttcccaccctatgcgttgcatgaactacatcacaaagttgtactcagaagcaaaaacaaagaggaaggaaaatgtacaacattcaaaattagaagaaaagcacatccaagtaccagagagtattgtgtagtgctctctgcaatggaacatgtgatttcagggttgccgcagtgtcacctcagtggaccagcctgggggaaggagcttaattgctgagacattaataatgacctcttagtgcaatgcaagatggtgtcctcggataatgatctgccccggagctagggcagcaacatgaggaccaaaccatgcacataaagcttgtagtttaaaaaagaaaagcaaaaaaataattatgcctgacactacttcagagcaggaggattctacgaagccttggggatcagggtcagtgtgagcagctaacatcctacctcaaatggaacaggattttttgatgctttgctctaatggaactgtttaaaaaatttttttttctttttaatattttcttctggtcacaaaataaagaaatttgggatgcaaagtacctaaagatctctgatcctaagaagttacttctggccaggcgcggtggctcatgcctgtaatcctagcactttgggaggctgaggtaggcagatcacttgaggtcaggagttggagaccagcctggccaacatagtgaaaccccgtctctactaaaaatgcaaaaattagccaggcgtagtggtgcgcacctgtagtctcagatacttgggaggctgagggtggagaatcgcttgaacctgggaggtggagattgcagtgagtcaagatctcaccactgcactccagcctgggcaacagagggagactctgtctcaaaaaaaaagaagttacttccaagacagacttttaagatgtaaccagcacaaagcaatgtcagggaggagtgatacatgacaataaatgagtcagatgagcaagaaggccccagaacccatgccccaaggcacaaagaggagctcagggtaggcccaaagattcgaattccttagattactaaatcacatgagcggaccttgtctgtcagataagatttttacctggaaattccatgaccaatacatgtgcaaaagaaaatgatgggttgaatttactgattattgacctaatggatggctttttaaaatgttttaataaaaagcagaatagatgtttgtttttctagtggttataccaagttatacttcctgttttcacgtgtgaaagtaacatgggacatgcctttcttttccgatcagtttatttaagctatacagcaaactttggcatttatgtggagcatttctcattgttggaatctgaataaaccaattacaaaat

SEQ ID NO: 7575 - DNA, 525 bp, Homo sapiens
  source 1..525: mol_type = unassigned DNA
atggcttgccttggatttcagcggcacaaggctcagctgaacctggctaccaggacctggccctgcactctcctgttttttcttctcttcatccctgtcttctgcaaagcaatgcacgtggcccagcctgctgtggtactggccagcagccgaggcatcgccagctttgtgtgtgagtatgcatctccaggcaaagccactgaggtccgggtgacagtgcttcggcaggctgacagccaggtgactgaagtctgtgcggcaacctacatgatggggaatgagttgaccttcctagatgattccatctgcacgggcacctccagtggaaatcaagtgaacctcactatccaaggactgagggccatggacacgggactctacatctgcaaggtggagctcatgtacccaccgccatactacctgggcataggcaacggaacccagatttatgtaattgctaaagaaaagaagccctcttacaacaggggtctatgtgaaaatgcccccaacagagccagaatgtga

SEQ ID NO: 7576 - DNA, 1977 bp, Homo sapiens
  source 1..1977: mol_type = unassigned DNA
gccttctgtgtgtgcacatgtgtaatacatatctgggatcaaagctatctatataaagtccttgattctgtgtgggttcaaacacatttcaaagcttcaggatcctgaaaggttttgctctacttcctgaagacctgaacaccgctcccataaagccatggcttgccttggatttcagcggcacaaggctcagctgaacctggctaccaggacctggccctgcactctcctgttttttcttctcttcatccctgtcttctgcaaagcaatgcacgtggcccagcctgctgtggtactggccagcagccgaggcatcgccagctttgtgtgtgagtatgcatctccaggcaaagccactgaggtccgggtgacagtgcttcggcaggctgacagccaggtgactgaagtctgtgcggcaacctacatgatggggaatgagttgaccttcctagatgattccatctgcacgggcacctccagtggaaatcaagtgaacctcactatccaaggactgagggccatggacacgggactctacatctgcaaggtggagctcatgtacccaccgccatactacctgggcataggcaacggaacccagatttatgtaattgatccagaaccgtgcccagattctgacttcctcctctggatccttgcagcagttagttcggggttgtttttttatagctttctcctcacagctgtttctttgagcaaaatgctaaagaaaagaagccctcttacaacaggggtctatgtgaaaatgcccccaacagagccagaatgtgaaaagcaatttcagccttattttattcccatcaattgagaaaccattatgaagaagagagtccatatttcaatttccaagagctgaggcaattctaacttttttgctatccagctatttttatttgtttgtgcatttggggggaattcatctctctttaatataaagttggatgcggaacccaaattacgtgtactacaatttaaagcaaaggagtagaaagacagagctgggatgtttctgtcacatcagctccactttcagtgaaagcatcacttgggattaatatggggatgcagcattatgatgtgggtcaaggaattaagttagggaatggcacagcccaaagaaggaaaaggcagggagcgagggagaagactatattgtacacaccttatatttacgtatgagacgtttatagccgaaatgatcttttcaagttaaattttatgccttttatttcttaaacaaatgtatgattacatcaaggcttcaaaaatactcacatggctatgttttagccagtgatgctaaaggttgtattgcatatatacatatatatatatatatatatatatatatatatatatatatatatatatatatatattttaatttgatagtattgtgcatagagccacgtatgtttttgtgtatttgttaatggtttgaatataaacactatatggcagtgtctttccaccttgggtcccagggaagttttgtggaggagctcaggacactaatacaccaggtagaacacaaggtcatttgctaactagcttggaaactggatgaggtcatagcagtgcttgattgcgtggaattgtgctgagttggtgttgacatgtgctttggggcttttacaccagttcctttcaatggtttgcaaggaagccacagctggtggtatctgagttgacttgacagaacactgtcttgaagacaatggcttactccaggagacccacaggtatgaccttctaggaagctccagttcgatgggcccaattcttacaaacatgtggttaatgccatggacagaagaaggcagcaggtggcagaatggggtgcatgaaggtttctgaaaattaacactgcttgtgtttttaactcaatattttccatgaaaatgcaacaacatgtataatatttttaattaaataaaaatctgtggtggtcgtttt

SEQ ID NO: 7577 - DNA, 969 bp, Homo sapiens
  source 1..969: mol_type = unassigned DNA
tctcttactatatgtgaaaaaaatgaaggacatgggggaagtgtgacttgccccaaatcacatatttcatggtagagccaggtcttctgtttgtcatatcagtgttcttcctgccacaaccatcttgaagaatctatttctcacaatgcacgtggcccagcctgctgtggtactggccagcagccgaggcatcgccagctttgtgtgtgagtatgcatctccaggcaaagccactgaggtccgggtgacagtgcttcggcaggctgacagccaggtgactgaagtctgtgcggcaacctacatgatggggaatgagttgaccttcctagatgattccatctgcacgggcacctccagtggaaatcaagtgaacctcactatccaaggactgagggccatggacacgggactctacatctgcaaggtggagctcatgtacccaccgccatactacctgggcataggcaacggaacccagatttatgtaattgctaaagaaaagaagccctcttacaacaggggtctatgtgaaaatgcccccaacagagccagaatgtgaaaagcaatttcagccttattttattcccatcaattgagaaaccattatgaagaagagagtccatatttcaatttccaagagctgaggcaattctaacttttttgctatccagctatttttatttgtttgtgcatttggggggaattcatctctctttaatataaagttggatgcggaacccaaattacgtgtactacaatttaaagcaaaggagtagaaagacagagctgggatgtttctgtcacatcagctccactttcagtgaaagcatcacttgggattaatatggggatgcagcattatgatgtgggtcaaggaattaagttagggaatggcacagcccaaagaaggaaaaggcagggagcgagggagaagactatattgtacacaccttatatttacgtatgaga

SEQ ID NO: 7578 - DNA, 266 bp, Homo sapiens
  source 1..266: mol_type = unassigned DNA
tgattctgtgtgggttcaaacacatttcaaagcttcaggatcctgaaaggttttgctctacttcctgaagacctgaacaccgctcccataaagccatggcttgccttggatttcagcggcacaaggctcagctgaacctggctaccaggacctggccctgcactctcctgttttttcttctcttcatccctgtcttctgcaaagtgcccccaacagagccagaatgtgaaaagcaatttcagccttattttattcccatcaattga

SEQ ID NO: 7579 - DNA, 1640 bp, Homo sapiens
  source 1..1640: mol_type = unassigned DNA
cgcgcacacctctcggtgcagattgcaaagcgccttccgttgcgagagctgcagattttgcaagagccaggctcgcccaccttgtagaaggagcgccttgagtcccctctcaccctcggttgcaaagagccgaccgcttgatctggacaccccctcgcccagattgcatgatctcccgggaccctcttgagttgcacgtttctgcaccgaggacctcaaatccccgtcgctcctaggatttgcagcgttctggatactggagggttgcaggctacactcgcccgcccctgggcagacactcgtccaaaccactggagtgtgctggtgactggcaggccagcccttcgcctctccatgaacccgtgagcctgggggcaggtgccaggcgatggcgcggcctgtgagcgacaggaccccggcccctctgctgctgggcggcccggccgggacaccccctggcgggggagcgctgcttgggttgcggagccttctgcaggggaccagcaagcccaaagagccggccagctgtctcctgaaggaaaaggagcgcaaggcggccctgcctgcagccacaacccctgggccaggcctggagactgcgggcccggcggatgccccggctggggcagtggtgggcggagggtccccgcgggggcgcccggggccggtgcccgccccgggtctgttggcgccactgctgtgggagcgcacgctgccgttcggcgatgtggagtacgtagacctggacgccttcctgctggagcacgggctcccgcccagcccgccgccccccggtggcccgtcgccggagccgtcgcccgcgcggacgcccgcaccctccccagggccgggttcgtgcggctcggcttccccccgctcctctcctgggcacgcccccgcccgggctgccctcgggaccgccagcggccaccgcgcaggcctgacctctcgggacacacccagccctgtggacccagacaccgtggaggtgttgatgacctttgaacccgacccagctgatcttgccctatcaagcattcctggccacgagacctttgaccctcgaagacatcgcttctcagaagaggaacttaagccccagccaatcatgaagaaggcaagaaaaatccaggtgccggaggagcagaaggatgagaaatactggagccggcggtacaagaacaacgaggcagccaagcggtcccgtgacgcccggcggctcaaggagaaccagatatcggtgcgggcggccttcctggagaaggagaacgccctgctgcggcaggaagttgtggccgtgcgccaggagctgtcccactaccgcgccgtgctgtcccgataccaggcccagcacggggccctgtgaggctgccccacatccccacctggcggagctctcctccgccttgctgagacttacgccctgttcccttcctgccctgtggcccacgggccggccagctgggtgccccagggacgtgataatgcagataaatacatttatatttttaagaaaaagcgagcctcccccctcccttgcgggggcggggagggttctctgtgtgtgtccccggcacgtcagggaccctatcctcccaccgcctccgttaacacgatcctgaataaatcttgagaacccc

SEQ ID NO: 7580 - DNA, 2617 bp, Homo sapiens
  source 1..2617: mol_type = unassigned DNA
ttcggccgctgggcggagccgtcaatgcgcaggcgcggcgtcgccccgcccactccggctcggcggctctgggcctgcggcgggcgctgcgggttggagctcgggacgtgatcgtgggcgcgcagccagcggctccctgcccttcccctccgggccctgagtaccggccccccaccaaggaggagcccgaggtctccgtcccggcggcgatgctgccccgtcggcctctggcgtggcccgcgtggctgttgcggggtgctccgggagccgcgggttcttggggtcggccggttggccccctggcccgcagaggctgctgctccgccccggggacccccgaggtgccgctgacccgggagcgctaccccgtgcggcgcttgccgttctccacggtgtctaagcaggacctggccgcctttgagcgcatcgtgcccggcggggtcgtcacggacccggaagcgctgcaggctcccaacgtggactggttgcggacgctgcgaggctgtagcaaggtgctgctgaggccacggacgtcggaggaggtgtcccacatcctcaggcactgccacgagaggaacctggccgtgaacccacaggggggcaacacaggcatggtgggtggcagcgtccccgtctttgacgagatcatcctctccactgcccgcatgaaccgggtcctcagcttccacagcgtgtctggaattctggtttgccaggcgggctgcgtcctggaggagctgagccggtatgtggaggaacgggacttcatcatgccgctggacttaggagccaagggcagctgccacatcgggggaaacgtggcaaccaacgctggaggcctgcggtttcttcgatatggctcactgcatgggactgtcctgggcctggaagtggtgctggccgacggcactgtcctggactgcctgacctccctgaggaaggacaacacgggctatgacctgaagcagctgttcatcgggtcggagggcactttggggatcatcaccacggtgtccatcttgtgtccacccaagcccagggctgtgaacgtggctttcctcggctgcccaggctttgctgaggttctgcagaccttcagcacctgcaaggggatgctgggtgagatcctgtctgcattcgagttcatggatgctgtgtgcatgcagctggtcgggcgccatctccacctggccagcccggtgcaagagagtccgttttacgtcctcatcgagacttcaggctccaacgcaggccatgacgctgagaagctgggccacttcctggagcacgcgctgggctccggcctggtgaccgatgggaccatggccaccgaccagaggaaagtcaagatgctgtgggccctgagggaaaggatcacagaggcgctgagccgggatggctacgtgtacaagtacgacctctccctccctgtggagcggctctacgacatcgtgactgacctgcgcgcccgcctcggcccgcacgccaagcacgtggtgggctatggccaccttggagatggtaacctgcacctcaatgtgacggcggaggccttcagcccctcgctcctggctgccctggagccccacgtgtacgagtggacggccgggcagcagggcagcgtcagcgcggagcacggagtgggcttcaggaagagggacgtcctgggctacagcaagccaccgggggccctgcagctcatgcagcagctcaaggccctgctggaccccaagggcatcctcaacccctacaagacgctgcccagccaggcctgacggccactcctgctgctgccaaggcccactgggggtcggcgggtggctctcgggcgggggtgttgcggtggctctgagggatgagccggcagtgggcaggggaccaggcacctggttgaagggactgggagcccgcactggggaactgccggacgcaggccctcgggcaggagcatctggcagagtggggggcgtggcaggcaccctcctttgcagggcgaggtggggcctctgcagccatcctggacaggccggggtggcggcagctttgcccacgtggaagcggggtgggtctcacttgcgtggtggcccctggccccatcttgcctgctgcggcctggggagcaggcgctgggtggtggttctgcctgcttgctgctcgttccccgggcatgcgtgggcagcggggggcatgcgtgggcagcagggggcgtgggcagcgggggcacgggcaggaccacgtgggccgtgatcgtgggttgccgagaggacctgagcgctgcggctctgctgaatggagccgggtccctcaggccgtggacgccctcgggaggggggtgactgtggcttgtgtctggacaggaatgtgtcatttcccacatcttctagagggctgccagctgggaagacagttatcagggcaagctgtgctctgagtttcgggttctgctcctacaaagaacgtgcggtgctgcgggcgagggccccggcacggacaagggccactgcagagtgtgtttctgctcgtcagctgccctgggcagcggatgggctgggcgatgcagctggatgcacatctcattctgtcatgaatgtccagtaaaaatctgaattggttgcaa

SEQ ID NO: 7581 - DNA, 1118 bp, Homo sapiens
  source 1..1118: mol_type = unassigned DNA
actccggctcggcggctctgggcctgcggcgggcgctgcgggttggagctcgggacgtgatcgtgggcgcgcagccagcggctccctgcccttcccctccgggccctgagtaccggccccccaccaaggaggagcccgaggtctccgtcccggcggcgatgctgccccgtcggcctctggcgtggcccgcgtggctgttgcggggtgctccgggagccgcgggttcttggggtcggccggttggccccctggcccgcagaggctgctgctccgccccggggacccccgaggtgccgctgacccgggagcgctaccccgtgcggcgcttgccgttctccacggtgtctaagcaggacctggccgcctttgagcgcatcgtgcccggcggggtcgtcacggacccggaagcgctgcaggctcccaacgtggactggttgcggacgctgcgaggctgtagcaaggtgctgctgaggccacggacgtcggaggaggtgtcccacatcctcaggcactgccacgagaggaacctggccgtgaacccacaggggggcaacacaggcatggtgggtggcagcgtccccgtctttgacgagatcatcctctccactgcccgcatgaaccgggtcctcagcttccacagcgtgtctggaattctggtttgccaggcgggctgcgtcctggaggagctgagccggtatgtggaggaacgggacttcatcatgccgctggacttaggagccaagggcagctgccacatcgggggaaacgtggcaaccaacgctggaggcctgcggtttcttcgatatggctcactgcatgggactgtcctgggcctggaagtggtgctggccgacggcactgtcctggactgcctgacctccctgaggaaggacaacacgggctatgacctgaagcagctgttcatcgggtcggagggcactttggggatcatcaccacggtgtccatcttgtgtccacccaagcccagggctgtgaacgtggctttcctcgtcacctgtgtgccgcccgcctgtggtcctgggagcccgaggccagcccggctgccgcatcctgctcttcgcactccaggtgtctgcccccagcctctgcgcctgtga

SEQ ID NO: 7582 - DNA, 2208 bp, Homo sapiens
  source 1..2208: mol_type = unassigned DNA
aatgcgcaggcgcggcgtcgccccgcccactccggctcggcggctctgggcctgcggcgggcgctgcgggttggagctcgggacgtgatcgtgggctgtagcaaggtgctgctgaggccacggacgtcggaggaggtgtcccacatcctcaggcactgccacgagaggaacctggccgtgaacccacaggggggcaacacaggcatggtgggtggcagcgtccccgtctttgacgagatcatcctctccactgcccgcatgaaccgggtcctcagcttccacagcgtgtctggaattctggtttgccaggcgggctgcgtcctggaggagctgagccggtatgtggaggaacgggacttcatcatgccgctggacttaggagccaagggcagctgccacatcgggggaaacgtggcaaccaacgctggaggcctgcggtttcttcgatatggctcactgcatgggactgtcctgggcctggaagtggtgctggccgacggcactgtcctggactgcctgacctccctgaggaaggacaacacgggctatgacctgaagcagctgttcatcgggtcggagggcactttggggatcatcaccacggtgtccatcttgtgtccacccaagcccagggctgtgaacgtggctttcctcggctgcccaggctttgctgaggttctgcagaccttcagcacctgcaaggggatgctgggtgagatcctgtctgcattcgagttcatggatgctgtgtgcatgcagctggtcgggcgccatctccacctggccagcccggtgcaagagagtccgttttacgtcctcatcgagacttcaggctccaacgcaggccatgacgctgagaagctgggccacttcctggagcacgcgctgggctccggcctggtgaccgatgggaccatggccaccgaccagaggaaagtcaagatgctgtgggccctgagggaaaggatcacagaggcgctgagccgggatggctacgtgtacaagtacgacctctccctccctgtggagcggctctacgacatcgtgactgacctgcgcgcccgcctcggcccgcacgccaagcacgtggtgggctatggccaccttggagatggtaacctgcacctcaatgtgacggcggaggccttcagcccctcgctcctggctgccctggagccccacgtgtacgagtggacggccgggcagcagggcagcgtcagcgcggagcacggagtgggcttcaggaagagggacgtcctgggctacagcaagccaccgggggccctgcagctcatgcagcagctcaaggccctgctggaccccaagggcatcctcaacccctacaagacgctgcccagccaggcctgacggccactcctgctgctgccaaggcccactgggggtcggcgggtggctctcgggcgggggtgttgcggtggctctgagggatgagccggcagtgggcaggggaccaggcacctggttgaagggactgggagcccgcactggggaactgccggacgcaggccctcgggcaggagcatctggcagagtggggggcgtggcaggcaccctcctttgcagggcgaggtggggcctctgcagccatcctggacaggccggggtggcggcagctttgcccacgtggaagcggggtgggtctcacttgcgtggtggcccctggccccatcttgcctgctgcggcctggggagcaggcgctgggtggtggttctgcctgcttgctgctcgttccccgggcatgcgtgggcagcggggggcatgcgtgggcagcagggggcgtgggcagcgggggcacgggcaggaccacgtgggccgtgatcgtgggttgccgagaggacctgagcgctgcggctctgctgaatggagccgggtccctcaggccgtggacgccctcgggaggggggtgactgtggcttgtgtctggacaggaatgtgtcatttcccacatcttctagagggctgccagctgggaagacagttatcagggcaagctgtgctctgagtttcgggttctgctcctacaaagaacgtgcggtgctgcgggcgagggccccggcacggacaagggccactgcagagtgtgtttctgctcgtcagctgccctgggcagcggatgggctgggcgatgcagctggatgcacatctcattctgtcatgaatgtccagtaaaaatctgaattggttgc

SEQ ID NO: 7583 - DNA, 1312 bp, Homo sapiens
  source 1..1312: mol_type = unassigned DNA
ttcggccgctgggcggagccgtcaatgcgcaggcgcggcgtcgccccgcccactccggctcggcggctctgggcctgcggcgggcgctgcgggttggagctcgggacgtgatcgtgggcgcgcagccagcggctccctgcccttcccctccgggccctgagtaccggccccccaccaaggaggagcccgaggtctccgtcccggcggcgatgctgccccgtcggcctctggcgtggcccgcgtggctgttgcggggtgctccgggagccgcgggttcttggggtcggccggttggccccctggcccgcagaggctgctgctccgccccggggacccccgaggtgccgctgacccgggagcgctaccccgtgcggcgcttgccgttctccacggtgtctaagcaggacctggccgcctttgagcgcatcgtgcccggcggggtcgtcacggacccggaagcgctgcaggctcccaacgtggactggttgcggacgctgcgaggctgtagcaaggtgctgctgaggccacggacgtcggaggaggtgtcccacatcctcaggcactgccacgagaggaacctggccgtgaacccacaggggggcaacacaggcatggtgggtggcagcgtccccgtctttgacgagatcatcctctccactgcccgcatgaaccgggtcctcagcttccacagcgtgtctggaattctggtttgccaggcgggctgcgtcctggaggagctgagccggtatgtggaggaacgggacttcatcatgccgctggacttaggagccaagggcagctgccacatcgggggaaacgtggcaaccaacgctggaggcctgcggtttcttcgatatggctcactgcatgggactgtcctgggcctggaagtggtgctggccgacggcactgtcctggactgcctgacctccctgaggaaggacaacacgggctatgacctgaagcagctgttcatcgggtcggagggcactttggggatcatcaccacggtgtccatcttgtgtccacccaagcccagggctgtgaacgtggctttcctcgtcacctgtgtgccgcccgcctgtggtcctgggagcccgaggccagcccggctgccgcatcctgctcttcgcactccaggtctcagacaggagtcactcgcctcttcgtgccacgcccacgtctaagccgggtggaacaggccctgtgaggatggtcctggtgtccctcgtgctcgtgggctcggtccagctctccagggccccagtcagccctggctcctgctctcctgcagctggggcgacttccgacg

SEQ ID NO: 7584 - DNA, 2227 bp, Homo sapiens
  source 1..2227: mol_type = unassigned DNA
ttggcgaggctctgggcaggtcctgaggcttttctctgctgttgtccggtgttggcgaggctctgggcaggtcctgagccattctgctttccactctgtggtctttcccttctgggagccctgggtttttggacatgttgagacaatggggcttgcgcaggtccagccgctgccgcgggggccctgtgttcaacgggggacactcagccctgcccaggccccgctgtagcctcagcccacccgagtggaagccacactggtcgcaccagatgccccgggctcctctgagtagtgaccacggcgggtctcattggcactgcctatccacccgtcacgtgtccttccctcccccgtggcccacccaccatgtccttccctcccctgtggcccacccgccatgtccctgcctcccacccgacatgccccttgagctgcctgggccctgctgttgtccccactgcctgtgtgactctgcgcccccttccctaccctgccccaccctggttcagggagcgtccaggcccattctcatcctcagggccttccctggcccttgccactctgtgccgtgtcatgacctgaagctgcaggtgggcgcctcccccttccgtcatggctgtcccccttctgtgaggtgtcccagccgcctgattgccggagtcccagggtgctcggtgctgtcgtggagcctgggacattcactgtctgggattgattccagggttggagccacacctggtctggggcattcgctgtcctgggtcagagcccctcctggtctgggacattcgctgtctggggttggagccacacctggtctggggcatttgctgtccggggtcggagcctcacctggtgaagatacagaacatgctgctgccctaaccccgtgtggtgtgccccctgtccccgggtgtcgttcccatagccagcccttgtctcatctcgtctcatcctctagatgctgtgggccctgagggaaaggatcacagaggcgctgagccgggatggctacgtgtacaagtacgacctctccctccctgtggagcggctctacgacatcgtgactgacctgcgcgcccgcctcggcccgcacgccaagcacgtggtgggctatggccaccttggagatggtaacctgcacctcaatgtgacggcggaggccttcagcccctcgctcctggctgccctggagccccacgtgtacgagtggacggccgggcagcagggcagcgtcagcgcggagcacggagtgggcttcaggaagagggacgtcctgggctacagcaagccaccgggggccctgcagctcatgcagcagctcaaggccctgctggaccccaagggcatcctcaacccctacaagacgctgcccagccaggcctgacggccactcctgctgctgccaaggcccactgggggtcggcgggtggctctcgggcgggggtgttgcggtggctctgagggatgagccggcagtgggcaggggaccaggcacctggttgaagggactgggagcccgcactggggaactgccggacgcaggccctcgggcaggagcatctggcagagtggggggcgtggcaggcaccctcctttgcagggcgaggtggggcctctgcagccatcctggacaggccggggtggcggcagctttgcccacgtggaagcggggtgggtctcacttgcgtggtggcccctggccccatcttgcctgctgcggcctggggagcaggcgctgggtggtggttctgcctgcttgctgctcgttccccgggcatgcgtgggcagcggggggcatgcgtgggcagcagggggcgtgggcagcgggggcacgggcaggaccacgtgggccgtgatcgtgggttgccgagaggacctgagcgctgcggctctgctgaatggagccgggtccctcaggccgtggacgccctcgggaggggggtgactgtggcttgtgtctggacaggaatgtgtcatttcccacatcttctagagggctgccagctgggaagacagttatcagggcaagctgtgctctgagtttcgggttctgctcctacaaagaacgtgcggtgctgcgggcgagggccccggcacggacaagggccactgcagagtgtgtttctgctcgtcagctgccctgggcagcggatgggctgggcgatgcagctggatgcacatctcattctgtcatgaatgtccagtaaaaatctgaattggttgc

SEQ ID NO: 7585 - DNA, 2294 bp, Homo sapiens
  source 1..2294: mol_type = unassigned DNA
ggccggattcccagtggtggcgaggaggtggtatttttttaagtgtcagtgtggcattgtggttgcctcaataaaacagagtctttttttgtcttttttttttgagacagggtctcgctctcacccaggctggagtgcagtgacacagttgcagctcactgcagcctcgacctcctgggctcaagcaatcctcccgcctcagcctcccgagtagctgagtctacagatctccacaatggaagttcgaagcaagcaaaagccacgcaaaccacaggccgatctgtctgagccctaggatttggcccggttctgcttcagccaccagcaccgtctgctcctcctcagaatccttcctcccccgtggcccgcccgccgtgtccctcctcctccacggcccgcccaccgtgtccttccctcccccgtggcccacccaccatgtccttccctcccctgtggcccacccgccatgtccctgcctcccacccgacatgccccttgctgcctgggccctgctgttgtccccactgcctgtgtgactctgcgcccccttccctaccctgccccaccctggttcagggagcgtccaggcccattctcatcctcagggccttccctggcccttgccactctgtgccgtgtcatgacctgaagctgcaggtgggcgcctcccccttccgtcatggctgtcccccttctgtgaggtgtcccagccgcctgattgccggagtcccagggtgctcggtgctgtcgtggagcctgggacattcactgtctgggattgattccagggttggagccacacctggtctggggcattcgctgtcctgggtcagagcccctcctggtctgggacattcgctgtctggggttggagccacacctggtctggggcatttgctgtccggggtcggagcctcacctggtgaagatacagaacatgctgctgccctaaccccgtgtggtgtgccccctgtccccgggtgtcgttcccatagccagcccttgtctcatctcgtctcatcctctagatgctgtgggccctgagggaaaggatcacagaggcgctgagccgggatggctacgtgtacaagtacgacctctccctccctgtggagcggctctacgacatcgtgactgacctgcgcgcccgcctcggcccgcacgccaagcacgtggtgggctatggccaccttggagatggtaacctgcacctcaatgtgacggcggaggccttcagcccctcgctcctggctgccctggagccccacgtgtacgagtggacggccgggcagcagggcagcgtcagcgcggagcacggagtgggcttcaggaagagggacgtcctgggctacagcaagccaccgggggccctgcagctcatgcagcagctcaaggccctgctggaccccaagggcatcctcaacccctacaagacgctgcccagccaggcctgacggccactcctgctgctgccaaggcccactgggggtcggcgggtggctctcgggcgggggtgttgcggtggctctgagggatgagccggcagtgggcaggggaccaggcacctggttgaagggactgggagcccgcactggggaactgccggacgcaggccctcgggcaggagcatctggcagagtggggggcgtggcaggcaccctcctttgcagggcgaggtggggcctctgcagccatcctggacaggccggggtggcggcagctttgcccacgtggaagcggggtgggtctcacttgcgtggtggcccctggccccatcttgcctgctgcggcctggggagcaggcgctgggtggtggttctgcctgcttgctgctcgttccccgggcatgcgtgggcagcggggggcatgcgtgggcagcagggggcgtgggcagcgggggcacgggcaggaccacgtgggccgtgatcgtgggttgccgagaggacctgagcgctgcggctctgctgaatggagccgggtccctcaggccgtggacgccctcgggaggggggtgactgtggcttgtgtctggacaggaatgtgtcatttcccacatcttctagagggctgccagctgggaagacagttatcagggcaagctgtgctctgagtttcgggttctgctcctacaaagaacgtgcggtgctgcgggcgagggccccggcacggacaagggccactgcagagtgtgtttctgctcgtcagctgccctgggcagcggatgggctgggcgatgcagctggatgcacatctcattctgtcatgaatgtccagtaaaaatctgaattggttgc

SEQ ID NO: 7586 - DNA, 2868 bp, Homo sapiens
  source 1..2868: mol_type = unassigned DNA
ggtgagctgggagactttctttccatttcttcttttctttgttttcccatgttgctttctgtaagcacgtttttcttttatgctgggaaaaaagccaataattttttgttgttgggggatggagtttcgcactgtggcccaggctggagtgcaatgtcacgatcttggctcactgcagcctccacctcccggattcaaaccattctcctgcctcagcagcctccacctcccgggttcaaacgattcttctgcctcagcagcttccacctcccgggttcaaacaattctcctgcctcagcctcctgagtagctgggattacgggcacctgccaccacactcagctaatttttgtatttttagtacagacagggttttgccgtgttgtccaggctggtctcgaactcgtgacctcaggtgatccacccacctcagcctcccaaagtgctgggattacaggtgtgagccactgtgcccggccaaagacgactttttaaaccttctgaaagtcagcttaaccagagagctgtgtgctccgcaggctgcctgggtccttcttggccacgaaagatcagtggttgctattacagctgttctgcccgagcagccctgattcttgccctggcagccggagcctctgctcactctgccttccttgctcacttctagagagtccgttttacgtcctcatcgagacttcaggctccaacgcaggccatgacgctgagaagctgggccacttcctggagcacgcgctgggctccggcctggtgaccgatgggaccatggccaccgaccagaggaaagtcaaggtgccctgtgtcctgcttgcaggtccccgctctctgtccgtccagtccagccttgtcttgggatgcctggaacggtcattggtgcagcctagacagtgtgggatgtggctgaaatgtgactgggtttcatggctttgagagagtagcctctttggatggaaaatgtattcctggtgtctaggccattttcattaatatttaaaaagtacttcctccccaccatgaccctccccaaccccatgctgtgggatgagcaaggggactgccccattgctggtcccctgcagcctgtggttaagcggccagtcagcggcagctccgcatagagtcgtgtggaaggagtggaggcaggaggagcccctggggctgtggaggcttagcctggacctcgggagtcctaggatgggcagttttccttccctaggaggaaggggcgttgactgtgtgaccagatgatttggccttttgaggccaaaggaaggaggggcaaggcctgggcagggggagccctcggtcaccgtcaccggggcctgggcagggggagccctcggtcaccgtcaccggggcctgggcagggggagccctcggtcaccgtcaccggggcctggatagtgggagccattggtcactgttaccgggacctgggtgggaggagccctcagttaccttcaccggggcctgggcagtgggaggcgcccttggtcaccgtcaccagggcctgagcagtgggcgcaggactttactcccgcttagttgatttcaggctcgtgttagcctgggtgttgcccttgccatcttcccccctcacctctgcctgccattcctgcatcagcctcccaaagctctgggaatacaggcgtgagccactgcgcccggccaagtgtttctcttagaatttcctgaaatgatagggtctctggaggggcaggtgctgggcttgagccctgggtaggaccctgcaggggagaggtggtcctgcagcccacagaggatggctctgtcctgttcctcatggtgcagatctccacaatggaagttcgaagcaagcaaaagccacgcaaaccacaggccgatctgtctgagccctaggatttggcccggttctgcttcagccaccagcaccgtctgctcctcctcagaatccttcctcccccgtggcccgcccgccgtgtccctcctcctccacggcccgcccaccgtgtccttccctcccccgtggcccacccaccatgtccttccctcccctgtggcccacccgccatgtccctgcctcccacccgacatgccccttgagctgcctgggccctgctgttgtccccactgcctgtgtgactctgcgcccccttccctaccctgccccaccctggttcagggagcgtccaggcccattctcatcctcagggccttccctggcccttgccactctgtgccgtgtcatgacctgaagctgcaggtgggcgcctcccccttccgtcatggctgtcccccttctgtgaggtgtcccagccgcctgattgccggagtcccagggtgctcggtgctgtcgtggagcctgggacattcactgtctgggattgattccagggttggagccacacctggtctggggcattcgctgtcctgggtcagagcccctcctggtctgggacattcgctgtctggggttggagccacacctggtctggggcatttgctgtccggggtcggagcctcacctggtgaagatacagaacatgctgctgccctaaccccgtgtggtgtgccccctgtccccgggtgtcgttcccatagccagcccttgtctcatctcgtctcatcctctagatgctgtgggccctgagggaagacagttatcagggcaagctgtgctctgagtttcgggttctgctcctacaaagaacgtgcggtgctgcgggcgagggccccggcacggacaagggccactgcagagtgtgtttctgctcgtcagctgccctgggcagcggatgggctgggcgatgcagctggatgcacatctcattctgtcatgaatgtccagtaaaaatctgaattggttgc

SEQ ID NO: 7587 - DNA, 1632 bp, Homo sapiens
  source 1..1632: mol_type = unassigned DNA
gtgctcccgccccccgggaatgaatggatgggcggcctcagcgcccgcccgaccgctgggaggaccgacccggcggggacctgctgggggcaggacccggggagcaagatggccactgtcatccctggccccctgagcctaggcgaggacttctaccgcgaggccatcgagcactgccgcagttacaacgcgcgcctgtgcgccgagcgcagcctgcgactgcccttcctcgactcgcagaccggcgtggcccagaacaactgctacatctggatggagaagacccaccgcgggccgggtttggccccgggacagatttacacgtaccccgcccgctgttggaggaagaaacggagactcaacatcctggaggaccccagactcaggccctgcgagtacaagatcgactgtgaagcacccctgaagaaggagggtggcctcccggaagggccggtcctcgaggctctactgtgtgcagagacgggggagaagaagattgagctgaaggaggaggagaccattatggactgtcagaaacagcagttgctggagtttccgcatgacctcgaggtggaagacttggaggatgacattcccaggaggaagaacagggccaaaggaaaggcatatggcatcgggggtctccggaaacgccaggacaccgcttccctggaggaccgagacaagccgtatgtctgtgatatctgtgggaaacggtataagaaccggccggggctcagctaccactacacccacacccacctggccgaggaggagggggaggagaacgccgaacgccacgccctgcccttccaccggaaaaacaaccataaacagttttacaaagaattggcctgggtccctgaggcacaaaggaaacacacagccaagaaggcgcccgacggcactgtcatccccaacggctactgtgacttctgcctggggggctccaagaagacggggtgtcccgaggacctcatctcctgtgcggactgtgggcgatcaggacacccctcgtgtttacaattcacggtgaacatgacggcagccgtgcggacctaccgctggcagtgcatcgagtgcaaatcctgcagcctgtgcggaacctccgagaacgacgaccagctgctgttttgtgatgactgcgatcggggttaccacatgtactgcctgagtccccccatggcggagcccccggaagggagctggagctgtcacctctgtctccggcacctgaaggaaaaggcttctgcttacatcaccctcacctaggccggctcggctcgccgcgactctggggtggtgctcgcctacctgcctctccgagctcctcaattctcccccaccctgaacatcccgcagggggagggggagagggggaagccgagagggggctgggccaccccctcccctctgtgcaagtggaatgtctgccctgtgggtgggtgggcccggccagggcctctccctccctccctccctctctgtcccttggcaaatggacaccaggggcttctcccctcaaagccataccccgcctctgggcgggcatggggggtggtgggtgccagccaggggcatggacagagcctttttctaaagaaaaagacaaaaagttaaaaaaaaaaaaaa

SEQ ID NO: 7588 - DNA, 3229 bp, Homo sapiens
  source 1..3229: mol_type = unassigned DNA
acattgtagcaaaatggcgactgtcattcacaaccccctgaaagcgctcggggaccagttctacaaggaagccattgagcactgccggagttacaactcacggctgtgtgcagagcgcagcgtgcgtcttcccttcctggactcacagactggggtggcccagaacaactgctacatctggatggagaagaggcaccgaggcccaggccttgccccgggccagctgtatacataccctgcccgctgctggcgcaagaagagacgattgcacccacctgaagatccaaaactgcggctgctggagataaaacctgaagtggagcttcccctgaagaaggatgggttcacctcagagagcaccacgctggaagccttgctccgtggcgagggggttgagaagaaggtggatgccagggaggaggaaagcatccaggaaatacagagggttttggaaaatgatgaaaatgtagaagaagggaatgaagaagaggatttggaagaggatattcccaagcgaaagaacaggactagaggacgggctcgcggctctgcagggggcaggaggaggcacgacgccgcctctcaggaagaccacgacaaaccttacgtctgtgacatctgtggcaagcgctacaagaaccgaccggggctcagctaccactatgctcacactcacctggccagcgaggagggggatgaagctcaagaccaggagactcggtccccacccaaccacagaaatgagaaccacaggccccagaaaggaccggatggaacagtcattcccaataactactgtgacttctgcttggggggctccaacatgaacaagaagagtgggcggcctgaagagctggtgtcctgcgcagactgtggacgctctgctcatttgggaggagaaggcaggaaggagaaggaggcagcggccgcagcacgtaccacggaggacttattcggttccacgtcagaaagtgacacgtcaactttccacggctttgatgaggacgatttggaagagcctcgctcctgtcgaggacgccgcagtggccggggttcgcccacagcagataaaaagggcagttgctaaacccacggaacagactctctgggcaattagccatccccctctgactttggtcattgtgctggttctgatatatattttttttaatgaaaggcaactttagattttccctctatccttgctttttttcccttcacctcccacgtgtccctccatccctccccccacccctctgttttgggtatgtacaacagaagcacaaactactgaaacaaaacaaaacagcagaatgagcgttcttccgagagatggcatcgtgatgcgctatttattttccatagaaataggaagttagacggattgtctcttttctgaggggagggggtctttttgacaggagcagagttgatgtcctcaattttcatatttattggcaaaaggaagagaagaggaactttgggttggaaacaaagaaccaataacattaaaacattattatttatatattctagctgttattagaatcagactttttttgcgagagagagagagagagagagagaagggaaatcaaagaaatcgaagcaatatcctgtttagaggcaagccgcccggtggggagaatttcctcaatgggagacggttgcactattctgtgccccacggagtttgcggctccccgcggcagacccctccctcattctcctccctgacctttccatcttcctctctgcttgcgagaaaatgtcagtagttccagagaagtcggggtgcctatgcctggcctccctccacacctgggccctgaccagccgcctcctgggctcctcctcctccgtcagtagagctgctgttttgttattgctggtttttcctcactttcctcctggcaaagaacgacttccaaatgcagggatggaatataagcagaacgtcatgggctcagcagtgactccaccacccgaggccgaggccgtgcttctggaagatagaaggagacatcatcgtgtgtttcccctccccttgcccctgttaagaaacgtatcaatacccattggatgatcaaggctaccgtatttcttctatttttttttatagtgcctgccaggcactttgttttatgtttccaatagcacttcctgaaataaaccaaagcaacactgctcaaggcccctggggcgatggagaaggccacccacctcactgacagtcccaagaatgaccggctgcgaggtcctagtcaaaagtcaacattatgacctggggactccagcatccttcaagcaagccatttccgaagaaggtgaaaagaagccaggatgattggcacctcctcctcctcctcctcttcttcctcttcccttgcccagccccctcctgtgcgtgtgtttcagacaacacaggagccagcacaggagtggaaaatcctgcagcgcaactcagctcagcccacagaagccttgggaatggcctcagtttgtgcaataagaagattttttttttctttttaaatcttcattatattttctttgattgtctgtgagaaagtacccaggtccgcctggaattactctacagtagaaataactgaacacaaacaaactgatggaaaaaaagagttaactattttatttatttcaatatttaaaaggaaaaaagtgctgacatggcacagtatttttgtttaaagtacctcctacttcaaaagttaagcgcaattttgtgaagacatgaaatcataagagtacttaatgtaaaataaaagactgcatattaactctaaagaaaaatgccccacattttaaataagaaaataaagatcaactctgctctctcaggctttttaaaaagccattcatgtatgtgctttaggtatttttatttctgcgagttggatgtggtaagtgaggagtgctcagtttttttttcctccttcaaaagtctattgaaagtgttggtgatgttaaatgattgtgtgttaagatttgactgaaataacttagccacaaatcagcagtttcccccaccctcattgccccctcaccccaggcaagccccttttatctgaatgtcagaagcagcctgcctcctagttatcatgtctgatgaggtctagctcaggaaggaattccatctattgatggaatatatcccctcaagttcaatagattcgaacacagagagctttgtttaaaataatgcagc

SEQ ID NO: 7589 - DNA, 2303 bp, Homo sapiens
  source 1..2303: mol_type = unassigned DNA
gcggcagagcgggcggcgcaggccgggctgggcccgcgcgcggcggcagcggcgccccgggccggaggcggcccagccgagcgggccatggccaccgccattcagaacccgctcaagtcgcgaggacttctaccgcgaggccatcgagcactgccgcagttacaacgcgcgcctgtgcgccgagcgcagcctgcgactgcccttcctcgactcgcagaccggcgtggcccagaacaactgctacatctggatggagaagacccaccgcgggccgggtttggccccgggacagatttacacgtaccccgcccgctgttggaggaagaaacggagactcaacatcctggaggaccccagactcaggccctgcgagtacaagatcgactgtgaagcacccctgaagaaggagggtggcctcccggaagggccggtcctcgaggctctactgtgtgcagagacgggggagaagaagattgagctgaaggaggaggagaccattatggactgtcagaaacagcagttgctggagtttccgcatgacctcgaggtggaagacttggaggatgacattcccaggaggaagaacagggccaaaggaaaggcatatggcatcgggggtctccggaaacgccaggacaccgcttccctggaggaccgagacaagccgtatgtctgtgatatctgtgggaaacggtataagaaccggccggggctcagctaccactacacccacacccacctggccgaggaggagggggaggagaacgccgaacgccacgccctgcccttccaccggaaaaacaaccataaacagttttacaaagaattggcctgggtccctgaggcacaaaggaaacacacagccaagaaggcgcccgacggcactgtcatccccaacggctactgtgacttctgcctggggggctccaagaagacggggtgtcccgaggacctcatctcctgtgcggactgtgggcgatcaggacacccctcgtgtttacaattcacggtgaacatgacggcagccgtgcggacctaccgctggcagtgcatcgagtgcaaatcctgcagcctgtgcggaacctccgagaacgacgaccagctgctgttttgtgatgactgcgatcggggttaccacatgtactgcctgagtccccccatggcggagcccccggaagggagctggagctgtcacctctgtctccggcacctgaaggaaaaggcttctgcttacatcaccctcacctaggccggctcggctcgccgcgactctggggtggtgctcgcctacctgcctctccgagctcctcaattctcccccaccctgaacatcccgcagggggagggggagagggggaagccgagagggggctgggccaccccctcccctctgtgcaagtggaatgtctgccctgtgggtgggtgggcccggccagggcctctccctccctccctccctctctgtcccttggcaaatggacaccaggggcttctcccctcaaagccataccccgcctctgggcgggcatggggggtggtgggtgccagccaggggcatggacagagcctttttctaaagaaaaagacaaaaagttaaaaaaaaaaaaaagaagaaaagaaaagaagttaatatatacaaagagtcctccaaggcctggctgggtggaggggcgctgctgagagtgtccaccgggcacccgcctctgccggccccccgccgggcgccccaaccccaatttctggagctgcagccgtcccgcgccccacccaaggtgggcgccttcccctcttgtgcccagggcggtgggcgtggtgtccacccgcccctcctggtgcccacggtggatactgcatgatgtgaaccttggttttgaactctgttcctgcccctccccgaccgccccagcctgtgcccgccccgtgcctgccgtggctggtgggtggcggtggtggggccgggtgggcccccgcccagcgcctgctggaatgagaagcacagactccgccacggactccttttctctccctcctcccgccccgccaggcctggcggcccccgcccccctcgctggccattttgggggagtgagggggcgtggttgtttcttgtggttgtgtgtgtttgttgttcgggttttaaaaaagggaaactgagactgcaggtgggggaggtggtgggttttggggggatgtcccctaatccaggagtgccccctcacttgtcaccgagtctcctctattgcctgcctctgctgtgaattaacttgttctgtgtattaaactgggcctgacccctctgccca

SEQ ID NO: 7590 - DNA, 2227 bp, Homo sapiens
  source 1..2227: mol_type = unassigned DNA
gtgctcccgccccccgggaatgaatggatgggcggcctcagcgcccgcccgaccgctgggaggaccgacccggcggggacctgctgggggcaggacccggggagcaagatggccactgtcatccctggccccctgagcctaggcgaggacttctaccgcgaggccatcgagcactgccgcagttacaacgcgcgcctgtgcgccgagcgcagcctgcgactgcccttcctcgactcgcagaccggcgtggcccagaacaactgctacatctggatggagaagacccaccgcgggccgggtttggccccgggacagatttacacgtaccccgcccgctgttggaggaagaaacggagactcaacatcctggaggaccccagactcaggccctgcgagtacaagatcgactgtgaagcacccctgaagaaggagggtggcctcccggaagggccggtcctcgaggctctactgtgtgcagagacgggggagaagaagattgagctgaaggaggaggagaccattatggactgtcagaaacagcagttgctggagtttccgcatgacctcgaggtggaagacttggaggatgacattcccaggaggaagaacagggccaaaggaaaggcatatggcatcgggggtctccggaaacgccaggacaccgcttccctggaggaccgagacaagccgtatgtctgtgataagttttacaaagaattggcctgggtccctgaggcacaaaggaaacacacagccaagaaggcgcccgacggcactgtcatccccaacggctactgtgacttctgcctggggggctccaagaagacggggtgtcccgaggacctcatctcctgtgcggactgtgggcgatcaggacacccctcgtgtttacaattcacggtgaacatgacggcagccgtgcggacctaccgctggcagtgcatcgagtgcaaatcctgcagcctgtgcggaacctccgagaacgacggtgccagctgggcgggtctcaccccccaggaccagctgctgttttgtgatgactgcgatcggggttaccacatgtactgcctgagtccccccatggcggagcccccggaagggagctggagctgtcacctctgtctccggcacctgaaggaaaaggcttctgcttacatcaccctcacctaggccggctcggctcgccgcgactctggggtggtgctcgcctacctgcctctccgagctcctcaattctcccccaccctgaacatcccgcagggggagggggagagggggaagccgagagggggctgggccaccccctcccctctgtgcaagtggaatgtctgccctgtgggtgggtgggcccggccagggcctctccctccctccctccctctctgtcccttggcaaatggacaccaggggcttctcccctcaaagccataccccgcctctgggcgggcatggggggtggtgggtgccagccaggggcatggacagagcctttttctaaagaaaaagacaaaaagttaaaaaaaaaaaaaagaagaaaagaaaagaagttaatatatacaaagagtcctccaaggcctggctgggtggaggggcgctgctgagagtgtccaccgggcacccgcctctgccggccccccgccgggcgccccaaccccaatttctggagctgcagccgtcccgcgccccacccaaggtgggcgccttcccctcttgtgcccagggcggtgggcgtggtgtccacccgcccctcctggtgcccacggtggatactgcatgatgtgaaccttggttttgaactctgttcctgcccctccccgaccgccccagcctgtgcccgccccgtgcctgccgtggctggtgggtggcggtggtggggccgggtgggcccccgcccagcgcctgctggaatgagaagcacagactccgccacggactccttttctctccctcctcccgccccgccaggcctggcggcccccgcccccctcgctggccattttgggggagtgagggggcgtggttgtttcttgtggttgtgtgtgtttgttgttcgggttttaaaaaagggaaactgagactgcaggtgggggaggtggtgggttttggggggatgtcccctaatccaggagtgccccctcacttgtcaccgagtctcctctattgcctgcctctgctgtgaattaacttgttctgtgtattaaactgggcctgacccctctgcccacga

SEQ ID NO: 7591 - DNA, 1084 bp, Homo sapiens
  source 1..1084: mol_type = unassigned DNA
gaatgaaatcgtagcgcgctgggcggcagagcgggcggcagcggcgccccgggccggaggcggcccagccgagcgggccatggccaccgccattcagaacccgctcaagtccctaggcgaggacttctaccgcgaggccatcgagcactgccgcagttacaacgcgcgcctgtgcgccgagcgcagcctgcgactgcccttcctcgactcgcagaccggcgtggcccagaacaactgctacatctggatggagaagacccaccgcgggccgggtttggccccgggacagatttacacgtaccccgcccgctgttggaggaagaaacggagactcaacatcctggaggaccccagactcaggccctgcgagtacaagatcgactgtgaagcacccctgaagaaggagggtggcctcccggaagggccggtcctcgaggctctactgtgtgcagagacgggggagaagaagattgagctgaaggaggaggagaccattatggactgtcagaaacagcagttgctggagtttccgcatgacctcgaggtggaagacttggaggatgacattcccaggaggaagaacagggccaaaggaaaggcatatggcatcgggggtctccggaaacgccaggacaccgcttccctggaggaccgagacaagccgtatgtctgtgatagtgagtccttctgaagagggggaaaggcagagagaggggtgcccagagactccccacctcgtggccctctccctcccgttccagacccgggttgggaggctgctcaggtctctggctgaggggggaggtgtgatcctggaggccagggtggaggcggcaggggcccggaggggctgacaggccctcctggctcgctcgctccccagtctgtgggaaacggtataagaaccggccggggctcagctaccactacacccacacccacctggccgaggaggagggggaggagaacgccgaacgccacgccctgcccttccaccggaaaaacaaccataaacgtgagctggcaggccaggtgggggtggccaggggccctgggagtggggaagaggagcccagctgggggt

SEQ ID NO: 7592 - DNA, 2326 bp, Homo sapiens
  source 1..2326: mol_type = unassigned DNA
gtgctcccgccccccgggaatgaatggatgggcggcctcagcgcccgcccgaccgctgggaggaccgacccggcggggacctgctgggggcaggacccggggagcaagatggccactgtcatccctggccccctgagcctaggcgaggacttctaccgcgaggccatcgagcactgccgcagttacaacgcgcgcctgtgcgccgagcgcagcctgcgactgcccttcctcgactcgcagaccggcgtggcccagaacaactgctacatctggatggagaagacccaccgcgggccgggtttggccccgggacagatttacacgtaccccgcccgctgttggaggaagaaacggagactcaacatcctggaggaccccagactcaggccctgcgagtacaagatcgactgtgaagcacccctgaagaaggagggtggcctcccggaagggccggtcctcgaggctctactgtgtgcagagacgggggagaagaagattgagctgaaggaggaggagaccattatggactgtcagaaacagcagttgctggagtttccgcatgacctcgaggtggaagacttggaggatgacattcccaggaggaagaacagggccaaaggaaaggcatatggcatcgggggtctccggaaacgccaggacaccgcttccctggaggaccgagacaagccgtatgtctgtgatatctgtgggaaacggtataagaaccggccggggctcagctaccactacacccacacccacctggccgaggaggagggggaggagaacgccgaacgccacgccctgcccttccaccggaaaaacaaccataaacagttttacaaagaattggcctgggtccctgaggcacaaaggaaacacacagccaagaaggcgcccgacggcactgtcatccccaacggctactgtgacttctgcctggggggctccaagaagacggggtgtcccgaggacctcatctcctgtgcggactgtgggcgatcaggacacccctcgtgtttacaattcacggtgaacatgacggcagccgtgcggacctaccgctggcagtgcatcgagtgcaaatcctgcagcctgtgcggaacctccgagaacgacgaccagctgctgttttgtgatgactgcgatcggggttaccacatgtactgcctgagtccccccatggcggagcccccggaagggagctggagctgtcacctctgtctccggcacctgaaggaaaaggcttctgcttacatcaccctcacctaggccggctcggctcgccgcgactctggggtggtgctcgcctacctgcctctccgagctcctcaattctcccccaccctgaacatcccgcagggggagggggagagggggaagccgagagggggctgggccaccccctcccctctgtgcaagtggaatgtctgccctgtgggtgggtgggcccggccagggcctctccctccctccctccctctctgtcccttggcaaatggacaccaggggcttctcccctcaaagccataccccgcctctgggcgggcatggggggtggtgggtgccagccaggggcatggacagagcctttttctaaagaaaaagacaaaaagttaaaaaaaaaaaaaagaagaaaagaaaagaagttaatatatacaaagagtcctccaaggcctggctgggtggaggggcgctgctgagagtgtccaccgggcacccgcctctgccggccccccgccgggcgccccaaccccaatttctggagctgcagccgtcccgcgccccacccaaggtgggcgccttcccctcttgtgcccagggcggtgggcgtggtgtccacccgcccctcctggtgcccacggtggatactgcatgatgtgaaccttggttttgaactctgttcctgcccctccccgaccgccccagcctgtgcccgccccgtgcctgccgtggctggtgggtggcggtggtggggccgggtgggcccccgcccagcgcctgctggaatgagaagcacagactccgccacggactccttttctctccctcctcccgccccgccaggcctggcggcccccgcccccctcgctggccattttgggggagtgagggggcgtggttgtttcttgtggttgtgtgtgtttgttgttcgggttttaaaaaagggaaactgagactgcaggtgggggaggtggtgggttttggggggatgtcccctaatccaggagtgccccctcacttgtcaccgagtctcctctattgcctgcctctgctgtgaattaacttgttctgtgtattaaactgggcctgacccctctgccca

SEQ ID NO: 7593 - DNA, 1562 bp, Homo sapiens
  source 1..1562: mol_type = unassigned DNA
gcggcagagcgggcggcgcaggccgggctgggcccgcgcgcggcggcagcggcgccccgggccggaggcggcccagccgagcgggccatggccaccgccattcagaacccgctcaagtccctaggcgaggacttctaccgcgaggccatcgagcactgccgcagttacaacgcgcgcctgtgcgccgagcgcagcctgcgactgcccttcctcgactcgcagaccggcgtggcccagaacaactgctacatctggatggagaagacccaccgcgggccgggtttggccccgggacagatttacacgtaccccgcccgctgttggaggaagaaacggagactcaacatcctggaggaccccagactcaggccctgcgagtacaagatcgactgtgaagcacccctgaagaaggagggtggcctcccggaagggccggtcctcgaggctctactgtgtgcagagacgggggagaagaagattgagctgaaggaggaggagaccattatggactgtcagaaacagcagttgctggagtttccgcatgacctcgaggtggaagacttggaggatgacattcccaggaggaagaacagggccaaaggaaaggcatatggcatcgggggtctccggaaacgccaggacaccgcttccctggaggaccgagacaagccgtatgtctgtgatatctgtgggaaacggtataagaaccggccggggctcagctaccactacacccacacccacctggccgaggaggagggggaggagaacgccgaacgccacgccctgcccttccaccggaaaaacaaccataaacagttttacaaagaattggcctgggtccctgaggcacaaaggaaacacacagccaagaaggcgcccgacggcactgtcatccccaacggctactgtgacttctgcctggggggctccaagaagacggggtgtcccgaggacctcatctcctgtgcggactgtgggcgatcaggacacccctcgtgtttacaattcacggtgaacatgacggcagccgtgcggacctaccgctggcagtgcatcgagtgcaaatcctgcagcctgtgcggaacctccgagaacgacgaccagctgctgttttgtgatgactgcgatcggggttaccacatgtactgcctgagtccccccatggcggagcccccggaagggagctggagctgtcacctctgtctccggcacctgaaggaaaaggcttctgcttacatcaccctcacctaggccggctcggctcgccgcgactctggggtggtgctcgcctacctgcctctccgagctcctcaattctcccccaccctgaacatcccgcagggggagggggagagggggaagccgagagggggctgggccaccccctcccctctgtgcaagtggaatgtctgccctgtgggtgggtgggcccggccagggcctctccctccctccctccctctctgtcccttggcaaatggacaccaggggcttctcccctcaaagccataccccgcctctgggcgggcatggggggtggtgggtgccagccaggggca

SEQ ID NO: 7594 - DNA, 2799 bp, Homo sapiens
  source 1..2799: mol_type = unassigned DNA
agtgctcgctctagtgcgcgcgcccggacggcgcctgcgcagagggcaaggaacctggtaccccggtgcggtcccggcgcctgcgcgctgcggactgtggggcttctcggcccgaggcagaggaacagggaagatggcggctgtggtggagaatgtagtgaagctccttggggagcagtactacaaagatgccatggagcagtgccacaattacaatgctcgcctctgtgctgagcgcagcgtgcgcctgcctttcttggactcacagaccggagtagcccagagcaattgttacatctggatggaaaagcgacaccggggtccaggattggcctccggacagctgtactcctaccctgcccggcgctggcggaaaaagcggcgagcccatccccctgaggatccacgactttccttcccatctattaagccagacacagaccagaccctgaagaaggaggggctgatctctcaggatggcagtagtttagaggctctgttgcgcactgaccccctggagaagcgaggtgccccggatccccgagttgatgatgacagcctgggcgagtttcctgtgaccaacagtcgagcgcgaaagcggatcctagaaccagatgacttcctggatgacctcgatgatgaagactatgaagaagatactcccaagcgtcggggaaaggggaaatccaagggtaagggtgtgggcagtgcccgtaagaagctggatgcttccatcctggaggaccgggataagccctatgcctgtgacatttgtggaaaacgttacaagaaccgaccaggcctcagttaccactatgcccactcccacttggctgaggaggagggcgaggacaaggaagactctcaaccacccactcctgtttcccagaggtctgaggagcagaaatccaaaaagggtcctgatggattggccttgcccaacaactactgtgacttctgcctgggggactcaaagattaacaagaagacgggacaacccgaggagctggtgtcctgttctgactgtggccgctcagggcatccatcttgcctccaatttacccccgtgatgatggcggcagtgaagacataccgctggcagtgcatcgagtgcaaatgttgcaatatctgcggcacctccgagaatgacgaccagttgctcttctgtgatgactgcgatcgtggctaccacatgtactgtctcaccccgtccatgtctgagccccctgaaggaagttggagctgccacctgtgtctggacctgttgaaagagaaagcttccatctaccagaaccagaactcctcttgatgtggccacccacctgctccccgacatatctaaggctgtttctctcctccacttcatatttcatacccatctttcccttcttcctcctctccttcacaaatccagagaaccttggggtggttgtgccagcctgcctttggcagctgcaagctgaggtggcagctctgaccacctctggccccaggccctcagggagaaaggagcaacacactgcccctaggcgtgcgtgtggcccagtttctctctgctctccattaagtgcattcactctgcttgccttgggcccagcccctggtgatcacagggttcaaacagtgtcctcctagaaagagtgggagagcagctcacttctctgtgttctgcctcccctctggtctccagagttttcctgtcctctagaggcaagccaggccagggagctgggagcgagcaagctgaggccacgtccacaaggagcttttcatgcccctgtgccgcatagcctcacctctttcctccagagtggctctctgcggccctgtgttcctgctacagagtgttcttttctggagtcaggatgttctcggtcaccctcctggttctgccctgtcccattccaccccaccccagggggaacagtagcttcaccttgttattcccattgctctcctggctcactcttacggtcggtctccagtgactgaagcattccccacccttggaatttctcatcttctgcctcccttcctactccttttggttttgtggggagaggggaaggatcagggggccaggccagcagctcgggggccacaaggagatggataatgtgcctgttttttaacacaacaaaaaagcctacctccaaaatcccctttttgttcttcctggacctgggcattcagcctcctgctcttaactgaattgggagcctctgccacctgccccgtgtatcctggctctcagctcatggggaagccacatagacatccctttcttcccttgcacgctcgctagcagctggtaaggtcttcacaccctgattcctcaagttttctgcttagtggcactgacattaagtagtggggggacagtccatgccaggacaccctggagtagccttcccccttggccgtgggcaggccctaactcactgtcgctttggagttgaggtgtcttttttttttctttctttagttcctgtattctaaacattagtaaaaataaatgtttttacacagagccctctgctggatggtttatctcctgcctttctccattaagaaggccatttcatcctaagatttccatgatggtggtttttttttttaatgttttgaaatacagcttttttccccccaaattaaaatttttttgtggaaccccaatatgtaaagcgaatataaaattggttattttgttttgttacataaattcaagtttataacaattctttgttataaagaacaatgaagctgttttgatcaatacaaaatttgggttaaaatcaa

SEQ ID NO: 7595 - DNA, 1135 bp, Homo sapiens
  source 1..1135: mol_type = unassigned DNA
agcagcattattcagaatagacttaaaaagctcggggaccagttctacaaggaagccattgagcactgccggagttacaactcacggctgtgtgcagagcgcagcgtgcgtcttcccttcctggactcacagactggggtggcccagaacaactgctacatctggatggagaagaggcaccgaggcccaggccttgccccgggccagctgtatacataccctgcccgctgctggcgcaagaagagacgattgcacccacctgaagatccaaaactgcggctgctggagataaaacctgaagtggagcttcccctgaagaaggatgggttcacctcagagagcaccacgctggaagccttgctccgtggcgagggggttgagaagaaggtggatgccagggaggaggaaagcatccaggaaatacagagggttttggaaaatgatgaaaatgtagaagaagggaatgaagaagaggatttggaagaggatattcccaagcgaaagaacaggactagaggacgggctcgcggctctgcagggggcaggaggaggcacgacgccgcctctcaggaagaccacgacaaaccttacgtctgtgacatctgtggcaagcgctacaagaaccgaccggggctcagctaccactatgctcacactcacctggccagcgaggagggggatgaagctcaagaccaggagactcggtccccacccaaccacagaaatgagaaccacaggccccagaaaggaccggatggaacagtcattcccaataactactgtgacttctgcttggggggctccaacatgaacaagaagagtgggcggcctgaagagctggtgtcctgcgcagactgtggacgctctggtcacccaacctgcctgcagtttaccctgaacatgaccgaggctgtcaagacctacaagtggcagtgcatagagtgcaaatcctgtatcctctgtgggacctcagagaatgatgaccagctactcttctgcgatgactgtgaccgaggctatcacatgtactgtttaaatcccccggtggctgagcccccagaaggaagctggagctgccacttatgctgggaactgctcaaagagaaagcctcagcctttggctgccaggcctagg

SEQ ID NO: 7596 - DNA, 2271 bp, Homo sapiens
  source 1..2271: mol_type = unassigned DNA
acattgtagcaaaatggcgactgtcattcacaaccccctgaaagcgctcggggaccagttctacaaggaagccattgagcactgccggagttacaactcacggctgtgtgcagagcgcagcgtgcgtcttcccttcctggactcacagactggggtggcccagaacaactgctacatctggatggagaagaggcaccgaggcccaggccttgccccgggccagctgtatacataccctgcccgctgctggcgcaagaagagacgattgcacccacctgaagatccaaaactgcggctgctggagataaaacctgaagtggagcttcccctgaagaaggatgggttcacctcagagagcaccacgctggaagccttgctccgtggcgagggggttgagaagaaggtggatgccagggaggaggaaagcatccaggaaatacagagggttttggaaaatgatgaaaatgtagaagaagggaatgaagaagaggatttggaagaggatattcccaagcgaaagaacaggactagaggacgggctcgcggctctgcagggggcaggaggaggcacgacgccgcctctcaggaagaccacgacaaaccttacgtctgtgacatctgtggcaagcgctacaagaaccgaccggggctcagctaccactatgctcacactcacctggccagcgaggagggggatgaagctcaagaccaggagactcggtccccacccaaccacagaaatgagaaccacaggccccagaaaggaccggatggaacagtcattcccaataactactgtgacttctgcttggggggctccaacatgaacaagaagagtgggcggcctgaagagctggtgtcctgcgcagactgtggacgctctgctcatttgggaggagaaggcaggaaggagaaggaggcagcggccgcagcacgtaccacggaggacttattcggttccacgtcagaaagtgacacgtcaactttccacggctttgatgaggacgatttggaagagcctcgctcctgtcgaggacgccgcagtggccggggttcgcccacagcagataaaaagggcagttgctaaacccacggaacagactctctgggcaattagccatccccctctgactttggtcattgtgctggttctgatatatattttttttaatgaaaggcaactttagattttccctctatccttgctttttttcccttcacctcccacgtgtccctccatccctccccccacccctctgttttgggtatgtacaacagaagcacaaactactgaaacaaaacaaaacagcagaatgagcgttcttccgagagatggcatcgtgatgcgctatttattttccatagaaataggaagttagacggattgtctcttttctgaggggagggggtctttttgacaggagcagagttgatgtcctcaattttcatatttattggcaaaaggaagagaagaggaactttgggttggaaacaaagaaccaataacattaaaacattattatttatatattctagctgttattagaatcagactttttttgcgagagagagagagagagagagagaagggaaatcaaagaaatcgaagcaatatcctgtttagaggcaagccgcccggtggggagaatttcctcaatgggagacggttgcactattctgtgccccacggagtttgcggctccccgcggcagacccctccctcattctcctccctgacctttccatcttcctctctgcttgcgagaaaatgtcagtagttccagagaagtcggggtgcctatgcctggcctccctccacacctgggccctgaccagccgcctcctgggctcctcctcctccgtcagtagagctgctgttttgttattgctggtttttcctcactttcctcctggcaaagaacgacttccaaatgcagggatggaatataagcagaacgtcatgggctcagcagtgactccaccacccgaggccgaggccgtgcttctggaagatagaaggagacatcatcgtgtgtttcccctccccttgcccctgttaagaaacgtatcaatacccattggatgatcaaggctaccgtatttcttctatttttttttatagtgcctgccaggcactttgttttatgtttccaatagcacttcctgaaataaaccaaagcaacactgctcaaggcccctggggcgatggagaaggccacccacctcactgacagtcccaagaatgaccggctgcgaggtcctagtcaaaag

SEQ ID NO: 7597 - DNA, 1138 bp, Homo sapiens
  source 1..1138: mol_type = unassigned DNA
atggcgactgtcattcacaaccccctgaaagcgctcggggaccagttctacaaggaagccattgagcactgccggagttacaactcacggctgtgtgcagagcgcagcgtgcgtcttcccttcctggactcacagactggggtggcccagaacaactgctacatctggatggagaagaggcaccgaggcccaggccttgccccgggccagctgtatacataccctgcccgctgctggcgcaagaagagacgattgcacccacctgaagatccaaaactgcggctgctggagataaaacctgaagtggagcttcccctgaagaaggatgggttcacctcagagagcaccacgctggaagccttgctccgtggcgagggggttgagaagaaggtggatgccagggaggaggaaagcatccaggaaatacagagggttttggaaaatgatgaaaatgtagaagaagggaatgaagaagaggatttggaagaggatattcccaagcgaaagaacaggactagaggacgggctcgcggctctgcagggggcaggaggaggcacgacgccgcctctcaggaagaccacgacaaaccttacgtctgtgacatctgtggcaagcgctacaagaaccgaccggggctcagctaccactatgctcacactcacctggccagcgaggagggggatgaagctcaagaccaggagactcggtccccacccaaccacagaaatgagaaccacaggccccagaaaggaccggatggaacagtcattcccaataactactgtgacttctgcttggggggctccaacatgaacaagaagagtgggcggcctgaagagctggtgtcctgcgcagactgtggacgctctggtcacccaacctgcctgcagtttaccctgaacatgaccgaggctgtcaagacctacaagtggcagtgcatagagtgcaaatcctgtatcctctgtgggacctcagagaatgatgaccagctactcttctgcgatgactgtgaccgaggctatcacatgtactgtttaaatcccccggtggctgagcccccagaaggaagctggagctgccacttatgctgggaactgctcaaagagaaagcctcagcctttggctgccaggcctagg

SEQ ID NO: 7598 - DNA, 5055 bp, Homo sapiens
  source 1..5055: mol_type = unassigned DNA
aataatgcacctgactttaccaggggggaacaaccagccgagtagaacaaggaacagatgtaaagggaataaaaggagagagaaaaagagatgagattcgtttaaagaaatccaggggcagaagaggtggctgccgcggcagaggcagctagagcttacttccctgtctgcgtgagctgcaggcagaggacgctttcaccagttgcagatgtaacctcgggaattcctgggccgtcggtttgtttgccaaacaaagtcttttcttctctggctcagacactgaagaggctcctggatttttctgcgatcctgccacaagctggcagttacccgagagccttcccaaggagctggaggagaaatgagcccttgtgggcggaagatgggcgaagggcgtcagcagcggcgggctccggtcgggaagctccttctgctccccgggaggagagatacaccccatgggcggtcaggcagcagcggcgccaggacgcagcgctccctgctctggctcttggtgcacgtgtggctgtgggcggcctcgggctcctctgcccagttgttcaacctcaccctttccgtagatgaggggcttcccccggacacgctggtaggtgacatccgcgccgggctgccggccgcgcagcagcaggaggggagcggcttctttctgtcggaggactccgatgactccccgctgctggacgacttccacgtgcacccggacaccggcatcatccgcactgcgcggcgcctggaccgcgagcggcgggaccactacagcttcgtcgccgccacgctgctgggcgctgtggtgcaggtggagattcgcgtcaacgacgtgaatgaccactcgccccgctttcccctcgactccctgcaactcgacgtctccgagctcagcccgccagggaccgccttccgcctgccagttgcccacgatccggacgccggactgttcagcactcagggctacaccctggtgcaaccgtccgacctgcccaaggaccccgcaggcccgttcttccagttgcgctaccggactccggggccactaccgtcaccgcttttgccaggctcctcgtcacccctggagcctctagatctggtgctgctgcggcgcttggaccgagaggaggcggcggcgcaccggctgcagatcgaggcatgggacggcggccgaccccggcgcaccggcctcctgagcgtggagctgcgcgtgctggatgagaacgacaacccgccggtctttgagcaggacgagtaccgcgccgcggtgcgcgaggacgcccagccgggcgccgaggtctgtcgcgtgcgcgccaccgaccgcgacctggggcccaatggcttcgtgcgctacagcgtccgcgcccggcaagtgcctggggcgggtagcggcggcggggcactgggcgacgcggcctacttcgcggtggaggagctgagcggcgtggtgcgagtgtggagacctctggaccgcgaggcacaggcctggcaccagttggtggtggaggcccgcgatggaggcgccgagcctgaggttgccacggtgcgcgtgtccatcgccgtgctggacgtgaatgacaaccggccagcaattcacgtgctctttctcacagagggaggcgtcgcccgtgtctctgaaggcgcccgaccgggcgactacgtggctcgcgtctcggtgtctgacgcggacggtgactgggagaaggaagatgaggccacaggggagcttggtgtgggtcttggagacgggagcatctctctgtccttggaaggcggagagggagacttcgcgttgctacccggcggccccccaggggtatttttcctttgcgtggaggggcccctggacagagagagccgcgatctgtatgagttactactggtggccacggacgcggggtccccgccgctgagcacggaggagacgctgctactccgggtcgctgacctcaatgaccaaccacctctcttcagccaacagcattacaaggcctcagtgtccgaggccgcggcccctggcactgtagtcatgtgggtcagcgcctccgatgccgacgaggcaggcagtgatcacgcctggctgcgctacactgtagtccaactctcggctccctgcaatctcggctccctgcaatcaaagatggtccacaccgcagagtgtggaccatcttttgccattgattccgaaagcggtgcgatcagcactatccggactctagaccgagaggtccaggaggcggtggagctgaaagtggtggcccaggacctcggagagcccccactctctgccacctgcctggtgagcatcaccgtagatgatgtgaatgacaatgagcccatcttctggaggcaggtgtacaatgccaccattgcagagcatgccccggttggacactgctttctgcaggtgacagcctctgatgcagattcaggactctatggctttattgaatattctctttatgatggattcctgagctatgaagcacctcaggcattccggatcgaccctcatgatgggcaaatctgtgtttctcaagatatcgacagggaaagggatccagctacctatgatctcctggtggaagctaaggatgggggtgggctaagtgcccaagcctttgttcgtgtggacctggaggacgtgaatgataatcatcctgtgtttaacccatcaacctatgtgacgagcatcagtgatgagacccagccaggcaccgagatcatcaatgttcttgccactgaccaggactctgggatatatgggacagtggcttatgagcttattccaggaaacgtgtcgtccctttttaccattgactccaccacaggaattatttacttaacattacctcttagtcatttggaatctaccacactttcgttgatggtctctgctcaagacggtggtgggctcacagctgtcattaatgccgatgtcaccatacacattttccagacaactctggcacctgctgagtttgaaaggcctaagtacactttcttagtttatgaagatgtgcctgaagatagtcccattggaacagtgaaagcaagagagcccttgaactcctcagaaccaatcttttacaggatttcttctggtgatctcggcggaaagttctccattcacccgcggctgggcactattcgcacccggaagcccctggatcacgagacgcagcccgtggttgtgctcacggtgcaggcgcagctcggcagcgccccagcctgcagcagcaccgaggtcaacataacagtcatggatgtcaatgacaaccacccagcgttcctcaggacctcggatgagattagaatatcccagaccacgccccctggcacagccttgtacctcgcacgtgcggaagacagagacagtgggcggaacggactcatccggtactccatcgccagcccgcagccaggcgtctttgccatcgacagagccctgggggtgctgttcctcaacggcagcctgggcgcgggcgagcagcgggagctcacgctgactctcagggccgaggaccaaggcgtgcatcctcaggcagccctgctggtgctgacagtcgttatcgagaaacgcgaacacagcccatcctggactttcgaacatttggtctatcaagtggaagtcagtgagtctctctcaccgatgacacaaatgctgcaaacacaggcgcacccacttggcccccagcgtgcagcctcgcctcttaggtactcgctggaacccagcgtagactctgctatgtttggaatccgcccttacacgggctggatttatttgcggcgacagtttgactatgaatccacccaaacatataattttagagtgtttgcttggatccccgaggacggattcttgcaaaatgtgagcactacagtcattgttcgtgtctgggatgagaatgacaattcccccaccttcttgcatgatgtgttgtttttgaaagtcgaagagagccctgttccccaaggggtaataggcaaaattacagctattgacatggactctggaaagaatggacagctattatatttccttttgtctgatggaaaattcttcaagatgaatcctaatacaggagagttaatcaattgggtggcactggatcgtgagcaccgggggcaccatgagatgactgtgctagtgacagaccgcggctccccaccacgaaacgccaccatggcggtttacgtctcagttactgacatcaatgataacaggcccttcttcccccagtgtctccctggaaaggagttacacgtgaaggttctggaaggtcaaccagtaaatatgttggttacaactgtgtttgcaaaggatcctgatgaaggaaataatgcagaagttacatactcagtatcttcagctagacctatgcctctgaagggaaaaacagcatttgggaagcagtcgtgcaaaaaacaaacaaacaaacaaacaaacaaaatcctgacctgaatctggtcagttctctagatctgcctcccaatttaaggaaaacataagaatagaggaacatattatgctacacgttggagatgcaacagcaaatctagatcatggaaaatgtcaggatacaagttccagtttattcaacaaataaattgcaaggacaaatagagagatgggtggcaggaatccatagattaaagaaatatgcaatatatggactttattttgatcttaatgtaaacaagaaaaataaagagtatttatgggatggttgaaaatttgaaaacttactgaatatttggtgatactgtgaaccattattaatttttaaggtataatatggtactgtgatgattgtgttaaaatatttattttttaaagatgcattttgaaatatatacagaagaaataatatgacttctggaacttacttcaaaaaaaatgggagaagcgaagtatatacatggggaatagatgaaataagattggccatgagctgatcattgttgaagctaggtgatggactcgtgaaagtttattataccattttgtccacttttttgtatgcattttccataataaaaattttt

SEQ ID NO: 7599 - DNA, 8912 bp, Homo sapiens
  source 1..8912: mol_type = unassigned DNA
atgagactggatgagataacgaaatcagagaatgaagacggagaaaagaagatgtttactcagcagtttgaaagtactgatgcctgtgtatatgaggtgtatgtgaaaataaattccattgtgaaatctcagagtcagtgtggattgaaaagaggtagtcccgagactgagctctggggtgctatagtgttcagaagccaggaagagaacgcaaaaccagtgaaggaaactgaggtgacagcctctgatgcagattcaggactctatggctttattgaatattctctttatgatggattcctgagctatgaagcacctcaggcattccggatcgaccctcatgatgggcaaatctgtgtttctcaagatatcgacagggaaagggatccagctacctatgatctcctggtggaagctaaggatggggatgagcagagaatgacacatttagccctggtgaagggtgggctaagtgcccaagcctttgttcgtgtggacctggaggacgtgaatgataatcatcctgtgtttaacccatcaacctatgtgacgagcatcagtgatgagacccagccaggcaccgagatcatcaatgttcttgccactgaccaggactctgggatatatgggacagtggcttatgagcttattccaggaaacgtgtcgtccctttttaccattgactccaccacaggactctatagtccagaggtagaaattctgagtgctgtcaacttttcagcagacaaggaagtaatgaacagtttagagatgtttttacctctgctaaggcacttcaagaaggttgaaagagatgaggaagctgcagaaaaaaaatttgaagctagcagaggttggttcatgaggtttaagggaagacgccatctccattacctaaaagtgcaagatgaagcagcaagtgctgatggagaagctgcagcaaggtatgtagcaaatctagctaagattcttggtgaaggaattatttacttaacattacctcttagtcatttggaatctaccacactttcgttgatggtctctgctcaagacggtggtgggctcacagctgtcattaatgccgatgtcaccatacacattttccagacaactctggcacctgctgagtttgaaaggcctaagtacactttcttagtttatgaagatgtgcctgaagatagtcccattggaacagtgaaagcaagagagcccttgaactcctcagaaccaatcttttacaggatttcttctggtgatctcggcggaaagttctccattcacccgcggctgggcactattcgcacccggaagcccctggatcacgagacgcagcccgtggttgtgctcacggtgcaggcgcagctcggcagcgccccagcctgcagcagcaccgaggtcaacataacagtcatggatgtcaatgacaaccacccagcgttcctcaggacctcggatgagattagaatatcccagaccacgccccctggcacagccttgtacctcgcacgtgcggaagacagagacagtgggcggaacggactcatccggtactccatcgccagcccgcagccaggcgtctttgccatcgacagagccctgggggtgctgttcctcaacggcagcctgggcgcgggcgagcagcgggagctcacgctgactctcagggccgaggaccaaggcgtgcatcctcaggcagccctgctggtgctgacagtcgttatcgagaaacgcgaacacagcccatcctggactttcgaacatttggtctatcaagtggaagtcagtgagtctctctcaccgatgacacaaatgctgcaaacacaggcgcacccacttggcccccagcgtgcagcctcgcctcttaggtactcgctggaacccagcgtagactctgctatgtttggaatccgcccttacacgggctggatttatttgcggcgacagtttgactatgaatccacccaaacatataattttagagtgtttgcttggatccccgaggacggattcttgcaaaatgtgagcactacagtcattgttcgtgtctgggatgagaatgacaattcccccaccttcttgcatgatgtgttgtttttgaaagtcgaagagagccctgttccccaaggggtaataggcaaaattacagctattgacatggactctggaaagaatggacagctattatatttccttttgtctgatggaaaattcttcaagatgaatcctaatacaggtccagcaggcaccatctatgtcataacctgggcagatggtgctgctgcctttagtgggacagactttgcattcagttctgatgaacttcaagcctttgttctcaagtctctgttctgtgaattaggagaaggagagttaatcaattgggtggcactggatcgtgagcaccgggggcaccatgagatgactgtgctagtgacagaccgcggctccccaccacgaaacgccaccatggcggtttacgtctcagttactgacatcaatgataacaggcccttcttcccccagtgtctccctggaaaggagttacacgtgaaggttctggaaggtcaaccagtaaatatgttggttacaactgtgtttgcaaaggatcctgatgaaggaaataatgcagaagttacatactcagtatcttcagaagatagttctgatcactttaagattgacgccaacaatggtgaaataagaacaaccacaatactttcgtatgattatagaccttcctacagaatgagtgtcattgccactgaccagggagtgcctcctcttcaaggacaggcagttgttaatattcaggtgatcccactatccaaagggagagcaatcatgtctcagaatattagacatttaattataccagaaaatttgaagcccacaaaaataatgagcttgataaagtcatctgatcaccttcaacaacattataatggaaagttacattttagtattgttgcagatgataaggatggacactttgaaatagacagctcaaccggagacttgtttctttctaaggaacttgattatgagacgacatctcattatcttttcagagtgattactacagaccatagcaaaaacctttccctgagtagcacagtcttccttagtatcgatgtggaagatcagaatgaccattccccatctttccaggatgagctcattgtgatcagtgtagaggagaatgttcccataggaaccctggtgtatgtcttcaatgccaaagatgatgacggcagttttttgaacagtagaatacaatactacattgaatcccacaaccctggcacgaatccatttctcatccacccctcatttggcacactagtcactgtgtcccgtcttgacagagaaagcattccaactgtcatcctgacagtaacagcatctgatcaggctgtgaatgtgacagaccggcgactgagatcactgacagcacaaatagtgattttggatgtaaatgaccacaaccccacttttatttctttccccaatgcccatgtcaaagaggatgtcacagtgggctccttggtccaccacataactgctcacgatccagacgaaggaaggaatggaaaagtaacatacagcatcctctcaggaaatgaaaacatgacgtttatgctagatgagtcatcaggcttactaaccacaacctgtcctttggattatgaaatgaaaactcagcatattctgactgttctggcactggatgatggcacaccagcactttcttcatcccagactttgacagttactgttcttgatgtaaatgatgaagctccagtatttaagcagcacctgtatgaagcctcagtgaaagaaaaccaaaatccaggggagtttgttaccagggttgaagctctggacagagattcaggagtcaattccaagcttcagtttgaaatcatgccaggtgcttcatttgaattattcgagataaattctgacactggagaggtagtgacaaccaccatacttgacagagaaattcaagaagtcttcacccttcgagtactagtacgagatgggggattcccttcattgtccagcaccacaacaatcctctgcactgttgaagatgaaaacgatcacgcaccagagtttattgtttccagttatgacattgaggttctggaaaaccaggaaccagaggttgtctatacggttttagcctctgatatggatgctggcaataacagagctgttgaatatcacataattgatggaaatactgatgagtgctttactataaatgagatgtcaggagaactctcaaccactcgtgctttggaccgggagcaaatcagcaattttacccttgtcattctgtgctctgacctgggagatccacctaggagctctgtaatacacctgcaagttagagttttggatgccaatgaccacagtccttcttttcccacactttattaccagtcctctgtgagagaagatgctgaagtgggaacagtggttcttgtgctttcagctgtggacaaggatgaaggcctgaatgggcaaactgagtattttctgactgatgaggcttctggtgcattcaccattgatcctatgtcaggcacattgaaaaccagcaacaccctcgaccgtgaagccagatctcagcatacatttagtgctgtggccagagactgtagcatccagggttcacgaagcaccactgtaattataaaagtatatgtcactgatgttaatgacaatgatccagttttggaacagaacccttttgatgtgtttctttcccccgagtcgcctacaaaccagacaactgtcattgtgagagctgatgacctggacttggggcccaatggaactgtggtttttagttttgcagagacccagtcaatgttttctattgataaatacacaggagaaattcaatttcagcaaaatccatcttcagaatacttccctatctggctgcagttaaaagttacagaccagggcattccagccaggacaaccacgggtctcttggtcattcacatggaaggagaagatgtaaagatttccttcagccaccacctgtataaagggctcgtgactgaaaattgtgaggcaggtacttctattgtgactgttaaagcttttgctcctgactcaattcaggacagcatgaaatattcaatttttagtggaaatgaagatggagttctttccctgtgctctaagtcaggacaactcactgtgaaagaacccaagtttcttgattttgaagtcagaaatgaggttcaactcatcgttttagctgaaagtagtgggcatagagcctattgcaaagtagcagtcttgatacaggatgagaatgataattcaccatgctttgaacaaagcatttaccaggcatcagtgtctgaaagccaactctacaatgctcatgtcatacaggtttttgctaccgacttggacagtggtttgaacggcctgattgagtattctattctgtctggcaaccaagaagaagcattccagattgatgcactgagtggtgtgataacaacaaaagcgattctagattacgagctcaccagctcctacagcttgattgtccaagccacagataaagggatgcccaggctttctaatacgactgtaatcaaggtacaggtgactgatataaatgacaatgccccagcttttctcccctctgaagcagtggaaattacagaagattctttgcctggtgtaattgtgactcatgtgtcagttcatgatgtggatttgaattcagctttcatattcagttttgccaaagagagtaatcctggaaccaagtttgctattgatcagaacactggagtggtggtgttggtgaaaacattggattttgaagaaatgactgaatatgagctgctcatccaaatttctgattcagtgcactacacagagggagcacttgtagtccgtgtgctggatgtcaatgataatccaccagtgttttctcaagatttctatcaggtcacagttcctgaatcaatacctgtggggtattcagtgctgactctgtcagccacagacttagaaagcaatgagaacatttcttacagaattctatcctcttctaaggaattctccattgatcctaagaatggcacaatatttactatcagtcccgtattacttctggatacaatatcaacaactcaatttcttgtggaagccagtgatggtggaaatcctgacctgagagctcttactttagtggagataggaatagaagatatgaacaattatgcccctgaattcacagtcaaatcctataatcttagcctaagtgaggatgctctggttggaagcacgcttgttacattttcaaacatcgaccatgactggacccgtgaaaacacatatgttgaatattccatcatcagtggtaattcacagaacaattttcatgtggaaactaagttctttcattcagaatatccttataagcaagtcggttatcttgtgttgcttcacagtctggacagagaagcaagtgctagccatgagcttgtcattctggcatctgacagtggctgccctccattgagttccacagctgtcatatcaatacaagtacttgatgtcaatgacaatcccccaaacttcagcagcctgagctatcacacccatgtcaaggaaagcacccctctagggagtcacatcactgtggtctcagcaaatgaccgtgacacagggtcacatgcagaaatcatctacaacatcatctctggaaatgagaagggacatttttacttagaagaaaacactggagttctttatttgattaaacctctggattatgaaaaaatgacaaaattcaccttaactgtccaagcttcagatgcagaaaagaaacatttttcttttgcagttgtgtttgtcagtgtcctggatgataacgaccatgcacctcagtttatgttctcaagcttcagctgtattgttccagaaaatctgcctatttcctctaccatatgctctataaatgctctggattttgatgctggtccgtatggagaattgacctattctattgtatcaccctgttttctcactcatggaatgtcttatgatcatgatctcttcctcattgaccctttgacaggggatattcatgctaagcaaatccttgactatgaaaatggcaataaatactgcctcacagtccaagccaaagacaaaggtgatgcaactgcctccttagtggtctgggtggatattgaagggatagatgaatttgagcccattttcactcaagatcagtattttttcaccctcccagaaaagaataaagacagacagttgattggcagagtggaagcctcagatgcagatgctggtattgatggagtcattctttactcccttggaacctcatctcctttcttttcagtaaataaaaccaatggaaatatttatttgattagagcccttcccctaataaaaagtcaactcaacaaagaagacaccttggaaatgaaaataatcgctcatagtcccaaatcagattccaagtttgcatcttgcactgtttttgtgaatgtgtctttctcctctgaaggaacacccttggcagtgttcgccagcagcttttcaatcagcctggtggtctcctttttagtgtttctgatactcatctgcattctaattgtaatgattttaagacataaacaaaaagacacaataaacaattatgaggagaagaaaacctcatctttagatgcggacttgagagtgacccgggatgccagtgtgctcaaagccttccagaaaactgacgactgcagtaacgaggtggtccctgtggatgccactccggaatggttgagtttaataagtatcatggagaaggatattgtcaatctgtacagacactcaaactccagtggccactgttctgtggaaggagaaactgcagaagataaggaaatccagaggataaatgagcatccctacagaaagtgctcagactcagctctgagtgaccacgagtccagggtgccagactcgggtatcccgagggactcagaccagctctcctgcctatctggggaaactgatgtgatggtgactgccgaaacagcagaagccagccaaacatttggggaaggagatcaaggggaaggctgcagcaccacctgtgctcaaaataatgtgttaccccagacagttcagaagagagaggcaaaagagagcatcctggctgacgttagaaaagagtctgtctttatttcaggtgatcaggaagtaaggtgtgcagctctttcaactcagacgacctctgatcatgatggaaaagacaactatcactggaattatcttcttagttgggagcccaaattccaacctcttgcctcagtatttaatgatattgcaaaactaaaggatgaacatttgcatatgcctggcattccaaaagagaagaaatcttttgtttttccaccccctttgataacagcagtagcccagcctgggattaaagcagtcccaccaagaatgccggcagtaaacctggggcaggtgcctccgaaacacccacgctctcccatcccctaccatcttggttctctgccagaaggcatgactcccaatttttctccatctctttccctattgacgatgcagcctcctgccttgtctccactgttgagagaaggagaattattaggaacacacatcagtggtacatgccatgaacttaaagcagaagatgaagttcaaatatgaaaccactgggatgccaagtacctgctcaccattggtcatgaatgaatgaacaaaatgttttcaagccagcaactcgagattgggctcatttttatctaaaagcaagtgatgtaatttagttagagtttttaaaacttccccattaaagtttctccaatttc

SEQ ID NO: 7600 - DNA, 2553 bp, Homo sapiens
  source 1..2553: mol_type = unassigned DNA
agatccccatcctctccttgtgtgtgcgcgcttcatataatctcctcctttttggcaaaagaaataatgcacctgactttaccaggggggaacaaccagccgagtagaacaaggaacagatgtaaagggaataaaaggagagagaaaaagagatgagattcgtttaaagaaatccaggggcagaagaggtggctgccgcggcagaggcagctagagcttacttccctgtctgcgtgagctgcaggcagaggacgctttcaccagttgcagatgtaacctcgggaattcctgggccgtcggtttgtttgccaaacaaagtcttttcttctctggctcagacactgaagaggctcctggatttttctgcgatcctgccacaagctggcagttacccgagagccttcccaaggagctggaggagaaatgagcccttgtgggcggaagatgggcgaagggcgtcagcagcggcgggctccggtcgggaagctccttctgctccccgggaggagagatacaccccatgggcggtcaggcagcagcggcgccaggacgcagcgctccctgctctggctcttggtgcacgtgtggctgtgggcggcctcgggctcctctgcccagttgttcaacctcaccctttccgtagatgaggggcttcccccggacacgctggtaggtgacatccgcgccgggctgccggccgcgcagcagcaggaggggagcggcttctttctgtcggaggactccgatgactccccgctgctggacgacttccacgtgcacccggacaccggcatcatccgcactgcgcggcgcctggaccgcgagcggcgggaccactacagcttcgtcgccgccacgctgctgggcgctgtggtgcaggtggagattcgcgtcaacgacgtgaatgaccactcgccccgctttcccctcgactccctgcaactcgacgtctccgagctcagcccgccagggaccgccttccgcctgccagttgcccacgatccggacgccggactgttcagcactcagggctacaccctggtgcaaccgtccgacctgcccaaggaccccgcaggcccgttcttccagttgcgctaccggactccggggccactaccgtcaccgcttttgccaggctcctcgtcacccctggagcctctagatctggtgctgctgcggcgcttggaccgagaggaggcggcggcgcaccggctgcagatcgaggcatgggacggcggccgaccccggcgcaccggcctcctgagcgtggagctgcgcgtgctggatgagaacgacaacccgccggtctttgagcaggacgagtaccgcgccgcggtgcgcgaggacgcccagccgggcgccgaggtctgtcgcgtgcgcgccaccgaccgcgacctggggcccaatggcttcgtgcgctacagcgtccgcgcccggcaagtgcctggggcgggtagcggcggcggggcactgggcgacgcggcctacttcgcggtggaggagctgagcggcgtggtgcgagtgtggagacctctggaccgcgaggcacaggcctggcaccagttggtggtggaggcccgcgatggaggcgccgagcctgaggttgccacggtgcgcgtgtccatcgccgtgctggacgtgaatgacaaccggccagcaattcacgtgctctttctcacagagggaggcgtcgcccgtgtctctgaaggcgcccgaccgggcgactacgtggctcgcgtctcggtgtctgacgcggacggtgactgggagaaggaagatgaggccacaggggagcttggtgtgggtcttggagacgggagcatctctctgtccttggaaggcggagagggagacttcgcgttgctacccggcggccccccaggggtatttttcctttgcgtggaggggcccctggacagagagagccgcgatctgtatgagttactactggtggccacggacgcggggtccccgccgctgagcacggaggagacgctgctactccgggtcgctgacctcaatgaccaaccacctctcttcagccaacagcattacaaggcctcagtgtccgaggccgcggcccctggcactgtagtcatgtgggtcagcgcctccgatgccgacgaggcaggcagtgatcacgcctggctgcgctacactgtagtccaactctcggctccctgcaatctcggctccctgcaatcaaagatggtccacaccgcagagtgtggaccatcttttgccattgattccgaaagcggtgcgatcagcactatccggactctagaccgagaggtccaggaggcggtggagctgaaagtggtggcccaggacctcggagagcccccactctctgccacctgcctggtgagcatcaccgtagatgatgtgaatgacaatgagcccatcttctggaggcaggtgtacaatgccaccattgcagagcatgccccggttggacactgctttctgcagcttatatctgctcaagttgcctttgtcaaaatcaaacaaaaacaaaaggaaatacaggaaaaacaaaatcttgcctag

SEQ ID NO: 7601 - DNA, 2109 bp, Homo sapiens
  source 1..2109: mol_type = unassigned DNA
atgggcgaagggcgtcagcagcggcgggctccggtcgggaagctccttctgctccccgggaggagagatacaccccatgggcggtcaggcagcagcggcgccaggacgcagcgctccctgctctggctcttggtgcacgtgtggctgtgggcggcctcgggctcctctgcccagttgttcaacctcaccctttccgtagatgaggggcttcccccggacacgctggtaggtgacatccgcgccgggctgccggccgcgcagcagcaggaggggagcggcttctttctgtcggaggactccgatgactccccgctgctggacgacttccacgtgcacccggacaccggcatcatccgcactgcgcggcgcctggaccgcgagcggcgggaccactacagcttcgtcgccgccacgctgctgggcgctgtggtgcaggtggagattcgcgtcaacgacgtgaatgaccactcgccccgctttcccctcgactccctgcaactcgacgtctccgagctcagcccgccagggaccgccttccgcctgccagttgcccacgatccggacgccggactgttcagcactcagggctacaccctggtgcaaccgtccgacctgcccaaggaccccgcaggcccgttcttccagttgcgctaccggactccggggccactaccgtcaccgcttttgccaggctcctcgtcacccctggagcctctagatctggtgctgctgcggcgcttggaccgagaggaggcggcggcgcaccggctgcagatcgaggcatgggacggcggccgaccccggcgcaccggcctcctgagcgtggagctgcgcgtgctggatgagaacgacaacccgccggtctttgagcaggacgagtaccgcgccgcggtgcgcgaggacgcccagccgggcgccgaggtctgtcgcgtgcgcgccaccgaccgcgacctggggcccaatggcttcgtgcgctacagcgtccgcgcccggcaagtgcctggggcgggtagcggcggcggggcactgggcgacgcggcctacttcgcggtggaggagctgagcggcgtggtgcgagtgtggagacctctggaccgcgaggcacaggcctggcaccagttggtggtggaggcccgcgatggaggcgccgagcctgaggttgccacggtgcgcgtgtccatcgccgtgctggacgtgaatgacaaccggccagcaattcacgtgctctttctcacagagggaggcgtcgcccgtgtctctgaaggcgcccgaccgggcgactacgtggctcgcgtctcggtgtctgacgcggacggtgactgggagaaggaagatgaggccacaggggagcttggtgtgggtcttggagacgggagcatctctctgtccttggaaggcggagagggagacttcgcgttgctacccggcggccccccaggggtatttttcctttgcgtggaggggcccctggacagagagagccgcgatctgtatgagttactactggtggccacggacgcggggtccccgccgctgagcacggaggagacgctgctactccgggtcgctgacctcaatgaccaaccacctctcttcagccaacagcattacaaggcctcagtgtccgaggccgcggcccctggcactgtagtcatgtgggtcagcgcctccgatgccgacgaggcaggcagtgatcacgcctggctgcgctacactgtagtccaactctcggctccctgcaatctcggctccctgcaatcaaagatggtccacaccgcagagtgtggaccatcttttgccattgattccgaaagcggtgcgatcagcactatccggactctagaccgagaggtccaggaggcggtggagctgaaagtggtggcccaggacctcggagagcccccactctctgccacctgcctggtgagcatcaccgtagatgatgtgaatgacaatgagcccatcttctggaggcaggtgtacaatgccaccattgcagagcatgccccggttggacactgctttctgcagcttatatctgctcaagttgcctttgtcaaaatcaaacaaaaacaaaaggaaatacaggaaaaacaaaatcttgcctag

SEQ ID NO: 7602 - DNA, 5051 bp, Homo sapiens
  source 1..5051: mol_type = unassigned DNA
aataatgcacctgactttaccaggggggaacaaccagccgagtagaacaaggaacagatgtaaagggaataaaaggagagagaaaaagagatgagattcgtttaaagaaatccaggggcagaagaggtggctgccgcggcagaggcagctagagcttacttccctgtctgcgtgagctgcaggcagaggacgctttcaccagttgcagatgtaacctcgggaattcctgggccgtcggtttgtttgccaaacaaagtcttttcttctctggctcagacactgaagaggctcctggatttttctgcgatcctgccacaagctggcagttacccgagagccttcccaaggagctggaggagaaatgagcccttgtgggcggaagatgggcgaagggcgtcagcagcggcgggctccggtcgggaagctccttctgctccccgggaggagagatacaccccatgggcggtcaggcagcagcggcgccaggacgcagcgctccctgctctggctcttggtgcacgtgtggctgtgggcggcctcgggctcctctgcccagttgttcaacctcaccctttccgtagatgaggggcttcccccggacacgctggtaggtgacatccgcgccgggctgccggccgcgcagcagcaggaggggagcggcttctttctgtcggaggactccgatgactccccgctgctggacgacttccacgtgcacccggacaccggcatcatccgcactgcgcggcgcctggaccgcgagcggcgggaccactacagcttcgtcgccgccacgctgctgggcgctgtggtgcaggtggagattcgcgtcaacgacgtgaatgaccactcgccccgctttcccctcgactccctgcaactcgacgtctccgagctcagcccgccagggaccgccttccgcctgccagttgcccacgatccggacgccggactgttcagcactcagggctacaccctggtgcaaccgtccgacctgcccaaggaccccgcaggcccgttcttccagttgcgctaccggactccggggccactaccgtcaccgcttttgccaggctcctcgtcacccctggagcctctagatctggtgctgctgcggcgcttggaccgagaggaggcggcggcgcaccggctgcagatcgaggcatgggacggcggccgaccccggcgcaccggcctcctgagcgtggagctgcgcgtgctggatgagaacgacaacccgccggtctttgagcaggacgagtaccgcgccgcggtgcgcgaggacgcccagccgggcgccgaggtctgtcgcgtgcgcgccaccgaccgcgacctggggcccaatggcttcgtgcgctacagcgtccgcgcccggcaagtgcctggggcgggtagcggcggcggggcactgggcgacgcggcctacttcgcggtggaggagctgagcggcgtggtgcgagtgtggagacctctggaccgcgaggcacaggcctggcaccagttggtggtggaggcccgcgatggaggcgccgagcctgaggttgccacggtgcgcgtgtccatcgccgtgctggacgtgaatgacaaccggccagcaattcacgtgctctttctcacagagggaggcgtcgcccgtgtctctgaaggcgcccgaccgggcgactacgtggctcgcgtctcggtgtctgacgcggacggtgactgggagaaggaagatgaggccacaggggagcttggtgtgggtcttggagacgggagcatctctctgtccttggaaggcggagagggagacttcgcgttgctacccggcggccccccaggggtatttttcctttgcgtggaggggcccctggacagagagagccgcgatctgtatgagttactactggtggccacggacgcggggtccccgccgctgagcacggaggagacgctgctactccgggtcgctgacctcaatgaccaaccacctctcttcagccaacagcattacaaggcctcagtgtccgaggccgcggcccctggcactgtagtcatgtgggtcagcgcctccgatgccgacgaggcaggcagtgatcacgcctggctgcgctacactgtagtccaactctcggctccctgcaatctcggctccctgcaatcaaagatggtccacaccgcagagtgtggaccatcttttgccattgattccgaaagcggtgcgatcagcactatccggactctagaccgagaggtccaggaggcggtggagctgaaagtggtggcccaggacctcggagagcccccactctctgccacctgcctggtgagcatcaccgtagatgatgtgaatgacaatgagcccatcttctggaggcaggtgtacaatgccaccattgcagagcatgccccggttggacactgctttctgcaggtgacagcctctgatgcagattcaggactctatggctttattgaatattctctttatgatggattcctgagctatgaagcacctcaggcattccggatcgaccctcatgatgggcaaatctgtgtttctcaagatatcgacagggaaagggatccagctacctatgatctcctggtggaagctaaggatgggggtgggctaagtgcccaagcctttgttcgtgtggacctggaggacgtgaatgataatcatcctgtgtttaacccatcaacctatgtgacgagcatcagtgatgagacccagccaggcaccgagatcatcaatgttcttgccactgaccaggactctgggatatatgggacagtggcttatgagcttattccaggaaacgtgtcgtccctttttaccattgactccaccacaggaattatttacttaacattacctcttagtcatttggaatctaccacactttcgttgatggtctctgctcaagacggtggtgggctcacagctgtcattaatgccgatgtcaccatacacattttccagacaactctggcacctgctgagtttgaaaggcctaagtacactttcttagtttatgaagatgtgcctgaagatagtcccattggaacagtgaaagcaagagagcccttgaactcctcagaaccaatcttttacaggatttcttctggtgatctcggcggaaagttctccattcacccgcggctgggcactattcgcacccggaagcccctggatcacgagacgcagcccgtggttgtgctcacggtgcaggcgcagctcggcagcgccccagcctgcagcagcaccgaggtcaacataacagtcatggatgtcaatgacaaccacccagcgttcctcaggacctcggatgagattagaatatcccagaccacgccccctggcacagccttgtacctcgcacgtgcggaagacagagacagtgggcggaacggactcatccggtactccatcgccagcccgcagccaggcgtctttgccatcgacagagccctgggggtgctgttcctcaacggcagcctgggcgcgggcgagcagcgggagctcacgctgactctcagggccgaggaccaaggcgtgcatcctcaggcagccctgctggtgctgacagtcgttatcgagaaacgcgaacacagcccatcctggactttcgaacatttggtctatcaagtggaagtcagtgagtctctctcaccgatgacacaaatgctgcaaacacaggcgcacccacttggcccccagcgtgcagcctcgcctcttaggtactcgctggaacccagcgtagactctgctatgtttggaatccgcccttacacgggctggatttatttgcggcgacagtttgactatgaatccacccaaacatataattttagagtgtttgcttggatccccgaggacggattcttgcaaaatgtgagcactacagtcattgttcgtgtctgggatgagaatgacaattcccccaccttcttgcatgatgtgttgtttttgaaagtcgaagagagccctgttccccaaggggtaataggcaaaattacagctattgacatggactctggaaagaatggacagctattatatttccttttgtctgatggaaaattcttcaagatgaatcctaatacaggagagttaatcaattgggtggcactggatcgtgagcaccgggggcaccatgagatgactgtgctagtgacagaccgcggctccccaccacgaaacgccaccatggcggtttacgtctcagttactgacatcaatgataacaggcccttcttcccccagtgtctccctggaaaggagttacacgtgaaggttctggaaggtcaaccagtaaatatgttggttacaactgtgtttgcaaaggatcctgatgaaggaaataatgcagaagttacatactcagtatcttcagctagacctatgcctctgaagggaaaaacagcatttgggaagcagtcgtgcaaaaaacaaacaaacaaacaaacaaaatcctgacctgaatctggtcagttctctagatctgcctcccaatttaaggaaaacataagaatagaggaacatattatgctacacgttggagatgcaacagcaaatctagatcatggaaaatgtcaggatacaagttccagtttattcaacaaataaattgcaaggacaaatagagagatgggtggcaggaatccatagattaaagaaatatgcaatatatggactttattttgatcttaatgtaaacaagaaaaataaagagtatttatgggatggttgaaaatttgaaaacttactgaatatttggtgatactgtgaaccattattaatttttaaggtataatatggtactgtgatgattgtgttaaaatatttattttttaaagatgcattttgaaatatatacagaagaaataatatgacttctggaacttacttcaaaaaaaatgggagaagcgaagtatatacatggggaatagatgaaataagattggccatgagctgatcattgttgaagctaggtgatggactcgtgaaagtttattataccattttgtccacttttttgtatgcattttccataataaaaattttt

SEQ ID NO: 7603 - DNA, 742 bp, Homo sapiens
  source 1..742: mol_type = unassigned DNA
tcatctctgcttcacaatgccgatgatttagctgggaggacccaaaatgctggaaaagctgatgggtgctgattctctccagcttttcagatccagatatacattgggtaaaatctacttcataggttttcaaaggagcattcttctgagcaaatctgaaaactctctaaactctattgcaaaggagacagaagaaggaagagagacggtaacaaggaaagaaggatggaagagaaggcatgaggacggctatttggaaatggcacagaggcatttacagagatcattatgtccttgggtctcttaccttcctcagccctatgcagagcttgaagaagtaagcagccatgttggaaaagtcttcatggcaagaaactatgagttccttgcctatgaggcctctaaggaccgcaggcagcctctagaacgaatgtggacctgcaactacaaccagcaaaaagaccagtcatgcaaccacaaggaaataacttctaccaaagctgaatgagtttggaagcagattcttcccagccaatccttctgatgacaatgtagtctggccaacatcttcactggactctgacggactctgtgtctgggacccagctgataacacgtggtgatgggattgtatttgcaactctctggtcagtaagtgataaaatgccatttctatgcacccacctggcctgtgtgactgggagaatctctctttttattaaatgtgcttcaagttttaaca

SEQ ID NO: 7604 - DNA, 1009 bp, Homo sapiens
  source 1..1009: mol_type = unassigned DNA
ccaaacttctttcatttaaagaaccaaacttctttaaataaaaatgactcacaataatttaatattttaccatttacaaagagattaactacaacaatattgatcttgagttaatttcccacgaataacattttcatttcttaaaatttgctgaatggaaagccagaaagtagagtgaagcaagtaatgtgtgtgatttggaaagggcatggcaggaggtctcatctctgcttcacaatgccgatgatttagctgggaggacccaaaatgctggaaaagctgatgggtgctgattctctccagcttttcagggtataaaggaatctgaacacgactgatattttctttaatttttagatccagatatacattgggtaaaatctacttcataggttttcaaaggagcattcttctgagcaaatctgaaaactctctaaactctattgcaaaggagacagaagaaggaagagagacggtaacaaggaaagaaggatggaagagaaggcatgaggacggctatttggaaatggcacagaggcatttacagagatcattatgtccttgggtctcttaccttcctcagccctatgcagagcttgaagaagtaagcagccatgttggaaaagtcttcatggcaagaaactatgagttccttgcctatgaggcctctaaggaccgcaggcagcctctagaacgaatgtggacctgcaactacaaccagcaaaaagaccagtcatgcaaccacaaggaaataacttctaccaaagctgaatgagtttggaagcagattcttcccagccaatccttctgatgacaatgtagtctggccaacatcttcactggactctgacggactctgtgtctgggacccagctgataacacgtggtgatgggattgtatttgcaactctctggtcagtaagtgataaaatgccatttctatgcacccacctggcctgtgtgactgggagaatctctctttttattaaatgtgcttcaagttttaaca

SEQ ID NO: 7605 - DNA, 823 bp, Homo sapiens
  source 1..823: mol_type = unassigned DNA
ttagctgggaggacccaaaatgctggaaaagctgatgggtgctgattctctccagcttttcagggtataaaggaatctgaacacgactgatattttctttaatttttagatccagatatacattgggtaaaatctacttcataggttttcaaaggagcattcttctgagcaaatctgaaaactctctaaactctattgcaaaggagacagaagaaggaagagagacggtaacaaggaaagaaggatggaagagaaggcatgaggacggctatttggaaatggcacagaggcatttacagagatcattatgtccttgggtctcttaccttcctcagccctatgcagagagctgggacttctaaccaatggaacatgggaaaggtgatgacacttgactccggtgatgaggttacctttcacaagacctggccaactgagaccggatctccttacaggcttgaagaagtaagcagccatgttggaaaagtcttcatggcaagaaactatgagttccttgcctatgaggcctctaaggaccgcaggcagcctctagaacgaatgtggacctgcaactacaaccagcaaaaagaccagtcatgcaaccacaaggaaataacttctaccaaagctgaatgagtttggaagcagattcttcccagccaatccttctgatgacaatgtagtctggccaacatcttcactggactctgacggactctgtgtctgggacccagctgataacacgtggtgatgggattgtatttgcaactctctggtcagtaagtgataaaatgccatttctatgcacccacctggcctgtgt

SEQ ID NO: 7606 - DNA, 1756 bp, Homo sapiens
  source 1..1756: mol_type = unassigned DNA
agtgcagtgccgagccccacccctcaagccgtgccctgtccatagctccagactttgaccctgcactccagtccgggctggcggacagagggctggaaacaagacgctccagaatcaggagcttcccctcaggaaatagcatcctgtgtccccgcactgcagttgtctggtctctccagcagtttggtacttccggctgctgcaatgcgtgtggtggtgattggagcaggagtcatcgggctgtccaccgccctctgcatccatgagcgctaccactcagtcctgcagccactggacataaaggtctacgcggaccgcttcaccccactcaccaccaccgacgtggctgccggcctctggcagccctacctttctgaccccaacaacccacaggaggcggactggagccaacagacctttgactatctcctgagccatgtccattctcccaacgctgaaaacctgggcctgttcctaatctcgggctacaacctcttccatgaagccattccggacccttcctggaaggacacagttctgggatttcggaagctgacccccagagagctggatatgttcccagattacggctatggctggttccacacaagcctaattctggagggaaagaactatctacagtggctgactgaaaggttaactgagaggggagtgaagttcttccagcggaaagtggagtcttttgaggaggtggcaagagaaggcgcagacgtgattgtcaactgcactggggtatgggctggggcgctacaacgagaccccctgctgcagccaggccgggggcagatcatgaaggtggacgccccttggatgaagcacttcattctcacccatgacccagagagaggcatctacaattccccgtacatcatcccagggacccagacagttactcttggaggcatcttccagttgggaaactggagtgaactaaacaatatccaggaccacaacaccatttgggaaggctgctgcagactggagcccacactgaagaatgcaagaattattggtgaacgaactggcttccggccagtacgcccccagattcggctagaaagagaacagcttcgcactggaccttcaaacacagaggtcatccacaactatggccatggaggctacgggctcaccatccactggggatgtgccctggaggcagccaagctctttgggagaatcctggaagaaaagaaattgtccagaatgccaccatcccacctctgaagactccagtgactgctgcctccccccacaagaactcccttctcccctcagccaatgaatcaatgtgctccttcataagccattgcttctccctcacttctttcctcaaagaagcatgaggtgagagaaagccacaaagtcagtgcctggagaagggttcagcccaacatggggcccctctcatcactgaaatccctctaccttctctgggtctggcattataaagaacagctgaggctgtcattccatgagtcttcagaagaaaggacagctcagaaaatcaaagaggccaactgcccagagccacagaaaatggaggataattgaggctaagtaacctgattacaagttgtactaacatattaaaggttctgaaaagtcctgcagcaaagacaactatctgatgttgtttaacccagtgcttgctaaacctatctggctatggaactcttttgcccagagcacccatgaatgccatgacacaaatctgagaaaatgctggaacaga

SEQ ID NO: 7607 - DNA, 640 bp, Homo sapiens
  source 1..640: mol_type = unassigned DNA
gagagatccagcctctcaaacatccagcagagagaccataggctgctgcaatgcgtgtggtggtgattggagcaggagtcatcgggctgtccaccgccctctgcatccatgagcgctaccactcagtcctgcagccactggacataaaggtctacgcggaccgcttcaccccactcaccaccaccgacgtggctgccggcctctggcagccctacctttctgaccccaacaacccacaggaggcggactggagccaacagacctttgactatctcctgagccatgtccattctcccaacgctgaaaacctgggcctgttcctaatctcgggctacaacctcttccatgaagccattccggacccttcctggaaggacacagttctgggatttcggaagctgacccccagagagctggatatgttcccagattacggctatggctggttccacacaagcctaattctggagggaaagaactatctacagtggctgactgaaaggttaactgagaggggagtgaagttcttccagcggaaagtggagtcttttgaggaggtggcaagagaaggcgcagacgtgattgtcaactgcactggggtatgggctggggcgctacaacgagaccccctgctgcagcc

SEQ ID NO: 7608 - DNA, 3734 bp, Homo sapiens
  source 1..3734: mol_type = unassigned DNA
ctcgagggcttctagccaccgtccccgccagcgccgcgccccgccacagggcggcatgagcccacccgcggccgcagccctagcgccctgctcctccgcctgggcggcccggctgcggtgacggctctcgctgcccgactgggggccatgaagccgagtccggccgggacggcgaaggagctggagcctccggcgccggcccgaggcgagcagcgcacggcggagcccgaggggcgctggcgggagaagggcgaggcagacaccgagcggcagcgcacccgggagcggcaggaggccacgctggccgggctggcggagctggagtacctgcgccagcgccaagagctgctggtcaggggcgccctgcgcggcgccgggggtgcgggagccgctgcgccccgcgctggggagctactgggggaggcggcgcagcgcagtcgcctggaggagaagttcttggaggagaacatcttgctgctaagaaagcaattgaactgtttgaggcgaagagatgctggtttgttgaatcagttgcaagagcttgacaagcagataagtgacctgagactggatgtagaaaagacatctgaagagcacctggagacagacagtcggcctagctcagggttttatgagctgagtgatggggcttcaggatccctttccaattcctctaactcggtgttcagtgagtgtttatccagttgtcattccagcacctgcttttgcagccccttggaggcgaccttgagtctctcagatggttgccccaaatctgcagatgtgaatcccaagtaccagtgtgatctggtgtctaaaaacgggaatgatgtatatcgctatcccagtccacttcatgctgtggctgtgcagagcccaatgtttctcctttgtctgacgggcaaccctctgagggaagaggacaggcttggaaaccatgccagtgacatttgcggtggatctgagctagatgccgtcaaaacagacagttccttaccgtccccaagcagtctgtggtctgcttcccatccttcatccagcaagaaaatggatggctacattctgagcctggtccagaaaaaaacacaccctgtaaggaccaacaaaccaagaaccagcgtgaacgctgaccccacgaaagggcttctgaggaacgggagcgtttgtgtcagagccccgggcggtgtctcacagggcaacagtgtgaaccttaagaattcgaaacaggcgtgtctgccctctggcgggataccttctctgaacaatgggacattctccccaccgaagcagtggtcgaaagaatcaaaggccgaacaagccgaaagcaagagggtgcccctgccagagggctgcccctcaggcgctgcctccgaccttcagagtaagcacctgccaaaaacggccaagccagcctcgcaagaacatgctcggtgttccgccattgggacaggggagtcccctaaggaaagcgctcagctctcaggggcctctccaaaagagagtcctagcagaggccctgccccgccgcaggagaacaaagttgtacagcccctgaaaaagatgtcacagaaaaacagcctgcagggcgtccccccggccactcctcccctgctgtctacagctttccccgtggaagagaggcctgccttggatttcaagagcgagggctcttcccaaagcctggaggaagcgcacctggtcaaggcccagtttatcccggggcagcagcccagtgtcaggctccaccggggccacaggaacatgggcgtcgtgaagaactccagcctgaagcaccgcggcccagccctccaggggctggagaacggcttgcccaccgtcagggagaaaacgcgggccgggagcaagaagtgtcgcttcccagatgacttggatacaaataagaaactcaagaaagcctcctccaaggggaggaagagtgggggcgggcccgaggctggtgttcccggcaggcccgcgggcgggggccacagggcggggagcagggcgcatggccacggacgggaggcggtggtggccaaacctaagcacaagcgaactgactaccggcggtggaagtcctcggccgagatttcctacgaagaggccctgaggagggcccggcgcggtcgccgggagaatgtggggctgtaccccgcgcctgtgcctctgccctacgccagcccctacgcctacgtggctagcgactccgagtactcggccgagtgcgagtccctgttccactccaccgtggtggacaccagtgaggacgagcagagcaattacaccaccaactgcttcggggacagcgagtcgagtgtgagcgagggcgagttcgtgggggagagcacaaccaccagcgactctgaagaaagcgggggcttaatttggtcccagtttgtccagactctgcccattcaaacggtaacggccccagaccttcacaaccaccccgcaaaaacctttgtcaaaattaaggcctcacataacctcaagaagaagatcctccgctttcggtctggctctttgaaactgatgacgacggtttgagtgacatcattggtgtagaaagtttgtgtgtttttttttcttctccctagttgccaaaattaaaaaggtggtgttttcatttttgtataatactttaatggaatgctttttaaaaaaatataaaaccaaggtaaattattgtttcatcttcacgtatggatgctagtgcctttaatggaaggtaaagaatgttttgctagttagaagtacatattgaggttttaatggtggtgatagtgagttttgtggcaccagctgttttttattttaaactttctgagcatccggcaaggtacaggttttgatgttcaagttttattgggataagatcttttgatcccaaggtcaggtggatggaatttttggatttatatttgttccttgagtcttcagggcagtgtctccatgagggttttcctgttgaggggcaccacatacaatagtgtgaagtaggtatgaggggcagtcattgtattctatagtttttttatgtagtctacatttctcagatgtatccccattcggttttattctcagaactgttactagactcatgacttggaggccaaaccttaaatccagagatagcagcctcgatagggaccttaaaaggattcacaaaaacttttgccacacttggtgcctaggccctgttcctaataaccccttctagggccgtttatccaacatttagatgccttcttttccctccctaatttgtagccagtccaacctttcattccttggaggatttagttttgggataaaattttggtccttgggcacagagacattcactattaatgaagtaacccttgggcatgactccaatcccagaattgctcactgagcgctatgccaccgaagcgttgacctgaacatattagtgcaatccagtccagattggacctttgatcctatgtggaagggctgttttttaagaaaaaatttttggtaaacagtattgtgtaaaattgctttttgtataccaatatatgcatgttttgtgcatgagtagtacttgtgttgatactcctgttgatgttaaattactatataatataaacagtatgtgtttttatatatcattgtgtaaatttaatataacatatgcagtaataaaccatttgttttactgctgttaagtttgttatttgggtataaaaccagatgtttacacctgtaaa

SEQ ID NO: 7609 - DNA, 2571 bp, Homo sapiens
  source 1..2571: mol_type = unassigned DNA
gctctcgctgcccgactgggggccatgaagccgagtccggccgggacggcgaaggagctggagcctccggcgccggcccgaggcgagcagcgcacggcggagcccgaggggcgctggcgggagaagggcgaggcagacaccgagcggcagcgcacccgggagcggcaggaggccacgctggccgggctggcggagctggagtacctgcgccagcgccaagagctgctggtcaggggcgccctgcgcggcgccgggggtgcgggagccgctgcgccccgcgctggggagctactgggggaggcggcgcagcgcagtcgcctggaggagaagttcttggaggagaacatcttgctgctaagaaagcaattgaactgtttgaggcgaagagatgctggtttgttgaatcagttgcaagagcttgacaagcagataagtgacctgagactggatgtagaaaagacatctgaagagcacctggagacagacagtcggcctagctcagggttttatgagctgagtgatggggcttcaggatccctttccaattcctctaactcggtgttcagtgagtgtttatccagttgtcattccagcacctgcttttgcagccccttggaggcgaccttgagtctctcagatggttgccccaaatctgcagatctcataggattgttggaatataaagaaggccactgtgaagaccaggcctcaggggcagtttgccgttccctctccacaccacaatttaattcccttgatgtcattgcagatgtgaatcccaagtaccagtgtgatctggtgtctaaaaacgggaatgatgtatatcgctatcccagtccacttcatgctgtggctgtgcagagcccaatgtttctcctttgtctgacgggcaaccctctgagggaagaggacaggcttggaaaccatgccagtgacatttgcggtggatctgagctagatgccgtcaaaacagacagttccttaccgtccccaagcagtctgtggtctgcttcccatccttcatccagcaagaaaatggatggctacattctgagcctggtccagaaaaaaacacaccctgtaaggaccaacaaaccaagaaccagcgtgaacgctgaccccacgaaagggcttctgaggaacgggagcgtttgtgtcagagccccgggcggtgtctcacagggcaacagtgtgaaccttaagaattcgaaacaggcgtgtctgccctctggcgggataccttctctgaacaatgggacattctccccaccgaagcagtggtcgaaagaatcaaaggccgaacaagccgaaagcaagagggtgcccctgccagagggctgcccctcaggcgctgcctccgaccttcagagtaagcacctgccaaaaacggccaagccagcctcgcaagaacatgctcggtgttccgccattgggacaggggagtcccctaaggaaagcgctcagctctcaggggcctctccaaaagagagtcctagcagaggccctgccccgccgcaggagaacaaagttgtacagcccctgaaaaagatgtcacagaaaaacagcctgcagggcgtccccccggccactcctcccctgctgtctacagctttccccgtggaagagaggcctgccttggatttcaagagcgagggctcttcccaaagcctggaggaagcgcacctggtcaaggcccagtttatcccggggcagcagcccagtgtcaggctccaccggggccacaggaacatgggcgtcgtgaagaactccagcctgaagcaccgcggcccagccctccaggggctggagaacggcttgcccaccgtcagggagaaaacgcgggccgggagcaagaagtgtcgcttcccagatgacttggatacaaataagaaactcaagaaagcctcctccaaggggaggaagagtgggggcgggcccgaggctggtgttcccggcaggcccgcgggcgggggccacagggcggggagcagggcgcatggccacggacgggaggcggtggtggccaaacctaagcacaagcgaactgactaccggcggtggaagtcctcggccgagatttcctacgaagaggccctgaggagggcccggcgcggtcgccgggagaatgtggggctgtaccccgcgcctgtgcctctgccctacgccagcccctacgcctacgtggctagcgactccgagtactcggccgagtgcgagtccctgttccactccaccgtggtggacaccagtgaggacgagcagagcaattacaccaccaactgcttcggggacagcgagtcgagtgtgagcgagggcgagttcgtgggggagagcacaaccaccagcgactctgaagaaagcgggggcttaatttggtcccagtttgtccagactctgcccattcaaacggtaacggccccagaccttcacaaccaccccgcaaaaacctttgtcaaaattaaggcctcacataacctcaagaagaagatcctccgctttcggtctggctctttgaaactgatgacgacggtttgagtgacatcattggtgtagaaagtttgtgtgtttttt

SEQ ID NO: 7610 - DNA, 2942 bp, Homo sapiens
  source 1..2942: mol_type = unassigned DNA
ggaggacccgcgacacagctcgggatccgcgcgcgctgggcctccggcgccgctcgtggggttcgggaggccgggaccctgcccgggagatgtggacgccgggcggacccccggggtccgcgggctgggaccgccgtaggttgggcgcgaggttgcgcgcggcgttcgcggggctgcaggagctgcaggggctgcgagccacgcagcaggagcgggtacggggcgccctggccctgcagcccccgcccgcgcccgccgcgccctgcggcccccacggcctccacggccccgagcagcagctggaggcggcgctggccgcgctgcaggagcagctgtcccggctgagacaacaggacatcggcctgaagacccacctggaccagctggacctgcagattagcaagctgcagctggatgtgggcacagcctcaggggaggccctggacagcgacagcaggcccagctcaggcttttacgagatgagcgacggtggatcctgctccctgtccacgtcctgtgcctccgtctgcagtgaccacatctctccctcgctgggcagtttgttgcctgtggcccaggcccacaaggccaggcccagcatgggggactggaggccccggtcggttgatgagactactgtgccagcgtggagaccccaggctaccgaggagggcgccaggcccccagggagcgtggaggatgcaggccagccgtggggcacattctggcccaggcctgtgtctacaggtgatcttgacagagccctgccggcggacacggggctccagaaagccagcgcggacgccgagctcctcgggctcctctgccagggggtggatatcccgctgcacgtgccggaccccaagtatcggcaggacctggtgtcccagggcggcagggaggtgtacccgtaccccagccccctgcacgccgtggctctacagagccccctgtttgtcctgactaaggaaaccccacagagaggtggcccctcgttccctagggagagccccaggggccccgcaggtctgaacaccatccagactgggccggtcctcgaggctggcccggccagggccagagcttatatcgacaggttgctgcatctgtggggccgggagaccccagcaaagggtagcgagggagaacagggacctctaaggcatgcagcgtccccatctccacagaggcagggtggctggagtacagacggtggagggcgactgctggtcttcgccccagggagggaggacgagggagggccagctcagagcaggggtgccggcaggggcgggccccagcagcagggatacatgccccttgagggtccccagcagtctggcagccttccagaggagggctccaagccctcaaacagctgtgtcctcagggagaccatggtgcaggcttctcccagctcaaaggcccagcagacaccctcagctcaggactatggacgaggcaacatcatatccccatccaggatgctggacaagagcccctcaccggcctctgggcactttgcccacccatcctttgctgccagcctgaaaatgggtccccccaagagcaaggctgaaaaaatcaagagaagtcccatggacaaggtgctgaggtttgcaaggcagccgctgcttctactggacaggcctgagggagcccatgcagccccccagccatccctggagtgggaccctgcccactggcccacagggaggggcgggctccagcggaggccagccctggcctgggaggcacccgggcgctcctgttctgagtccaccctctaccccatgcctgtcctcgtccccttggcagtggccccgcaggagagccaccggacctcagcccaagccctgttcccctttgaggcgtcactgctcacctcagtggccaggaggaagcatcgccgctggcagtccaccgtggagatctcggcccgggcccgcctggccagctgtcctgagtctaacctggggccccccaggcccgtggccaggagagcaggtggcccactggcccggggccgtccctcactggtccgccaggacgcctacaccaggagcgactcagagccctccaagcactcggccgagtgtgacccgcggttcccgtcagtcatcccggagaccagcgagggagagtccagtgaccacaccaccaaccgattcggagaccgtgagtccagcagcagcgacgaggagggcggcgcccagagcagggactgtgacctggcactgggctatgtggcggccgggcatgcggagctggcctggacccaggaggccccggtcagctcggggccactcctgtcccccgtgcccaagctgtgccgtattaaggcctccaaggccctgaagaagaagatccgcaggttccagccgacggccctgaaggtcatgaccatggtgtgaggtgcagtgactgcgtcaagagaagcctgctgcacacaggggccctttccatgcagtgtcctgtgcatgtctgggtttcagtgtcgtcttgccaagtcgctttatcttccgaggccaccgtttaacaggagtccccgcagatgggttctgccctgtggagtatggccgtgagtccccgccccagcaaagacttccatgcggagctctggtttcagatgccagcagcctccccggccgacctagtgtctcttttcaaggtctgcccaggatgctgcttcccggcatgcaccttgtttccatgttgtcatcctcccatggcttcccctgccctcactcccctctggctggggaagtgtttcccaatcctttgaccattcctccccaaaagcattttaaagaggcggttgcaggactctgagctggaaattgaatttgagtttaaactccacgttaagctgtcagcatacacaaacacccaaattatgccatgatctcaaataaaaggaacattttttttccctcttttaa

SEQ ID NO: 7611 - DNA, 2026 bp, Homo sapiens
  source 1..2026: mol_type = unassigned DNA
ctgcggagccgggggcggagagaggaggcgcaggaggacccgcgacacagctcgggatccgcgcgcgctgggcctccggcgccgctcgtggggttcgggaggccgggaccctgcccgggagatgtggacgccgggcggacccccggggtccgcgggctgggaccgccgtaggttgggcgcgaggttgcgcgcggcgttcgcggggctgcaggagctgcaggggctgcgagccacgcagcaggagcgggtacggggcgccctggccctgcagcccccgcccgcgcccgccgcgccctgcggcccccacggcctccacggccccgagcagcagctggaggcggcgctggccgcgctgcaggagcagctgtcccggctgagacaacaggacatcggcctgaagacccacctggaccagctggacctgcagattagcaagctgcagctggatgtgggcacagcctcaggggaggccctggacagcgacagcaggcccagctcaggcttttacgagatgagcgacggtggatcctgctccctgtccacgtcctgtgcctccgtctgcagtgaccacatctctccctcgctgggcagtttgttgcctgtggcccaggcccacaaggccaggcccagcatgggggactggaggccccggtcggttgatgagactactgtgccagcgtggagaccccaggctaccgaggagggcgccaggcccccagggagcgtggaggatgcaggccagccgtggggcacattctggcccaggcctgtgtctacagagctgtgcaatgctccaggtgaacttgacatgcatgctccgcctgcaggctgcacctccagttcactgacaggtgtaggttctggtttgagaggaaagtgtggcctctgtggctgtcagctccctttctgctcagtgaacacaagttcaaagacaaaatcatcaggaatttcaagacagcaatgacagagcactacaccaagctgggggctgcattgactgaccagtcacaggctggaagtcgggtcctggccacaggcccagcttcttctcccgatatcatcggcccccctctgcccgccaagtcactctgctttccccacagtgagccagtgggagctgcagagaagtgtccagaaaggactgctggtcagtggaatttcctttacgtggaaagttgaagtgagggagtaatggacgtaagagagaatggtttctccctaacaaatagactggaaattccaatccttctactttctgtgtgtttttctagcatgactgcaagtgctggggccataagcaccatgttcagcagcacccaggaagcaaaagtagttgacagaatgttagtgagcattccttcttgtttttatttttttttaaagccccttctatatttcataatttttgtgattttgggtaaatacaatgttatcataagttaaggaaaagttaatctttttaggctaggaaaagttccagtttacgtgcatatatattattgcaaaatgatgtgaaaatttaatattttttgagataattgatatttttcattcactatgttaataagatgaatcatattaacaaaatgtccattgctaaaccaatcatgcattcataggatgaacaatgtttggttatggtgtttttgtttgtacttttaaatggtacttaaacataattagggagaagatgagctccaaagcacctggcacagctccagcaggctcagctaatggccggtcttctcatttaccaaacccacgtggccaccccgacctcagacgaattttttttacaaagtccagacattcaattatttacaatgtgtctttttaggacactgccagaattaggttgtaaatttttttttaggattgtatcttatgttcatagaagaaattggcctatgaaatttctttcatataatactcacatctggttttcatcccaaagctaaaccagcccataaaagcagctgtgatggttttcttcttcttatatttcaataaatggtatgtaaaagac

SEQ ID NO: 7612 - DNA, 2834 bp, Homo sapiens
  source 1..2834: mol_type = unassigned DNA
gctggggcggggaggtgggaccgggagaggggtggccgcggggcccggccgggctggggcggggggccgcagccatgatccgggccttctcgttcccggtgagccctgagcggggccggctgcggggctggctggagggtagcctggccgggctctgcgagttacattggctccgggagaggcaggagtaccgcgtgcagcaggcgctgcggctggcccagcccggaatggggggcgccgaggccgaggacgaggaggacgccgatgaggatgaagatgcggcggcggcgcgccgggccgcagcggccctggaggagcagctggaggccctgcctggtctcgtctgggacctgggacagcagctgggagacctgagcctggagtctgggggcctggaacaggagagcgggcgtagctcgggcttctatgaagatcccagctctacaggaggtccagattcaccaccctcaaccttctgtggggacagtggcttctctggatccagctcctatggtcgcctgggtccctctgagccccggggcatctatgccagtgagaggcccaagtccctaggagacgccagtcccagcgctccggaggtggtgggcgcgcgggcagcggtgccgcggtccttctcagcgccctacccgacggcaggggggtccgccggcccggaggcctgctcctcggcggagcggcgggcccgcgccgggccctttctgacgcccagccccctgcacgccgtggcgatgcgcagcccgcggccctgcggccgccctcccaccgactcgcccgacgcggggggcgcagggcggcccctggacggctacatctcggcgctcctgcgcaggcgccgccgccggggggcgggccagccccggaccagtcccgggggcgcggacggcggcccgcggcgccagaacagcgtgcgccagcggccgcccgacgcgtctccgtcccccggcagcgcgcgacccgcgcgggagccctcgttggagcgcgtcgggggccaccccaccagccctgccgccttgagccgcgcctgggcgtcgtcgtgggagtcggaggcggcacccgagcccgctgcgccgcccgccgccccctcaccccccgacagcccggctgagggccgcttggtgaaggcgcagtacatcccgggcgcgcaggcggccacccgaggcctccctggccgcgccgcccgccgcaaaccgccgccactgacccgcggccgcagcgtggagcagtcaccaccccgggagcgtccccgggccgccggccgccgtggacgcatggccgaggcttcgggccgccgcggctcgcccagggcccgcaaggcctcgcgctcccagtctgagaccagcctgctgggccgcgcctccgcggtcccttcggggccccctaagtaccccacggcggagcgggaagagcctcggcctccacggccacgccgcggcccagcgcccacgctggcggcccaggccgcagggtcctgccgtcgctggcgctccactgcggagatcgacgctgccgatgggcgccgcgtgcggccccgagcccctgcggcgcgtgttcccggccccggcccgtccccgtcagctccccagcgtcgtctgctttacggctgcgcgggcagcgactccgagtgctcggctgggcgcctggggcccctgggacgccgggggcctgcgggaggcgtcggcgggggttacggggagagcgaatcgagcgccagcgagggagaatcgcctgccttcagctctgcctccagcgactcagacggcagcggtggcctcgtgtggccgcagcagctggtggcggccaccgcggcctctgggggtggagcaggtgcaggggcgcccgcaggccccgccaaagtcttcgtgaaaatcaaagcttcccacgcgctcaagaaaaagatactgcgtttccgttcgggttctctcaaggtcatgactacagtgtgagtttggggatttgcttgggctcccccttcatggcctctgcacctccacactcccaaccactgacccttccacatctaccttccaaagaccatcgttttctctgcttccaaagacccccctcactctccccactcctaacagtcttggttgaaaaggctcccccaccaccaccgagaggaatggggaggagccctgtttgacccagttcagcttctagcttggaagcccttgggcaagacagttccccttctctgggcgtcactttcctcatctgtacagtaagtgtccatgtatgcaaaaggggtaattcggtttgaatttccccgttttagtttagaagcctagtctgtttgttcccctccaccgctctccctctcattcctgatgagccctctcattcctcctttccttgcccagctatggccccctctcattcacaaagtgccccctccatgtccctggacccttaagatatccccttggcaccctggtcagagactctgtgtctgactcaggtggtccctgcagagtgccctgggaagggaaggagcactgatttgggggttttgagggtcaagtaggggttggtaacacctggaaagaaggactctttcacttcgatccctggacaattatggaggattcggaggtagaagaggggaaggaagatggtttctatctcatgacccccactccctgtgagagggaatgggggaagcctgatgaccctcagctgttccaatctagtattttttttcttttttaaaattactgtatttattatgacgatggtgactccccagtgcaaaggggggccagattctgtgtgtttctctaacctctttgtaaataaatgcacagtgtaacata

SEQ ID NO: 7613 - DNA, 3907 bp, Homo sapiens
  source 1..3907: mol_type = unassigned DNA
ctctctgaggctgcgccaagacctgaagcggcggaccgagagcccgggtctgagactgagagagcaacggaatggaggcggggtagaggcggaaacacaacctgcagggccagagcgaggcgcgagaaggacggcggcgtgagggggcggggcgcgcagcgcgagaaggcaggcacgaggggcgagcgcgaggcggggcacggcgcgtggcgtgagacggggcggggcgcgcgtatcggcgccgcggccgcgtgacgcgttttcaaatcttcaaccgccgcagcccactcgtttgtgctttgcgccttcctcctccgcgccttggagccggatccggccccggaaacccgacctgcagacgcggtacctctactgcgtagaggccgtagctggcggaaggagagaggcggccgtcctgtcaacaggccgggggaagccgtgctttcgcggctgcccggtgcgacactttctccggacccagcatgtaggtgccgggcgactgccatgaactccggagccatgaggatccacagtaaaggacatttccagggtggaatccaagtcaaaaatgaaaaaaacagaccatctctgaaatctctgaaaactgataacaggccagaaaaatccaaatgtaagccactttggggaaaagtattttaccttgacttaccttctgtcaccatatctgaaaaacttcaaaaggacattaaggatctgggagggcgagttgaagaatttctcagcaaagatatcagttatcttatttcaaataagaaggaagctaaatttgcacaaaccttgggtcgaatttctcctgtaccaagtccagaatctgcatatactgcagaaaccacttcacctcatcccagccatgatggaagttcatttaagtcaccagacacagtgtgtttaagcagaggaaaattattagttgaaaaagctatcaaggaccatgattttattccttcaaatagtatattatcaaatgccttgtcatggggagtaaaaattcttcatattgatgacattagatactacattgaacaaaagaaaaaagagttgtatttactcaagaaatcaagtacttcagtaagagatgggggcaaaagagttggtagtggtgcacaaaaaacaagaacaggaagactcaaaaagccttttgtaaaggtggaagatatgagccaactttataggccattttatcttcagctgaccaatatgccttttataaattattctattcagaagccctgcagtccatttgatgtagacaagccatctagtatgcaaaagcaaactcaggttaaactaagaatccaaacagatggcgataagtatggtggaacctcaattcaactccagttgaaagagaagaagaaaaaaggatattgtgaatgttgcttgcagaaatatgaagatctagaaactcaccttctaagtgagcaacacagaaactttgcacagagtaaccagtatcaagttgttgatgatattgtatctaagttagtttttgactttgtggaatatgaaaaggacacacctaaaaagaaaagaataaaatacagtgttggatccctttctcctgtttctgcaagtgtcctgaaaaagactgaacaaaaggaaaaagtggaattgcaacatatttctcagaaagattgccaggaagatgatacaacagtgaaggagcagaatttcctgtataaagagacccaggaaactgaaaaaaagctcctgtttatttcagagcccatcccccacccttcaaatgaattgagagggcttaatgagaaaatgagtaataaatgttccatgttaagtacagctgaagatgacataagacagaattttacacagctacctctacataaaaacaaacaggaatgcattcttgacatttccgaacacacattaagtgaaaatgacttagaagaactaagggtagatcactataaatgtaacatacaggcatctgtacatgtttctgatttcagtacagataatagtggatctcaaccaaaacagaagtcagatactgtgctttttccagcaaaggatctcaaggaaaaggaccttcattcaatatttactcatgattctggtctgataacaataaacagttcacaagagcacctaactgttcaggcaaaggctccattccatactcctcctgaggaacccaatgaatgtgacttcaagaatatggatagtttaccttctggtaaaatacatcgaaaagtgaaaataatattaggacgaaatagaaaagaaaatctggaaccaaatgctgaatttgataaaagaactgaatttattacacaagaagaaaacagaatttgtagttcaccggtacagtctttactagacttgtttcagactagtgaagagaaatcagaatttttgggtttcacaagctacacagaaaagagtggtatatgcaatgttttagatatttgggaagaggaaaattcagataatctgttaacagcgtttttctcgtccccttcaacttctacatttactggcttttagaatttaaaaaatgcatacttttcagaagtgataaggatcatattcttgaaatttttataaatatgtatggaaattcttaggatttttttaccagctttgtttacagacccaaatgtaaatattaaaaataaatatttgcaattttctacagaattgaatacctgttaaagaaaaattacagaataaacttgtgactggtcttgttttacattatatatatgttcgtaattgtttcctgagaattacaatgaataataatttgctttgtcactgaaaaccaccagtgaagtgcaatttggggaatatcaaacttagcattatacatttggatattctagttgtattgtaaattttaaaagattatcaggataacatgaccttgccttgaaaaacctaaatttcatacagaaaggaaaaatacatttctatgcttgaattctggaaatcatcagaaatattgacacttgagggtcactggtggaccatgctagtattttggtgctgagtaattagattatgtataggggtaactggaagccatgaaggaaggacttaaccaggctaccaagtggaatataatttatctgctatttttaattacttaccttgtaaataactttaataatattcaaaagttgactctcctgtggctcatgccacaggatcccagcactttgggaggccgaggcaggctgatcacgaggtcagaagatcaagaccatcctggccaacatggtgaaaccttgtctactaaaaatacaaaaaattagctgggcatggcggcatgcgcctgtagtcccagctactccctccagaggctgagaattgcttgaacctgggaagtgcaggttgcagtgagccaagattgtgccactgtattccagactgggtgacagagtgagactccatctcaaaaaaaaaaaagttgactctaccccctaatttggtaggagatgaaggagaaaaggatggcattgaattatagatacagttttgggatatatacaaggattgccttgatctggcacttactgatacaagcatttggagaagagaaaattcaaatataagaaatttcaatttgaatctgtggatataaggcatttgcctttgagtatgttcttgtaggagtaagactaccaccagtgacattcaattggttctattgcatagtacatgaatctattgtcactaaaaattaggttactaatcttaatttttttgaaatatatgattctcagtacaggactaattcatatgcttttcctgcatacattattttgatcatttggataacatcaatgaacactggctttttaacacctttgtttttcataccagtacctgaagtaggctcaataaaagagtctttacagtg

SEQ ID NO: 7614 - DNA, 1274 bp, Homo sapiens
  source 1..1274: mol_type = unassigned DNA
actgcgtagaggccgtagctggcggaaggagagaggcggccgtcctgtcaacaggccgggggaagccgtgctttcgcggctgcccggtgcgacactttctccggacccagcatgtaggtgccgggcgactgccatgaactccggagccatgaggatccacagtaaaggacatttccagggtggaatccaagtcaaaaatgaaaaaaacagaccatctctgaaatctctgaaaactgataacaggccagaaaaatccaaatgtaagccactttggggaaaagtattttaccttgacttaccttctgtcaccatatctgaaaaacttcaaaaggacattaaggatctgggagggcgagttgaagaatttctcagcaaagatatcagttatcttatttcaaataagaaggaagctaaatttgcacaaaccttgggtcgaatttctcctgtaccaagtccagaatctgcatatactgcagaaaccacttcacctcatcccagccatgatggaagttcatttaagtcaccagacacagtgtgtttaagcagaggaaaattattagttgaaaaagctatcaaggaccatgattttattccttcaaatagtatattatcaaatgccttgtcatggggagtaaaaattcttcatattgatgacattagatactacattgaacaaaagaaaaaagagttgtatttactcaagaaatcaagtacttcagtaagagatgggggcaaaagagttggtagtggtgcacaaaaaacaagaaaagccctgcagtccatttgatgtagacaagccatctagtatgcaaaagcaaactcaggttaaactaagaatccaaacagatggcgataagtatggtggaacctcaattcaactccagttgaaagagaagaagaaaaaaggatattgtgaatgttgcttgcagaaatatgaagatctagaaactcaccttctaagtgagcaacacagaaactttgcacagagtaaccagtatcaagttgttgatgatattgtatctaagttagtttttgactttgtggaatatgaaaaggacacacctaaaaagaaaagaataaaatacagtgttggatccctttctcctgtttctgcaagtgtcctgaaaaagactgaacaaaaggaaaaagtggaattgcaacatatttctcagaaagattgccaggaagatgatacaacagtgaaggagcagaatttcctgtataaagagacccaggaaactgaaaaaaagctcctgtttatttcagagcccatc

SEQ ID NO: 7615 - DNA, 2997 bp, Homo sapiens
  source 1..2997: mol_type = unassigned DNA
aaaacgccaagagattgatgctgtagctgccctgagataaccaggactgtggaatcgggaagagctcatggagctcgcgaatgtaatacggaggcctctgaggaaggagtacggaggccgagaaggagccggcatttgatgagcgaaccgggaaagggagacgattgcctcgagctggagagttccatggctgagagtaggctccgggccccggacctaggagtttccaggtgtctaggaaaatgccagaagaactcaccaggtgccaggaagcatcccttttccggaaagtccttttacttggatctgcctgctggcaagaatctccagtttttgacgggggccattcagcaactgggtggggtaattgagggttttctgagcaaagaagtaagttacatcgtgtccagccgcagagaagtaaaggcagagagcagtgggaaaagccatagaggctgccctagccctagccccagtgaggtcagagtggaaacatcggccatggttgatccaaaaggcagccaccccaggccttcacggaaacccgttgactcggtgcctctaagcagagggaaggagctgctgcagaaggctatcagaaaccaggggagcatcagtggaggaggcagtgggggcagcagcagcctcctgaccaatgcccgctcttggggagtgaggattctgcacgtggatgaaatgatgatgcacgtgcaacagctgtctcttgcgtctttatgtgtgaaaaaacaacagccaaagaagccagagggaacatgtccagcagcagagtcaagaacacggaaagtggccagactgaaggccccgttcctcaaaatcgaagatgaaagcaggaagtttcgtcctttccatcatcagtttaaatcctttcctgaaatttcttttcttggacccaaagatgcaagtccctttgaggccccgacgaccctgggcagcatgcaccataccagagaatccaaggatggagagccaagcccacgatcagctgcccacaccatgcccaggaggaagaaaggctactgcgagtgctgtcaggaggccttcgaggagctccatgtgcatcttcagagtgcccagcaccggagctttgccctggaagcccatctatatgcagaagtggacaggatcattgctcagctcagccacagctttgcagacatccctttccaggctggcctccccaggtggtcaggttccccagcttctgattgtgaccctctctgtcctgagactctgcacccccatcagccctcccatcccagggcagcatctcccaggataaggaaagaagacagctgccaggcatcagtgacccaaggcagggctgcgggccagcagcgatggacagaatcactagatggtgtgatgggacctcctgcaagtcacacatgtgtgagtgccacaaccctcctgccggccttgcccaagggctccagggagcagggctgcctctgtccctgcccagcctcctttacccagtctcatctggtcacttccttggctctgctgcctggggagtggtcgcctgcagaggacatgcccctccatccctcccaagaaaactcctttgccccggcggacattcctgttaagggcccactcctcttccctgaagccagaccgtggcttatgtctgcacgctgctgggttcgtccctttccttttgtgacatggggttgcctcattccccatgacaccacccctctgcatgaggaagtttccccttgcccctgtctcagacttggatacctttacctgctgctcacacaaagcctgtggtgccgggttcgggtgccctcattgtcaactgcaggacccattccccgaacctcacatccgtgtacccttgccttcccctcctatctcaatgatcatgaccttggacatctctgccaggccaaaccccaaggctggaacactcctcagccatttctccattgcggcttcctggctgtagactcaggttagaggtgaacccagaacacctgagacttgacccaggatggatgggtgctgcttgatgtgaatgaggtcccgcagtggctccttggcgtgagcactgctcagactcctttccactccagccccctttccacatcgcaccagatgacttttacccagacccagtgggcattgccttatcttgcagtcagtcccttttcaacatgttgccgtttctttctgaagaggtgtcctccctccacaagtcacactgtctgtccctggccctccagcccacctcgccaaccactcttgttggtttccttctcagacttgccacctttcccctctgccccaaaatgccatgctcctctcctggaaaacacttgagttgattcagtaaatcgacttcaaatacttgaaggctcccaccttctgttctctggctccttcctgcggtctatacctaccgcctcctcttcacctccttcccttccacacttccttcctgggtagctctgcctgaagcattccactaagatcatctattccaaggtcatggacaggctactggtgaccaaagttggttccttttctcctttctttcctccttgaagcctggctcccttggtcgcagcagcccctcagtggcctggttctcctgtccccctgcccttcctcaccattgcccattccctcgttcgttcattcagcacaggccttgccgtctgccctgagtcagctccgagacacctgaagagccctccagccctaactactttactcagactaggtccccaggcctttgttcttgcctcttctcgctgagcctttcacttctcggcagatgtgaccgattggtagctccaccccaactcccttctgctgggtggaatgcaggagctagctgcctccaactcactgtgacctcagaaaaatgcctttattactcgggcctcagtttcctcgtctttaagtaaggggcttggatgagatgatttcaggaccctttccaataataaaatactgtgactgcca

SEQ ID NO: 7616 - DNA, 1810 bp, Homo sapiens
  source 1..1810: mol_type = unassigned DNA
gtagggcggatctcgcagctacggcgttcttttaggggtggagccggcaggaaatttaaactgaagccgcggccgaaaacgccaagagattgatgctgtagctgccctgagataaccaggactgtggaatcgggaagagctcatggagctcgcgaatgtaatacggaggcctctgaggaaggagtacggaggccgagaaggagccggcatttgatgagcgaaccgggaaagggagacgattgcctcgagctggagagttccatggctgagagtaggctccgggccccggacctaggagtttccaggtgtctaggaaaatgccagaagaactcaccaggtgccaggaagcatcccttttccggaaagtccttttacttggatctgcctgctggcaagaatctccagtttttgacgggggccattcagcaactgggtggggtaattgagggttttctgagcaaagaagtaagttacatcgtgtccagccgcagagaagtaaaggcagagagcagtgggaaaagccatagaggctgccctagccctagccccagtgaggtcagagtggaaacatcggccatggttgatccaaaaggcagccaccccaggccttcacggaaacccgttgactcggtgcctctaagcagagggaaggagctgctgcagaaggctatcagaaaccaggggagcatcagtggaggaggcagtgggggcagcagcagcctcctgaccaatgcccgctcttggggagtgaggattctgcacgtggatgaaatgatgatgcacgtgcaacagctgtctcttgcgtctttatgtgtgaaaaaacaacagccaaagaagccagagggaacatgtccagcagcagagtcaagaacacggaaagtggccagactgaaggccccgttcctcaaaatcgaagatgaaagcaggaagtttcgtcctttccatcatcagtttaaatcctttcctgaaatttcttttcttggacccaaagatgcaagtccctttgaggccccgacgaccctgggcagcatgcaccataccagagaatccaaggatggagagccaagcccacgatcagctgcccacaccatgcccaggaggaagaaaggctactgcgagtgctgtcaggaggccttcgaggagctccatgtgcatcttcagagtgcccagcaccggagctttgccctggaagcccatctatatgcagaagtggacaggatcattgctcagctcagccacagctttgcagacatccctttccaggctggcctccccaggtggtcaggttccccagcttctgattgtgaccctctctgtcctgagactctgcacccccatcagccctcccatcccagggcagcatctcccaggataaggaaagaagacagctgccaggcatcagtgacccaaggcagggctgcgggccagcagcgatggacagaatcactagatggtgtgatgggacctcctgcaagtcacacatgtcacaggccttgccgtctgccctgagtcagctccgagacacctgaagagccctccagccctaactactttactcagactaggtccccaggcctttgttcttgcctcttctcgctgagcctttcacttctcggcagatgtgaccgattggtagctccaccccaactcccttctgctgggtggaatgcaggagctagctgcctccaactcactgtgacctcagaaaaatgcctttattactcgggcctcagtttcctcgtctttaagtaaggggcttggatgagatgatttcaggaccctttccaataataaaatactgtgactgcca

SEQ ID NO: 7617 - DNA, 862 bp, Homo sapiens
  source 1..862: mol_type = unassigned DNA
cttttaggggtggagccggcaggaaatttaaactgaagccgcggccgaaaacgccaagagattgatgctgtagctgccctgagataaccaggactgtggaatcgggaagagctcatggagctcgcgaatgtaatacggaggcctctgaggaaggagtacggaggccgagaaggagccggcatttgatgagcgaaccgggaaagggagacgattgcctcgagctggagagttccatggctgagagtaggctccgggccccggacctaggagtttccaggtgtctaggaaaatgccagaagaactcaccaggtgccaggaagcatcccttttccggaaagtccttttacttggatctgcctgctggcaagaatctccagtttttgacgggggccattcagcaactgggtggggtaattgagggttttctgagcaaagaagtaagttacatcgtgtccagccgcagagaagtaaaggcagagagcagtgggaaaagccatagaggctgccctagccctagccccagtgaggtcagagtggaaacatcggccatggttgatccaaaaggcagccaccccaggccttcacggaaacccgttgactcggtgcctctaagcagagggaaggagctgctgcagaaggctatcagaaaccagaaatgatgatgcacgtgcaacagctgtctcttgcgtctttatgtgtgaaaaaacaacagccaaagaagccagagggaacatgtccagcagcagagtcaagaacacggaaagtggccagactgaaggccccgttcctcaaaatcgaagatgaaagcagatgcaagtccctttgaggccccgacgaccctgggcagcatgcaccataccag

SEQ ID NO: 7618 - DNA, 1931 bp, Homo sapiens
  source 1..1931: mol_type = unassigned DNA
gacttccttccctgagcacggcggcggcggggacgagcaccggcctgcgcgcggagccggcaccggatggtgggcgggggccagccgtgcggacccaacatgagtgaagtttcctgcaagaaacgggacgactatttggaatggccagagtattttatggctgtggccttcttatcagcacagagaagcaaagatccaaattcccaggtcggcgcctgcatcgtgaattcagaaaacaagattgtcgggattgggtacaatgggatgccaaatgggtgcagtgatgacgtgttgccttggagaaggacagcagagaataagctggacaccaaatacccgtacgtgtgccatgcggagctgaatgccatcatgaacaaaaattcgaccgatgtgaaaggctgtagtatgtatgttgccttgttcccttgtaatgaatgcgctaagctcatcatccaggcaggtataaaagaagtgattttcatgtctgataaataccatgatagtgacgaggcaactgctgcgaggctcctgtttaatatggccggggtgacattccggaaattcataccgaagtgcagcaagattgtcattgactttgattcaattaacagcagaccgagtcaaaagcttcagtgagttacatctcattcaatctccagaagattgggattatcgtcttctaagaggttgctaatgcctttcatcttgaagttacacataacttcttactagccagtatggcaaaagtaggcatctaaagaatataaagcctcaaatcttccttactgtctctcttgtcacatggaatctacatgtgtttgaactattgctttagggtttaaaataggggagcctgtggtggcctggtgcacagggctagaacgagagtgcctccccttcttgtgtcctggctggctgggatgctggtggctcttcagaggagcatcagctgtctgtcatctgctgcgatccggcagcctctcttcactgctacatgtgctggaaggacaaataaataattgtggttgtgttcttaatggggacgagcagacacactgatctgaacatctggcccaagtgaagcatggcatatagtgcccttggaagaaaattaggcctcaaatgacagtagcattgaagtgtttgctgcagagttgagggaaacccccagccaccctcccggaatccgagatagggtggcacatctgtcctgacagacgaggagtgtaactgaaccaggaatatttcctccattcctgctctcccactgcacacagggtggtggcacattatccctctggggggtggggacgcctgttgttttggctcaatttgggtttgttggtcacatggagctcttccatttcgtttagctgaataatgagttgttcctagaggagacagcctgtctctccttgttgcccccaaagcccatgccctgccgtggtggcagctggggctgtggatgggaggggtccccaacatggatgtgttgcccctcctccgcatgccaacgcagttcatgtacaaggcccctctgcaactggagagaaaattaattcctatcccgtgagtggattgtgagaaattccacccacgtggagacagcttactgcagcactgttggtgttcggagctcttctgtgccctggctccatgctttcacctacacaagcatcaccttcctaatcaccgcggggcggggagcgtgtggctgtgccccttctctttaatctcatttaatttttattaaacatgctcagtacctgtgttgagaaaaggctttctttatcctaaagattattacctttttaaagtgctcttatattttcatgagtttttattttgtctctgagattttgtattccacattctagggtattctgtaatttggctccttaccaatattattaaaatcttattaaaatcta

SEQ ID NO: 7619 - DNA, 1972 bp, Homo sapiens
  source 1..1972: mol_type = unassigned DNA
tgaacaccgccggccggaccgcgggctgcgtcacggggaccgggaggcgtacggcgacgcggagcagcgcctttgcggcgtgcgacccgcccccgccgtccctccctccctcccctcagggcttcgggcccccggggccagccgccgtcctgcgaacgcgcggcgcccgggccgctgcccccttccggccccgcggcggccccgcctcctcccccgacttccttccctgagcacggcggcggcggggacgagcaccggcctgcgcgcggagccggcaccggatgacccaacatgagtgaagtttcctgcaagaaacgggacgactatttggaatggccagagtattttatggctgtggccttcttatcagcacagagaagcaaagatccaaattcccaggtcggcgcctgcatcgtgaattcagaaaacaagattgtcgggattgggtacaatgggatgccaaatgggtgcagtgatgacgtgttgccttggagaaggacagcagagaataagctggacaccaaatacccgtacgtgtgccatgcggagctgaatgccatcatgaacaaaaattcgaccgatgtgaaaggctgtagtatgtatgttgccttgttcccttgtaatgaatgcgctaagctcatcatccaggcaggtataaaagaagtgattttcatgtctgataaataccatgatagtgacgaggcaactgctgcgaggctcctgtttaatatggccggggtgacattccggaaattcataccgaagtgcagcaagattgtcattgactttgattcaattaacagcagaccgagtcaaaagcttcagtgagttacatctcattcaatctccagaagattgggattatcgtcttctaagaggttgctaatgcctttcatcttgaagttacacataacttcttactagccagtatggcaaaagtaggcatctaaagaatataaagcctcaaatcttccttactgtctctcttgtcacatggaatctacatgtgtttgaactattgctttagggtttaaaataggggagcctgtggtggcctggtgcacagggctagaacgagagtgcctccccttcttgtgtcctggctggctgggatgctggtggctcttcagaggagcatcagctgtctgtcatctgctgcgatccggcagcctctcttcactgctacatgtgctggaaggacaaataaataattgtggttgtgttcttaatggggacgagcagacacactgatctgaacatctggcccaagtgaagcatggcatatagtgcccttggaagaaaattaggcctcaaatgacagtagcattgaagtgtttgctgcagagttgagggaaacccccagccaccctcccggaatccgagatagggtggcacatctgtcctgacagacgaggagtgtaactgaaccaggaatatttcctccattcctgctctcccactgcacacagggtggtggcacattatccctctggggggtggggacgcctgttgttttggctcaatttgggtttgttggtcacatggagctcttccatttcgtttagctgaataatgagttgttcctagaggagacagcctgtctctccttgttgcccccaaagcccatgccctgccgtggtggcagctggggctgtggatgggaggggtccccaacatggatgtgttgcccctcctccgcatgccaacgcagttcatgtacaaggcccctctgcaactggagagaaaattaattcctatcccgtgagtggattgtgagaaattccacccacgtggagacagcttactgcagcactgttggtgttcggagctcttctgtgccctggctccatgctttcacctacacaagcatcaccttcctaatcaccgcggggcggggagcgtgtggctgtgccccttctctttaatctcatttaatttttattaaacatgctcagtacctgtgttgagaaaa

SEQ ID NO: 7620 - DNA, 578 bp, Homo sapiens
  source 1..578: mol_type = unassigned DNA
accggccaagggtccccacggggacgctgcgacacagcgggctcactccagagacccaaaccagacccaacatgagtgaagtttcctgcaagaaacgggacgactatttggaatggccagagtattttatggctgtggccttcttatcagcacagagaagcaaagatccaaattcccaggtcggcgcctgcatcgtgaattcagaaaacaagattgtcgggattgggtacaatgggatgccaaatgggtgcagtgatgacgtgttgccttggagaaggacagcagagaataagctggacaccaaatacccgtacgtgtgccatgcggagctgaatgccatcatgaacaaaaattcgaccgatgtgaaaggctgtagtatgtatgttgccttgttcccttgtaatgaatgcgctaagctcatcatccaggcaggtataaaagaagtgattttcatgtctgataaataccatgatagtgacgaggcaactgctgcgaggctcctgtttaatatggccggggtgacattccggaaattcataccgaagtgcagcaagattgtcattgactttgattcaatt

SEQ ID NO: 7621 - DNA, 896 bp, Homo sapiens
  source 1..896: mol_type = unassigned DNA
gctgccgggcgggggcctggggccgcggacgctgggggcgcctcggccgcgctcagcctttagatcggagaatgcgggcggggtgggggcgctcggggtccccgcagtcactccagggtcgatttctcggcgggcgccgcggcctgtgcgaggccgggccccttggagtgccccgggaggtggtgctgggcgtctgaacaccacatcccttcctgcgcccgtgtgtgggttgggaatgccgggtgtaggccctggatcagagctgacggggttgcgagcggcgtggggtgtgcctgggacggtgaccggatgtgtcttcctgaatcgttgtattcgagctccagttctctctgtttctacagctgggcctcagtcctcacagggctctagtgggcgttcagccacaccaggagaaggcgcccaggggattaacaggacccttccctctcctgctcttccctcgccccccatggctccccctccctcctatttagtaggtacttctccagcaccccacagcgatgatggatgctggccctaaagccaggcactgccgccctgcactgtagcagatgcctaaataaagtgtggagcctgaagcagaagttttgggagatgcttgccttcctttagaccacattcctcgcctttctcaagatttctccgtgacccaacatgagtgaagtttcctgcaagaaacgggacgactatttggaatggccagagtattttatggctgtggccttcttatcagcacagagaagcaaagatccaaattcccaggtcggcgcctgcatcgtgaattcagaaaacaagattgtcgggattgggtacaatgggatgccaaatgggtgcagtgatgacgtgttgccttggagaaggacagcagagaataa

SEQ ID NO: 7622 - DNA, 1027 bp, Homo sapiens
  source 1..1027: mol_type = unassigned DNA
tggcaccgtcccgagcgcgtggcgcggggcgctggctgccgggcgggggcctggggccgcggacgctgggggcgcctcggccgcgctcagcctttagatcggagaatgcgggcggggtgggggcgctcggggtccccgcagtcactccagggtcgatttctcggcgggcgccgcggcctgtgcgaggccgggccccttggagtgccccgggaggtggtgctgggcgtctgaacaccacatcccttcctgcgcccgtgtgtgggttgggaatgccgggtgtaggccctggatcagagctgacggggttgcgagcggcgtggggtgtgcctgggacggtgaccggatgtgtcttcctgaatcgttgtattcgagctccagttctctctgtttctacagctgggcctcagtcctcacagggctctagtgggcgttcagccacaccaggagaaggcgcccaggggattaacaggacccttccctctcctgctcttccctcgccccccatggctccccctccctcctatttagtaggtacttctccagcaccccacagcgatgatggatgctggccctaaagccaggcactgccgccctgcactgtagcagatgcctaaataaagtgtggagcctgaagcagaagttttgggagatgcttgccttcctttagaccacattcctcgcctttctcaagatttctccgtggtacccaccccgtttttgtgttgtcttccttccttgcccttgtttcattccttttgaaagcgaccactcccctgaagtcctaggacccccttcgtgggctctccctgccgtagacagtctctgcttgcccctgggagacagacccaacatgagtgaagtttcctgcaagaaacgggacgactatttggaatggccagagtattttatggctgtggccttcttatcagcacagagaagcaaagatccaaattcccaggtcggcgcctgcatcgtgaattcagaaaacaagattgtcgggattgggtacaatgggatgccaaatggg

SEQ ID NO: 7623 - DNA, 332 bp, Homo sapiens
  source 1..332: mol_type = unassigned DNA
gcgaacgcgcggcgcccgggccgctgcccccttccggccccgcggcggccccgcctcctcccccgacttccttccctgagcacggcggcggcggggacgagcaccggcctgcgcgcggagccggcaccggatggcactgccgccctgcactgtagcagatgcctaaataaagtgtggagcctgaagcagaagttttgggagatgcttgccttcctttagaccacattcctcgcctttctcaagatttctccgtgacccaacatgagtgaagtttcctgcaagaaacgggacgactatttggaatggccagagtattttatggctgtggcctt

SEQ ID NO: 7624 - DNA, 592 bp, Homo sapiens
  source 1..592: mol_type = unassigned DNA
atcgttgtattcgagctccagttctctctgtttctacagctgggcctcagtcctcacagggctctagtgggcgttcagccacaccaggagaaggcgcccaggggattaacaggacccttccctctcctgctcttccctcgccccccatggctccccctccctcctatttagtaggtacttctccagcaccccacagcgatgatggatgctggccctaaagccagacccaacatgagtgaagtttcctgcaagaaacgggacgactatttggaatggccagagtattttatggctgtggccttcttatcagcacagagaagcaaagatccaaattcccaggtcggcgcctgcatcgtgaattcagaaaacaagattgtcgggattgggtacaatgggatgccaaatgggtgcagtgatgacgtgttgccttggagaaggacagcagagaataagctggacaccaaatacccgtacgtgtgccatgcggagctgaatgccatcatgaacaaaaattcgaccgatgtgaaaggctgtagtatgtatgttgccttgttcccttgtaatgaatgcgctaagctcatcatccaggcag

SEQ ID NO: 7625 - DNA, 794 bp, Homo sapiens
  source 1..794: mol_type = unassigned DNA
ctcctcccccgacttccttccctgagcacggcggcggcggggacgagcaccggcctgcgcgcggagccggcaccggatggtgggcgggggccagccgtgcgggcactgccgccctgcactgtagcagatgcctaaataaagtgtggagcctgaagcagaagttttgggagatgcttgccttcctttagaccacattcctcgcctttctcaagatttctccgtgacccaacatgagtgaagtttcctgcaagaaacgggacgactatttggaatggccagagtattttatggctgtggccttcttatcagcacagagaagcaaagatccaaattcccaggtcggcgcctgcatcgtgaattcagaaaacaagattgtcgggattgggtacaatgggatgccaaatgggtgcagtgatgacgtgttgccttggagaaggacagcagagaataagctggacaccaaatacccgtacgtgtgccatgcggagctgaatgccatcatgaacaaaaattcgaccgatgtgaaaggctgtagtatgtatgttgccttgttcccttgtaatgaatgcgctaagctcatcatccaggcaggtataaaagaagtgattttcatgtctgataaataccatgatagtgacgaggcaactgctgcgaggctcctgtttaatatggccggggtgacattccggaaattcataccgaagtgcagcaagattgtcattgactttgattcaattaacagcagaccgagtcaaaagcttcagtgagttacatctcattcaatctccagaaga

SEQ ID NO: 7626 - DNA, 683 bp, Homo sapiens
  source 1..683: mol_type = unassigned DNA
agggcttcgggcccccggggccagccgccgtcctgcgaacgcgcggcgcccgggccgctgcccccttccggccccgcggcggccccgcctcctcccccgacttccttccctgagcacggcggcggcggggacgagcaccggcctgcgcgcggagccggcaccggatggtgggcgggggccagccgtgcgggcactgccgccctgcactgtagcagatgcctaaataaagtgtggagcctgaagcagaagttttgggagatgcttgccttcctttagaccacattcctcgcctttctcaagatttctccgtgggagacagacccaacatgagtgaagtttcctgcaagaaacgggacgactatttggaatggccagagtattttatggctgtggccttcttatcagcacagagaagcaaagatccaaattcccaggtcggcgcctgcatcgtgaattcagaaaacaagattgtcgggattgggtacaatgggatgccaaatgggtgcagtgatgacgtgttgccttggagaaggacagcagagaataagctggacaccaaatacccgtacgtgtgccatgcggagctgaatgccatcatgaacaaaaattcgaccgatgtgaaaggctgtagtatgtatgttgccttgttcccttgtaatgaatgcgctaagctcatcatccag

SEQ ID NO: 7627 - DNA, 645 bp, Homo sapiens
  source 1..645: mol_type = unassigned DNA
ggttgccaggcctctcagatgtggggcagcgtaatcagtgggtgaccgtggttcccagcacccactctccactgcatccttgtcttaggcactgccgccctgcactgtagcagatgcctaaataaagtgtggagcctgaagcagaagttttgggagatgcttgccttcctttagaccacattcctcgcctttctcaagatttctccgtggtacccaccccgtttttgtgttgtcttccttccttgcccttgtttcattccttttgaaagcgaccactcccctgaagtcctaggacccccttcgtgggctctccctgccgtagacagtctctgcttgcccctgacccaacatgagtgaagtttcctgcaagaaacgggacgactatttggaatggccagagtattttatggctgtggccttcttatcagcacagagaagcaaagatccaaattcccaggtcggcgcctgcatcgtgaattcagaaaacaagattgtcgggattgggtacaatgggatgccaaatgggtgcagtgatgacgtgttgccttggagaaggacagcagagaataagctggacaccaaatacccgtacgtgtgccatgcggagctgaatgccatcatgaacaaaaattcgaccgatgtgaa

SEQ ID NO: 7628 - DNA, 7954 bp, Homo sapiens
  source 1..7954: mol_type = unassigned DNA
cgaggtccggggctgcctcctcgggccgcgccgggccgccccgcactgcgcatgagcgggagccgggcaagcccgtgagaggagccgccgccgccgccgccgtccattcgctgcggagccggaggaggaggggagaggcctggaggacaccaacatgaacaagttgaaatcatcgcagaaggataaagttcgtcagtttatgatcttcacacaatctagtgaaaaaacagcagtaagttgtctttctcaaaatgactggaagttagatgttgcaacagataattttttccaaaatcctgaactttatatacgagagagtgtaaaaggatcattggacaggaagaagttagaacagctgtacaatagatacaaagaccctcaagatgagaataaaattggaatagatggcatacagcagttctgtgatgacctggcactcgatccagccagcattagtgtgttgattattgcgtggaagttcagagcagcaacacagtgcgagttctccaaacaggagttcatggatggcatgacagaattaggatgtgacagcatagaaaaactaaaggcccagatacccaagatggaacaagaattgaaagaaccaggacgatttaaggatttttaccagtttacttttaattttgcaaagaatccaggacaaaaaggattagatctagaaatggccattgcctactggaacttagtgcttaatggaagatttaaattcttagacttatggaataaatttttgttggaacatcataaacgatcaataccaaaagacacttggaatcttcttttagacttcagtacgatgattgcagatgacatgtctaattatgatgaagaaggagcatggcctgttcttattgatgactttgtggaatttgcacgccctcaaattgctgggacaaaaagtacaacagtgtagcactaaaggaaccttctagaatgtacatagtctgtacaataaatacaacagaaaattgcacagtcaatttctgctggctggactgaactgaagatcaatcctcacaattcagactgagggttgagacaaaactttaaggatacatcttggaccatatcgtatttcattcttctaatggtggtttgggcttgtcttctagtctgggccgctctaaacatttataattccaacattgtggatttcatcttatatctgtggaccatcctagtttattctcccataagtcttagaagctttatggtgattattttgaggttttcattctcgcataaagcacaatgctgtcttcatcagaaaacagttggcataagaattaaacatatgaacatcacaaaacaatttataaaaacttcttaaatatacgctttgggctagttgcaaagactatgctaatagcacttccagtgagagtgatatatttaagtgtactggatctggaatggtgttttggtttggggggaattttttttttttcctggcaaatcacatgtgttgttgatgtgagtatctgatgaaaaaacaatgtcagaataaccgacatgaaaattttttaggataacttggtgcctacctgaaaaatgtattgtgttttagactcttgatttcaaaaggttccacagaactagtctgcgcttaccttacccatgtttatatatagctgtcctacagggagcttttatttagaaaatgtctgcataatgttagattcttctcctgtctacattatgcactacataattggacttcattatgcttttgaaatgcttatctgcctgtcacataagttaaactatttaatttgttttgaatgttttggattgctacacaatacaatattctaaatttaggcatgagggtttttttgttttgtttttactttttttttgtcatcgcactatggaacacaaatggaattctcttaatttataagaagatagttgcagttaaattttgaaaatggttgtaatgagccatgaagttcaatctttataatataggtactgctctttcagacaaatagtccattttcgatgacttattattttgttgaaattgctttaactgctaatcactgtggttgccaaatatttacttcaggagcaaagattttcaaacaagcatacacgatgcaaaataccaatctggcttctagtctctttactgttttcgtttcactcagattagctcagttttctcatcaaagcagaatgctatcttgtatgtatttttttcattacaagccccatgagctgcttttatgctgaaaatggtcatttccctgttcacttactgacatgtgaagaagggtttcttgctttcttaaacatttccgtaaggcaggctagaaatgtaatacttcaaatgtttgatgattatggtcttttgataggaatagattctgcttgggatatatatccaggcactctctaaggtctagggttgatattaacaaaggaatgtacttagaatagcagtacattttatgcaaatatggaaattattttaagaaacaatgacatatcaaaactgctttttacatgattttgaaatagactagaaagctttccctatagacatattaatattccaatcataactttaattcaagaatgcagttttaccaaaagaaaaatttgaaaatttctattcaggctactggaattggttattaaaagaaaaaggaaaaagaagaatcttgctgctttcagtatttcctgatttttttgtaaatataaagaggaacttcaattatgaaaaatttttaaaagatatatatatctatatatctatatatatgtactgttttgtttcctgtcttgaagattttgagttatggttattggtttcagattgattaattcacatatgctgtgttttgaaatgagatcccattagcttttttttttttttttttttttcaatataaagtgttttctttaaaagtcatattggttcgtggcctagtgccttggattttacatatttttctttttaaatgcaaaaccttttcaacaaaatagtgtttgtcatcaggttggtactaaacatttataattactgtgtaattataaacaaaaatacataaagctttgaatataattatgtagcataaaagttaaggttgttcactatgatggcatcttagaattaaacaaaacttttactagggctgaaaagagaagactgatttaatgtggtgtgattattctgaagataaatgtctggctacagggaatattttgtactaaaaaatgattacacatatggctgtgtgtgtttgagtctgtgtctgtgagagagccagagagagtgagagagattgacagagaaagggagagacacacacacgccccttgaattgctttaactcctaagtgtttcagtcctcattccggtaaactccccatgctgattctttgttttaaactgaaccataggtacagtttcctttttgccaaatgtcaaaacaggtacaaattttaaaatgtaatgctttttaaatagaaaaatgtataaaattagaagtgcccacatataaaaaatacttgagatgaagattatctttagtgaatatcatctgcatatctctgtaagttcaattgtgtttcttacagtccctgtcatattaccaacagaggcaataaaagctgcagtgaaattgccatgactaaatcttttcacatatttcagtgtattttttttatagatttaaaatatacctgaaaacttttctaggaagaataattattcatggaaagagcattgtaatggcatgttttggggagaaaagacatgccaagtcttgtttactacatttaagatgtttacaactatactgggctgctttattaacaatactgtacttgcataatatggcattataagtacatgtccttccttagacttttaaaaagttttaatgagagaaagtaaatttactcaacaaaataacatgagaaatcctttacgtaatatctttactggggaattcttatttaagcaaggtacactattttttcctcagacttaaatgaatgaagtgttcatttattttttatttgatgataatcaagaagtgagtagtagtagctaacttaatgtacactttgcttaggtttttaaacatgttactattaagactacgtattgtaaaccttctgtaattttcacatatgaatgacaggagaaagttaaacctaatcgaaggagttttggaataaaaaagtggtgctggggaaattcaccatggttcacaaagtatgcctttgtaaaactgaatcaacttttagcaagaattaatttatgtagttttaaatgttaaattgtgtatatttaacagaaaatacttatctggcacctcagcagttttaatgttaccttatacttttaacagtatgatttatattgaatacttagatgttttcataagattttatcaaatttgataatgtaatgataaaatgtttttttaaatgtgaactatttaacatataaatggggacacaaaacctgaattgtgatttctacataatgtgataattagggttcaaattatgactcatcatttaattgattataaatgagtatatttctgaactctttattgcctccatttttacaatcataatatagcaataatttctatttttatttcataggactgtggtgaagttatttatcatgacacctttatctttgatttctgagggaaaggggtgtatattttgtagttaagataaatgagaaagttcctaatagtacaaatgcccttttccaggtttatctttgctatttgttgccatttttcttaaatatttgctttatttgtacccgatttctggaggcaaatagtgctgttttttcaaactcataatatagttacataaatgattttatcagagcattcttgctatcttattttctttcctacctgttgagtaagtagcatttcttgctcaccaactcatttatttgactaggttcagtgtttcctattaatgtgtttttttattttcctttggttgattttgaaaaatctgtcacaaataaggaagttatggtaaaagatgcacagcctttgtagttagtggaattctcaataagtaatgtctttatggagttttaaagggaaattatttaaagggaatcatgttatagttgtccattttttaaattgagattttaaaagtgtttttaagtatagcccaattttctatttacttacaagtgcttcatgattgttttcttttttattttttgccatcatgctgtgcagaaatcataatgtagcttgtaatacttcagagcattggtcttgaagctgtaacttggggctgctgtccttcatgaggtagggccatagcaggcaggccctttcccacttcctttatggcattctacttttatctgttgtaggctgttagtgtttcatattcgatttggtttggggaaaaatactcagttaaaaaaattttttttaatgattggctttagagggactgttacctctttggcatatctgtcagcggaatggaaagaaatggagtcagactgaaattcatgccagcttaatcactgaaggcagcactgctttgaaaagaagaattttcaacccacatcgtaaaaacaaagcctgattggaaacaatgaagtgtttgaaacttaggggcagcatgtaagtggcttaatgagcaaacaaacggaacatactcattttatatttaaaaagtacatatatattcaaatgcatgttcatatgaatattataattttatttcaggttatgaaatattctgagaaaaccttatatctgatggaaaacttgggcaatacccaatacgaagcaagagatttttacaaaaagaaatactatagggcataaggttgggggaagaccaattaatgaaatggctaagggacaatgctaattaaatcgttaacagtgattttgtcacataattacatgacttatagctaaaagagcaatatttaatcagtaagatttagagatgggtgtacttggaatcctttgaaagcagcgtgtttagttttcaagcaaatgctaatgttcttaatcctaatagtatattagacttcgttgtgttgaatatatcaaatgaacgaactatgaaccagagctttaaaatagtgatttgtaagactttgttacaatggtacttaaaaaattgctttgtataatttacacactgtaaaattcacccattgtacatgtacaattaattgtttttagtaaacttaagagttgtgcagtccaattttagaacatgtccatcagcccccaaaatttactcctgctgctctgcggttaatttgctcctgcctccagccccacgcagccacactgatctgctttctgtacagatttaccctttctagaaatttcacagaggtagaatcatgcagttagtcttttatatctggcatctttcacttagcatgtttttgaggttcatccatgttgcagcttatacctgcgtgtagttcctttagttgctgacttagtgttcactgtttggatataccacattttgtttatccattcaccagttgatagacatttggctggcctacaattagtttttttaaattgcgaataataatgctatgaacattcataaatgtctttgtgtggacatgttttcatctcagattcctagttgtggaattgtcaggttgtgtggtaaatttatacctaacgtttttaaaaaaactgctgaactttttccaaagtggctgtacttctagaactattcctgccacagtgcatgcggactgccgtgtctgcacatccttgccaatacttgtcttttttattgcagccatcctggcgggtatttactttatgtgtgtgagttatacctaggcatcccaactcgtgtatcgattggatgtgcagtttgagtgagtttcaagtggcctcagcgattgctgtaaaattagttactctagtagacatgtactctcttggaggtagtattttctgtagtcagtgagggtaataataatacttccagtgggggttccagtccctcagtgatctctggtgagaagaaatgtgtcagcgaagagtggtgctgatggctggtgctttggctctgttattgtttgtaccaaggttgatacagctactcgactagcctatgactgactggtggtggtaattaaactttgtacagattactgtgtgcagatagttactgtcttaatattaagtttcccagagattttacttttgagatagctgagaattaacgactcttggaatttataaaaatttagttgataccatttagttgctgccagctgcctgtgttcttatacataggagacatcggagtgagtgctttttaaaaaattaatggcgtatgtcaggtatatgtaaaaggacaattgcataatgaactcatgttaacatgatcaatccatggccaatcttgatttatctaaatgccattcatctttgaacccctatttattttgaagcaaatcccagatagcaaatcatttcatttgtaaatatttcaatatgtatgtctaaaagataaggactgttaaataaaaccacaattctgttgttagacttaactgttaacagtttgttagtgttaataactacccagcagtgttcaagttgtgcctttttttttttttttccaattcaagtcaggattcaaataagattcctacattgcatacatctcaaatgtcctacccagtggatccccacactctccactctttggcttcaaattcatttttttgaaaaaacaatgattgctttagcactttaaatttctatgcaatttcaaatgtaaggtgaaattttgatgtacttaataaaaaaattctaacgaatatatttttcaagttaatgtagtatataagaagctattatatcaacagattttcctttaacttaaaaatacatcgtgacttgta

SEQ ID NO: 7629 - DNA, 1024 bp, Homo sapiens
  source 1..1024: mol_type = unassigned DNA
attcgctgcggagccggaggaggaggggagaggcctggaggacaccaacatgaacaagttgaaatcatcgcagaaggataaagttcgtcagtttatgatcttcacacaatctagtgaaaaaacagcagtaagttgtctttctcaaaatgactggaagttagatgttgcaacagataattttttccaaaatcctgaactttatatacgagagagtgtaaaaggatcattggacaggaagaagttagaacagctgtacaatagatacaaagaccctcaagatgagaataaaattggaatagatggcatgacagaattaggatgtgacagcatagaaaaactaaaggcccagatacccaagatggaacaagaattgaaagaaccaggacgatttaaggatttttaccagtttacttttaattttgcaaagaatccaggacaaaaaggattagatctagaaatggccattgcctactggaacttagtgcttaatggaagatttaaattcttagacttatggaataaatttttgttggaacatcataaacgatcaataccaaaagacacttggaatcttcttttagacttcagtacgatgattgcagatgacatgtctaattatgatgaagaaggagcatggcctgttcttattgatgactttgtggaatttgcacgccctcaaattgctgggacaaaaagtacaacagtgtagcactaaaggaaccttctagaatgtacatagtctgtacaataaatacaacagaaaattgcacagtcaatttctgctggctggactgaactgaagatcaatcctcacaattcagactgagggttgagacaaaactttaaggatacatcttggaccatatcgtatttcattcttctaatggtggtttgggcttgtcttctagtctgggccgctctaaacatttataattccaacattgtggatttcatcttatatctgtggaccatcctagtttattctcccataagtcttagaagctttatggtgattattttgagg

SEQ ID NO: 7630 - DNA, 504 bp, Homo sapiens
  source 1..504: mol_type = unassigned DNA
agggggcaacggccttgcccctgcccctctgccggctccattgtgtctggtcggggactggggtctggggttccggaacaagttgaaatcatcgcagaaggataaagttcgtcagtttatgatcttcacacaatctagtgaaaaaacagcagtaagttgtctttctcaaaatgactggaagttagatgttgcaacagataattttttccaaaatcctgaactttatatacgagagagtgtaaaaggatcattggacaggaagaagttagaacagctgtacaatagatacaaagaccctcaagatgagaataaaattggaatagatggcatacagcagttctgtgatgacctggcactcgatccagccagcattagtgtgttgattattgcgtggaagttcagagcagcaacacagtgcgagttctccaaacaggagttcatggatggcatgacagaattaggatgtgacagcatagaaaaactaaaggcccagatacccaagat

SEQ ID NO: 7631 - DNA, 4312 bp, Homo sapiens
  source 1..4312: mol_type = unassigned DNA
gagagacgcagcagggcggcccctgagccgcggtttagccaatggagaaggcgagatgggcgggctgggagtgcccggcggcgggtcctcagcttcgagccgaggtgcagtgagctggtggggggaccgcgaggcgagcgcgggagcctgggcggcgagccgggtgtgagctgcctgaaaatgcactcggatgccgccgctgtcaattttcagctgaactctcatctctcaacactggcaaatattcataagatctaccacacccttaataagctgaacctaacagaagacattggccaagacgatcaccaaacaggaagtctgcggtcttgcagttcttcagactgctttaataaagtgatgccaccaaggaaaaagagaagacctgcctctggagatgatttatctgccaagaaaagtagacatgatagcatgtatagaaaatatgattcgactagaataaagactgaagaagaagccttttcaagtaaaaggtgcttggaatggttctatgaatatgcaggaactgatgatgttgtaggccctgaaggcatggagaaattttgtgaagacattggtgttgaaccagaaaacgtagttatgcttgtcctagcttggaaattggatgcacaaaacatgggttattttactctacaggagtggttaaaaggaatgacttctctccaatgtgatacaacagaaaaactcagaaatactttggattacttaagatcattcttaaatgattctacaaactttaaacttatttacagatatgcgtttgactttgcacgggaaaaggaccagcgcagcctagacataaacactgccaagtgcatgttgggactgttattaggaaaaatctggcccctttttccagtttttcaccaattcttagagcaatcaaaatacaaagttattaataaagaccagtggtgcaatgtcctagagtttagcagaacaattaatcttgacctcagcaactatgatgaagatggagcatggccagttttgttggacgagtttgtggagtggtataaagacaaacagatgtcctaggactttatgcatagcagcgagagagtcactgttaccacagttttgtcacccattagccataaattgctgtttgtatcaaagcgcatgctgcttctcttgcactgtttccctttcgcagggacatgttggtgtttgctattgaattggccagctctgcttgctgtgtggcattgttctcttggaaggctgctttgcagtttgtatttacactacagattggtgaatttgccaacgtcctcactgtgattatgtgtatattgctgtttaaattttgtatatgtgtataaaaggaaaaaggttcacctagagattatttctgaaaaatgtattgtaaaaataattttgtggcatttctagtccctttttttgaatgaaccaattatactttatttggtctcctatgtagcatttcagaaaacaagagaaaactgttaccatgaacaaacattgccagaattaaccttactgtttaagaggccaacttctggaaggaggtaggagtcataactttttagaggcatatgccaaatatcatttggtatacttaacaatattagtgttttaaaatgatgagttataattatttgaacatatagatatgtaacatgccacaaatcatttctaccatgcaaggtgtataagttgtttattttttagtgttaaaactataatagcttgaatataggtaccaatgaacaaattcaaattgcacctcttttcttaaaagaatgggatttaaactcttataaacattctttaacttttttgtttgtttgttctctttttttccttttgcattcttctagccagtgattgatctgctaatgctttctttgccactctaagtaaaatttatttcacctcctcaatgaaaacctcatggttttgctggctgtttataactgcatcgcacttctagttgtggcttgaattttcagttaagctttcatggtatgtaattttccagccttttgagaaaacaagcatactataagtgagagctgttttgttttccttgtttgtttgtttcatgctaggcttttcctggcagcatgtccattgcaggcagtggacaagaaaccaccagcattgagctaacccagtacatgctaggacctgtcctagaggggccacttttcattacctgagttatttgtacagaagggcaatagccattatttttgtggatgaggaaacaagaataaacagaatggtatttttaggtttgtattttatgtctttttttttttttttttttgccattcttgaggaaatatagagatgacatgttttcaccccaactatctggtgctattgaatgactaattcagtccctaaagttctgtgaaaacacaaaagtctaatgatttgagtgagtaaaaggtaatggtgcatttgaacaagtaaatgctgtcgtggtcagcaagatccgtgatttgaacatgtgatgactggaaaaaggtttgggttatttggaactctggctaaaacttctttcgggtgacatgtgatcgtttaaatggcattaagtgaataaagcacacagacagtgctactcttgaccactattttaccatttctttgcaaacagtgttcacattttcatattttttccctaactaaaccaccaaagaaagaaattttgtatgtatatacagtgtgtgtgtatacaaaatcatgatatagtagaatgcaactactttctttttctaccaaacgaaaggttttatttgctgtgaaataaaccagaagtttaaaaaaccctgtagtgattaagcatacttaaccactccttatttgtagattcactttcaaccttaaaaattaataccagtttgcataaaccaatatctgaaaagaacaggaaatgttaatggcaagcaacagctattaatactgatgtgatggatgcatttgttttgcagtggtgactggcctaggcaggtttggatctgtgaagaattgattcattttcaaaattattccataaagttaaaaagttacactttaaaggcaacaggtcatacagttctttaaatctgatcaactgtagctttatttaaagcaaatataaatcatagatgaagttattttaaacactatgttagaatatagagatttttaaaaaatgctgataagcacagttaattctaaaatgagaggattgttacaggagggagatgttacagttaatccacaatcaacattttgatggtagggaaaaaactgcgtaaaaactattgcattatgtatgataagaaagtaagtattccaaagggataatcttgcatattaagaaaactccaaataatctttaaactgccttgaaaaataaacctctttgactgctgagcggcagagtgcttacccttgattgtcttgattttatatatttatttctaaggggagaaaaaggggtcagacagagtaatatgatacattttcttaaaaacttctctaagttgcacaaaactgaacaatcatcaagcacttatttactggctaatgttgaataaattagggtgccttcatctgggttttctttagtacctaagtctacaaccctttctctttttctattgtgtttcgaactccacattgcaatactctgttgtcatggaatacaacctttagatgtttactgctgaagtaggtcagaaattgtattatttgatttgcctcaaacatccactgtaatgttacatgcaccttttttgaagcatgaactctgaattatgtttttataaatctgactaggcaaacctagattctggtttcacaatggatttattttctctctcagtctccattttaacagtgcttttgaagtttatacagaaagctttaaaagttagtttgtgcccttggtttttattcttaaaactgctaaaatacctctgtaagccttatcctttattctttcatatgttgtataataaatgtatagatttcattgaccaactaaaatgttgggtgtctgtaaatgagaccaaaacgtgggttgcttttttcataaaataatttctattgggggttactgttcaatgacagcaggtaacctataactgtgaatgcttcgtgtcgtcagtatttgcattacattcataaaagtgtgcaagtcctgtgactcccagcttaactgaaatactgttatgccacctaacttgagtacagcaaactggttttaggtttcaatgacattgatgtaaaatgatatcccatgaataaaaagtatttgtgtttggtttcagaa

SEQ ID NO: 7632 - DNA, 1584 bp, Homo sapiens
  source 1..1584: mol_type = unassigned DNA
agcttcgagccgaggtgcagtgagctggtggggggaccgcgaggcgagcgcgggagcctgggcggcgagccgggtgtgagctgcctgaaaatgcactcggatgccgccgctgtcaatatcagttttagagaatgtggcgtggagaaattctcaaggaaagagtaaaatgctggtgatgtgctgagggaacagaaggagtgtttgtgaatgtgcacacgtccgtttctggtctctcgtgtcagcgtcctacctgcacaaggttaaggcagcattaacagattttcagctgaactctcatctctcaacactggcaaatattcataagatctaccacacccttaataagctgaacctaacagaagacattggccaagacgatcaccaaacaggaagtctgcggtcttgcagttcttcagactgctttaataaagtgatgccaccaaggaaaaagagaagacctgcctctggagatgatttatctgccaagaaaagtagacatgatagcatgtatagaaaatatgattcgactagaataaagactgaagaagaagccttttcaagtaaaaggtgcttggaatggttctatgaatatgcaggaactgatgatgttgtaggccctgaaggcatggagaaattttgtgaagacattggtgttgaaccagaaaacgtagttatgcttgtcctagcttggaaattggatgcacaaaacatgggttattttactctacaggagtggttaaaaggaatgacttctctccaatgtgatacaacagaaaaactcagaaatactttggattacttaagatcattcttaaatgattctacaaactttaaacttatttacagatatgcgtttgactttgcacgggaaaaggaccagcgcagcctagacataaacactgccaagtgcatgttgggactgttattaggaaaaatctggcccctttttccagtttttcaccaattcttagagcaatcaaaatacaaagttattaataaagaccagtggtgcaatgtcctagagtttagcagaacaattaatcttgacctcagcaactatgatgaagatggagcatggccagttttgttggacgagtttgtggagtggtataaagacaaacagatgtcctaggactttatgcatagcagcgagagagtcactgttaccacagttttgtcacccattagccataaattgctgtttgtatcaaagcgcatgctgcttctcttgcactgtttccctttcgcagggacatgttggtgtttgctattgaattggccagctctgcttgctgtgtggcattgttctcttggaaggctgctttgcagtttgtatttacactacagattggtgaatttgccaacgtcctcactgtgattatgtgtatattgctgtttaaattttgtatatgtgtataaaaggaaaaaggttcacctagagattatttctgaaaaatgtattgtaaaaataattttgtggcatttctagtccctttttttgaatgaaccaattatactttatttggtctcctatgtagcatttcagaaaacaagagaaaactgttaccatgaacaaacattgcc

SEQ ID NO: 7633 - DNA, 4207 bp, Homo sapiens
  source 1..4207: mol_type = unassigned DNA
gagagacgcagcagggcggcccctgagccgcggtttagccaatggagaaggcgagatgggcgggctgggagtgcccggcggcgggtcctcagcttcgagccgaggtgcagtgagctggtggggggaccgcgaggcgagcgcgggagcctgggcggcgagccgggtgtgagctgcctgaaaatgcactcggatgccgccgctgtcaattttcagctgaactctcatctctcaacactggcaaatattcataagatctaccacacccttaataagctgaacctaacagaagacattggccaagacgatcaccaaacaggaagtctgcggtcttgcagttcttcagactgctttaataaagtgatgccaccaaggaaaaagagaagacctgcctctggagatgatttatctgccaagaaaagtagacatgatagcatgtatagaaaatatgattcgactagaataaagactgaagaagaagccttttcaagtaaaaggtgcttggaatggttctatgaatatgcaggaactgatgatgttgtaggccctgaaggcatggagaaattttgtgaagacattggtgttgaaccagaaaacgtagttatgcttgtcctagcttggaaattggatgcacaaaacatgggttattttactctacaggagtggttaaaaggaatgacttctctccaatgtgatacaacagaaaaactcagaaatactttggattacttaagatcattcttaaatgattctacaaactttaaacttatttacagatatgcgtttgactttgcacggcaatcaaaatacaaagttattaataaagaccagtggtgcaatgtcctagagtttagcagaacaattaatcttgacctcagcaactatgatgaagatggagcatggccagttttgttggacgagtttgtggagtggtataaagacaaacagatgtcctaggactttatgcatagcagcgagagagtcactgttaccacagttttgtcacccattagccataaattgctgtttgtatcaaagcgcatgctgcttctcttgcactgtttccctttcgcagggacatgttggtgtttgctattgaattggccagctctgcttgctgtgtggcattgttctcttggaaggctgctttgcagtttgtatttacactacagattggtgaatttgccaacgtcctcactgtgattatgtgtatattgctgtttaaattttgtatatgtgtataaaaggaaaaaggttcacctagagattatttctgaaaaatgtattgtaaaaataattttgtggcatttctagtccctttttttgaatgaaccaattatactttatttggtctcctatgtagcatttcagaaaacaagagaaaactgttaccatgaacaaacattgccagaattaaccttactgtttaagaggccaacttctggaaggaggtaggagtcataactttttagaggcatatgccaaatatcatttggtatacttaacaatattagtgttttaaaatgatgagttataattatttgaacatatagatatgtaacatgccacaaatcatttctaccatgcaaggtgtataagttgtttattttttagtgttaaaactataatagcttgaatataggtaccaatgaacaaattcaaattgcacctcttttcttaaaagaatgggatttaaactcttataaacattctttaacttttttgtttgtttgttctctttttttccttttgcattcttctagccagtgattgatctgctaatgctttctttgccactctaagtaaaatttatttcacctcctcaatgaaaacctcatggttttgctggctgtttataactgcatcgcacttctagttgtggcttgaattttcagttaagctttcatggtatgtaattttccagccttttgagaaaacaagcatactataagtgagagctgttttgttttccttgtttgtttgtttcatgctaggcttttcctggcagcatgtccattgcaggcagtggacaagaaaccaccagcattgagctaacccagtacatgctaggacctgtcctagaggggccacttttcattacctgagttatttgtacagaagggcaatagccattatttttgtggatgaggaaacaagaataaacagaatggtatttttaggtttgtattttatgtctttttttttttttttttttgccattcttgaggaaatatagagatgacatgttttcaccccaactatctggtgctattgaatgactaattcagtccctaaagttctgtgaaaacacaaaagtctaatgatttgagtgagtaaaaggtaatggtgcatttgaacaagtaaatgctgtcgtggtcagcaagatccgtgatttgaacatgtgatgactggaaaaaggtttgggttatttggaactctggctaaaacttctttcgggtgacatgtgatcgtttaaatggcattaagtgaataaagcacacagacagtgctactcttgaccactattttaccatttctttgcaaacagtgttcacattttcatattttttccctaactaaaccaccaaagaaagaaattttgtatgtatatacagtgtgtgtgtatacaaaatcatgatatagtagaatgcaactactttctttttctaccaaacgaaaggttttatttgctgtgaaataaaccagaagtttaaaaaaccctgtagtgattaagcatacttaaccactccttatttgtagattcactttcaaccttaaaaattaataccagtttgcataaaccaatatctgaaaagaacaggaaatgttaatggcaagcaacagctattaatactgatgtgatggatgcatttgttttgcagtggtgactggcctaggcaggtttggatctgtgaagaattgattcattttcaaaattattccataaagttaaaaagttacactttaaaggcaacaggtcatacagttctttaaatctgatcaactgtagctttatttaaagcaaatataaatcatagatgaagttattttaaacactatgttagaatatagagatttttaaaaaatgctgataagcacagttaattctaaaatgagaggattgttacaggagggagatgttacagttaatccacaatcaacattttgatggtagggaaaaaactgcgtaaaaactattgcattatgtatgataagaaagtaagtattccaaagggataatcttgcatattaagaaaactccaaataatctttaaactgccttgaaaaataaacctctttgactgctgagcggcagagtgcttacccttgattgtcttgattttatatatttatttctaaggggagaaaaaggggtcagacagagtaatatgatacattttcttaaaaacttctctaagttgcacaaaactgaacaatcatcaagcacttatttactggctaatgttgaataaattagggtgccttcatctgggttttctttagtacctaagtctacaaccctttctctttttctattgtgtttcgaactccacattgcaatactctgttgtcatggaatacaacctttagatgtttactgctgaagtaggtcagaaattgtattatttgatttgcctcaaacatccactgtaatgttacatgcaccttttttgaagcatgaactctgaattatgtttttataaatctgactaggcaaacctagattctggtttcacaatggatttattttctctctcagtctccattttaacagtgcttttgaagtttatacagaaagctttaaaagttagtttgtgcccttggtttttattcttaaaactgctaaaatacctctgtaagccttatcctttattctttcatatgttgtataataaatgtatagatttcattgaccaactaaaatgttgggtgtctgtaaatgagaccaaaacgtgggttgcttttttcataaaataatttctattgggggttactgttcaatgacagcaggtaacctataactgtgaatgcttcgtgtcgtcagtatttgcattacattcataaaagtgtgcaagtcctgtgactcccagcttaactgaaatactgttatgccacctaacttgagtacagcaaactggttttaggtttcaatgacattgatgtaaaatgatatcccatgaataaaaagtatttgtgtttggtttcagaa

SEQ ID NO: 7634 - DNA, 1052 bp, Homo sapiens
  source 1..1052: mol_type = unassigned DNA
ggggtgcatggaggtggaggcagcgttgggctgtagcgggcagggccggggatgtgggggggtggcaccggcggggagagggagggagcgagcgagcgagcggggcacaagggtgaggatttccaaagggctgagtggtgcgggcggctccgtgagaaaggcggattttcagctgaactctcatctctcaacactggcaaatattcataagatctaccacacccttaataagctgaacctaacagaagacattggccaagacgatcaccaaacaggaagtctgcggtcttgcagttcttcagactgctttaataaagtgatgccaccaaggaaaaagagaagacctgcctctggagatgatttatctgccaagaaaagtagacatgatagcatgtatagaaaatatgattcgactagaataaagactgaagaagaagccttttcaagtaaaaggtgcttggaatggttctatgaatatgcaggaactgatgatgttgtaggccctgaaggcatggagaaattttgtgaagacattggtgttgaaccagaaaacgtagttatgcttgtcctagcttggaaattggatgcacaaaacatgggttattttactctacaggagtggttaaaaggaatgacttctctccaatgtgatacaacagaaaaactcagaaatactttggattacttaagatcattcttaaatgattctacaaactttaaacttatttacagatatgcgtttgactttgcacgggaaaaggaccagcgcagcctagacataaacactgccaagtgcatgttgggactgttattaggaaaaatctggcccctttttccagtttttcaccaattcttagagcaatcaaaatacaaagttattaataaagaccagtggtgcaatgtcctagagtttagcagaacaattaatcttgacctcagcaactatgatgaagatggagcatggccagttttgttggacgagtttgtggagtggtataaagacaaacagatgtcctaggactttatgcatagcagcgagagagtcactgtta

SEQ ID NO: 7635 - DNA, 2086 bp, Homo sapiens
  source 1..2086: mol_type = unassigned DNA
tgcgaggcagctcgctcgttctgcgatctattgagagtggcttccaagagccccgtgcctatgtctgggagggagggaagatggcagccgtggcggcaggcggcctggtgggaaaggggcgcgacatcagcctagcggccctgcagcgccacgacccctatatcaaccgcatcgtggacgtggccagccaggtggctctgtacaccttcggccatcgggccaacgagtgggagaaaactgatgtggaaggaaccttatttgtttatacaaggtctgcttctccaaagcatggattcaccattatgaataggctgagcatggaaaataggacagaacctattactaaagacttggatttccaactccaggaccctttccttctctacagaaatgccagattgtccatctatggaatttggttttatgataaggaagaatgccaaagaattgcagagcttatgaaaaacctaactcagtatgaacagttgaaagcccatcagggaactggagcaggaatttccccagtgatcctcaattcaggagagggcaaagaagtagacattttacgaatgctcatcaaggccaaagacgaatacacaaagtgtaaaacctgttctgagccaaaaaagataaccagttcctctgccatctatgacaatccaaatctcatcaaaccaattccagtgaaacccagtgaaaaccagcaacagcgtatacctcagcccaaccagaccttagaccctgaaccccaacacttatccttgacagctctgtttgggaagcaggacaaagctacatgtcaggaaactgtggagcctccgcagactctccaccagcagcagcagcagcagcagcagcagcaagagaagcttccaattaggcagggggttgtacgctccctgtcctatgaggaacccagaagacactcaccccccattgagaagcagctctgtccagccattcagaaactcatggtcaggagcgcagacctccacccattgtcagagctgcctgaaaaccggccttgtgaaaatggcagtacccattctgcgggagaattttttacaggacctgtccagccagggtctcctcacaacattggaacttctcgtggtgtacaaaatgcttccagaactcagaacctgttcgagaaacttcagagtaccccaggggcagcaaacaagtgtgaccctagtacaccagcacctgccagctcagctgccctgaaccgcagcagagctcccacttctgtcacccctgtggctccaggaaagggtctggctcagccaccacaggcctatttcaatggctcccttccacctcagacagtaggacatcaggctcatggaagagaacagtccacactcccaagacaaacactccccatctctggtagtcagactggcagctctggagtgatctcccctcaagagttactgaagaagcttcagattgtacagcaggagcagcagctgcatgcctctaaccggccagccttggccgctaagtttcctgtgctcgctcagagctctggaacagggaaacccttggaatcctggatcaacaagacacccaacacagaacagcagactcctcttttccaggtcatctcacctcagcgcatccctgctacagcagctccgtctctgcttatgtcccccatggtgttcgcacaacccacctccgtcccgccaaaggaaagggagagcggcctcttgcctgtgggaggccaggagccacctgctgctgccaccagcctcctcctgcccatacagagcccggagccctccgtgatcaccagcagcccactcaccaagctccagctccaggaggcactgctgtacctcattcagaatgatgacaacttcttaaatataatctatgaagcctatctcttcagcatgactcaagcagccatgaaaaagactatgtgacagcaaggccttttaaaactgattttcaaggtccttctagaactccggcacaaggttctttcatgttgagtgttgtttccttcaatgtttctgccttttttaaaaaaaaagtatgtgtaatatgaagtaaaatgtttcagacttttttttat

SEQ ID NO: 7636 - DNA, 2073 bp, Homo sapiens
  source 1..2073: mol_type = unassigned DNA
ttccaagagccccgtgcctatgtctgggagggagggaagatggcagccgtggcggcaggcggcctggtgggaaaggggcgcgacatcagcctagcggccctgcagcgccacgacccctatatcaaccgcatcgtggacgtggccagccaggtggctctgtacaccttcggccatcgggccaacgagtgggagaaaactgatgtggaaggaaccttatttgtttatacaaggtctgcttctccaaagcatggattcaccattatgaataggctgagcatggaaaataggacagaacctattactaaagacttggatttccaactccaggaccctttccttctctacagaaatgccagatatgaggaaactgagactccagtgaggaggcagactgtgtaaaaacccacagattctgatttcacttccgttgctttttccacaccacctgtactgctctactattaaacatggatgcaaattaaagtgtccatctatggaatttggttttatgataaggaagaatgccaaagaattgcagagcttatgaaaaacctaactcagtatgaacagttgaaagcccatcagggaactggagcaggaatttccccagtgatcctcaattcaggagagggcaaagaagtagacattttacgaatgctcatcaaggccaaagacgaatacacaaagtgtaaaacctgttctgagccaaaaaagataaccagttcctctgccatctatgacaatccaaatctcatcaaaccaattccagtgaaacccagtgaaaaccagcaacagcgtatacctcagcccaaccagaccttagaccctgaaccccaacacttatccttgacagctctgtttgggaagcaggacaaagctacatgtcaggaaactgtggagcctccgcagactctccaccagcagcagcagcagcagcagcagcagcaagagaagcttccaattaggcagggggttgtacgctccctgtcctatgaggaacccagaagacactcaccccccattgagaagcagctctgtccagccattcagaaactcatggtcaggagcgcagacctccacccattgtcagagctgcctgaaaaccggccttgtgaaaatggcagtacccattctgcgggagaattttttacaggacctgtccagccagggtctcctcacaacattggaacttctcgtggtgtacaaaatgcttccagaactcagaacctgttcgagaaacttcagagtaccccaggggcagcaaacaagtgtgaccctagtacaccagcacctgccagctcagctgccctgaaccgcagcagagctcccacttctgtcacccctgtggctccaggaaagggtctggctcagccaccacaggcctatttcaatggctcccttccacctcagacagtaggacatcaggctcatggaagagaacagtccacactcccaagacaaacactccccatctctggtagtcagactggcagctctggagtgatctcccctcaagagttactgaagaagcttcagattgtacagcaggagcagcagctgcatgcctctaaccggccagccttggccgctaagtttcctgtgctcgctcagagctctggaacagggaaacccttggaatcctggatcaacaagacacccaacacagaacagcagactcctcttttccaggtcatctcacctcagcgcatccctgctacagcagctccgtctctgcttatgtcccccatggtgttcgcacaacccacctccgtcccgccaaaggaaagggagagcggcctcttgcctgtgggaggccaggagccacctgctgctgccaccagcctcctcctgcccatacagagcccggagccctccgtgatcaccagcagcccactcaccaagctccagctccaggaggcactgctgtacctcattcagaatgatgacaacttcttaaatataatctatgaagcctatctcttcagcatgactcaagcagccatgaaaaagactatgtgacagcaaggccttttaaaactgattttcaaggtccttctagaactccggcacaag

SEQ ID NO: 7637 - DNA, 8947 bp, Homo sapiens
  source 1..8947: mol_type = unassigned DNA
agtcttggggtccaaggctgagggagcgggacggaagtgagcgggtcccgccccttccccttctcgtctccgttggagtcgtctctgccgcggcttcctcggctgccagctctccggcgagccggagtcctagtgccgtaccgtcagtccccggccgcgcggagccgggatgcactgttcctgctgtgggtcctcatcatggagaccaaacgggtggagattcccggcagcgtcctggacgatttctgcagccgatttattttgcatattcccagcgaggaaagagacaatgcaatccgagtgtgttttcagattgaacttgcccattggttttacttggatttctacatgcagaacacaccaggattacctcagtgtgggataagagactttgctaaagctgtcttcagtcattgtccgtttttgctgcctcaaggtgaagatgtggaaaaagttttggatgaatggaaggaatataaaatgggagtaccaacatatggtgcaattattcttgatgagacacttgaaaatgtactactagttcaggggtacctagcaaaatcaggctggggatttccaaaaggaaaagtaaataaagaagaagctcctcatgattgtgctgctagagaggtctttgaagaaactggttttgatatcaaagactatatttgtaaggatgattacattgaacttcgaatcaatgaccagcttgctcgtttgtacatcattccaggaattccaaaagacacaaaatttaacccaaaaactagaagagaaattcggaacattgagtggttctctattgagaaattgccttgtcatagaaatgatatgacccccaaatccaaacttggtttggcacctaacaaattttttatggccattccctttatcagaccattaagggactggctttctcgaagatttggcgattcctcagacagtgacaatggattttcctcaactggtagcacgccggctaaacccactgtggaaaaattgagtcgaaccaaattccgccacagtcagcagttatttcctgacggttctcctggtgaccagtgggtaaagcacaggcaaccactgcagcaaaagccatataataatcattctgaaatgtctgaccttttaaaaggaaagaatcaaagtatgaggggaaatggcagaaaacagtatcaagattcacctaatcaaaagaaaagaacaaatgggcttcagccagcaaagcagcagaattctttgatgaagtgtgaaaagaaacttcatccacggaaacttcaggataattttgaaacagatgctgtatatgacttgcctagctccagtgaagaccagttgctagaacatgctgagggacagcccgtggcatgtaatggacattgcaagttccccttttcatccagagcctttttgagtttcaagtttgaccataatgctataatgaaaatcttggacctttgatagcagcacatgtattgtaaatgtcccaggatcagagacctgttgaatttgagtgggtgtctcctcaagccttacctttctcaggtgttttaaagaaatgcagggaggcaatgtttctgaagacattttctgtttataagagagtagaaagaaacacgagtttgcactgtaaatgcagttataaccttttatacagatttaccttttcagtgttcagtacaagtttaagttgctttctttgagggcatttattctgtgtgactgtgggttttattttgtattctggttaagaaaataatgtattgagttactgtcaagtagccaagttaatgggaatgctccatctacctgttacagtgattgcaataatagtatattggagtttttcaaagaaacttaaagtaatgcccaattattaaatgaacacaagagctgagatgtcacattcgtcagcattacaggtgatctattttggtggcattttgtacttctctctgcttctaaccactgaggctctctaatcttcctctggagttttagtgaaaggatttattgagcagcttctggaatataatgtgcatgtccaaaatgaactcagcgcttcaaaaggacaaagtctgtagcctggaggggcttgagtggatgggagctgatgctgtgattttgagctgtggttacatgcagtcagtaaacctgtgagactgctggaggaaatgtagcagacagcatggaggctgggacccagcagctactttgggtcatgtctttactgtcctgcctccaaccctttagtctcgtagacttttgttcttgtggaaatttcttctgtattccagttgtgtaaatatgtatggaaaactgatattactaggttttacgttgcatctccagtattgatctttggaaactgatgttacattaggttccaattcgcaatagtagcagagactgacatgcttttattgacctgctaagcccctggatgatggagcgagaagggaaggggtatgcagtttacccaagtccaaataaagcatttcactaggttacacgttatgtatatgtgttacataacagtaacatacataactcactcctaggaatgtattttgcttcaggatttttaaattcaaataaggatggcagtgcccattttaaggaggatttcagctataactgaggacaatcaccagggcgttaagggggctttagtgttttggctgcatctgacctcattgaaggaatttcttgggagtcgggggtgtttgagtatatgtgtgtgtgtgtaactatcatgtgggttttaaaaatccttttttacagtggtatccacaaaatacttctctgcttataaatgttattgtagaaatctttattctgtgtaggtagcctatttaattgggttccactgaacctcatgggacttttaaaagaagggctatttaaggaattcacttggtagtactttgctttagcttttaaatggcttgattttaaaggagaaattctatttattaatgaaagtgtcacccttttggtgctaagcaggagaattcacaattaaagcagtgtgtatagaattatgatattcagaatcctgcatcttttaatgtgacaaatttttgaatcctgtgacttttgctttttaatgcattatatgattgtgtttggaagcttttactgttcttttcagaaatacggctgctttgcttgggtctcttcgagccatatttatagttggtcccagcattccagacttctggtaaattgttaaaggagtgaaaatgtagtttgcctggcagatgaataattttcactcatttattgtcttctggaaaccatttaacttttactgttttttatttttttggtatgtgtttttttttttctttttaagtgcatactttggccagtcttcctggtgcctgtagagttggatttttcagctctcaatactgaagcaaaagagattatagttaccagaagtatggcctctaatggtgttgagccttttcaagaaccaacaaattatctttgtgattacagtagtttaactatggttaaatgttactgctgttgcgctgctttatttaatgcactgtggaacaaaatataagggtactgttggggtgtgattatgataacttcaggcttttagctctcctcaaagtttgaggttaaaaaaatgttaaaagatgtgagttaaagtttatgtgtgtgatgtgacttaactatgcagaaaatatttaagttggatgtacttgttttaggtacatctactatacttattctctcaaacctgggtaatagtttctcagtgttcaggttaccttgagaaaggccatgcttagcgaactggatttctcctttgagaaattttagtatggtttgaggaaatcaagtgataaaggagtatgctgaatatgcaatcatttacttctactgagtgctgcattttaagatgctagatgagaagagtagttggttttgcttcattatgttttatgtctttgagagagatacaggtcttggaattcactttttaaatgttacgttccaaccttatatgttccaaggtgcagtgcactgtgaatcttttatttttaaaaaaatttgtaggtgcttttatgtataactttaatgatttataagatgctaaatgaattgtttttgtacctaaccattgtaatccaaaagataagggtgtggtttacatgcttttcaaaaatttttgttaagaagtagcaaatgaatggtttaggatttcaaatagtgataccctcctgagacatgagcatttggagaggcctgagaacctaatagaactcatatagtgtgagtgaaatttgattaaagatgttggaaaatgaagttggatttttgtattcatgtataaaggaaagtctcccagtgctgtcaaaggaattgtggttactacttgctgttctgagctttgaatatcgttatttttctattaaatatcaattagtaagtatagctaatgaagacatataatgaaagtaattttatgctgtaagattgaattggtacttttccttattaaggctttagtaatttgtatgtaatgtcaaataaaaggaattcaaatctgagtaaataacagcctcctactataggaattagattcttctataaaagtcaccatattgtatcctatagaaaagttaaggtctgagtgcatgtgtgcattaaaaacatttcactacctattctctcatggacttctcatcctttcttttttcatctccaacagttaaatggtaaggagagcaaagttaattataaaaattagacattttgccaagttagttttcttaccacaataccctcttggcttttttttttttttttttgagatggagtttcactcctgttgcccaggctggagtgcaatggtgcaatttcggctcaccgcaacctacgcctcccgggttcaagtgattctcctgcctcagcctcccaagtagctgggattacaggcatgcgccaccacgccctgctaattctgtctttttagtagagacggggtttctccatgttggtcagggtggtctctcttggctttttatctttatttttgtaccagtggaccttcctgctccctgagactgttttgattgacatcttttgtgtttctatattttccgaggcagtattttctttgtatgttaatcatagttatagtaaagtcagactcattaacttttcttcctagtaattttgacttggattattttctagcctgggggatggggttcatatgtgttgttgtaactttagattactaaacaaaacaaactgtttttttgtttgaaggtatcctttacatacctgtctgtaggtaagcaagtgttagtaaaaacaattttgtcaaacagtactcctgacagcttggtaaagtctaggtagagtttctgattttgtattatgtcctaagacttgaaagtgcatttgtctagttgccaaaagttctaaaaatgagatggtgggctttctcagcatctttttgcttcctagaattgagttgctcttgaagtctgtactcctgtgtcagaaagatggcagactgcaaatgggcagtacaggctttgccccatgctttcaaagtaggattctggattgcagtttcaaaaaaatatgatagattattgttatagaatcaaagtgtcctgaagggagaagaatagctatagttgctgggcaaagagtgtaagaaagaaactttagagcatttatcaatacttgagtgctttattatgttccaggctagaaatgtgatcattgcatggcctaagtgtagtcattcatatatatatgaatatctatatctatatctatacatatatatgtatcgccattatcgagtgttttctagccctggataaagttaatttttttgaagtttgattgccaagcaatccagtgaatctaaagtaatttttctcactttaaagaccagtgatgaggagtctggtccttcctgtactgatactgtagaactccagtcaaacttcagtgcactgctttcttacaggaagacaactcagaacacacagccataatctgctttggtgtcagtcacatcacagtggttatacatttgtcctgaatggtgattcattcctttccatctaacttccttgtgacaaatagcatttactattgaaatagtcttaaaatagggaaaagagtgaaagttactcttatgcatgggagtgggcttaaagggttgacttccaccagctgagtacaaacaagtgtaaagaaaaactatgataaagtatggaggtcttgagaattgttcataatgaaatctttaatctgggttatcagagtaatgaaatcaccaataaaaacattccatttatcttggatcttctgtggttagcagaggagtatggtctagctatgttagcagcttgaaggcacaacgtaaaaggaatgagctttcacaaggtgcttacgttagctgggtagtattggtcaaaggtactctgaagagtgaatgcagaaatcagttggctgtgtttgtaatcttgtcccacatggaccctaacctttagtagacttcagtcttttagtccagtagaagacaatggccctgaatatgtgttttctgctttttggtggaaggtttcctgcaggtggttgggtggtttttgggttattggctactgttcgttcagtgccatttgaagacctgttgtttcttaatcctttttcttggtgtgactggccaggaaaaagtccattgagtcctttttttctccctggtgtcttaccccttctgtagaataatccatattttaaaatttgtttcacatctttatagcaaacctgccacagacttgcaagcagtgattttatctttccttcctgagaaggtgatctcacttttgatgtttgggtcacctgtggacacctgtgctcttttgagtctcaaggcttatagctttcacattggcttgggaacaacagacttgtgtgtggttctagagtgaaatgggcagtgttctgctggtcctcagtctttgagaggtcttaggcaacatccttagtatagtggaatttctgaggtcaaatttaacatttaatatattctccttttagttcattgaatctgaggttctaaatctgtagcttcattttgagcacaagtctgcattgtcattttttaagagattggcaggcatatccttttgtgatacttaggaaaagactatggatggcagcaaatgaaagtaaaggttctcaactgtgaatgaaatttagaaagataattcttcagcagttggttgattagatgggttagtgcttttggaatatataacagtagacttgtattctttatgcactatacatatgatacgcactgacagaaaagcacagaagacatactgctaagagtttctttgtgcatttcactactgttctaggggactgctgtctctttggttccttttaggtttgtgttaggatgttgcacaagtaatcatttaatgttaaatgcaagtgtccaaagaaatgagtcttaaagttctttggtcatatttcactttagagttaggacaggagacagctaacctgacttccattttacaaatattagaaactttttcttcagtaacaaaaacagggaaggacaataaaaccatgaactattttgctttatgtctgtttttaaaaaataattgttttgaagtttgcttattagcttaataccttatagtacttttaaaaaatcatccttggtaattattgacttatcctagatccatgtacaattcagacttttatctgttagctttaataaaaatttaaaaccatctcatttcagaataaaataaacggaattacagttcatgcattagcatttttaagtgaagttctcttaataagattgccttttgtctaaccgaaatagggcatacagattagtttggatgggaaagtggtaagacttgactttttaatactgtgcctatttccaaaagaagacttgatgtggctttttacattatgctttaaagatgttaatggaggatacatagtcttaaaacaatttgtttgggagtaagttttagtcggaaaaaggtgaagatatttatgctgagttatgttaagcaaattattttgagaccttttgctggtagacaaaaactgaggaaatgtttcactaaatatattatggtcaatgaaaaaaccagactttagagtaaatgtgataaccaagtagatttgtgaactttatttctttagtaattatttttatcttatgtgaaatgattcaacctttaatttttgcctagattatagcaatgttttgttttaccttatagggcattttaatgcttggagaaagactataagtgaatctacttcaagggattctgttcatggtggtatacagttcttggtgctcttttggaaattgtcaaacatttactgatagcagaaaaggaaccccaaaacacctgtagtgttcaccttgttataagaacagaaacatttggaacaggtttcattctgtttctagatttatgttgttgtagttgaacagcaactgtttttttccctcagtgttaacgaaaggataaagactacctgtattgttgggtatgactatcaaaggatttccggtgattcatgtttgtgaattggagtttaaatgtttgcaggattactgtacttccaaagacccactagaatgtcagctgtactctgtactctccactgagaaaatgaacaaaatcctatgtcttaacagttatgctctaactttttgaaagctttttgatgtaaataataggttagaaactaaaagccttttaatcttacaaaatacaatttgaacgatggaaggttgttcagatactggctttctgtaaaaacatcattgtgttagattgtttgtaatgtactatcaataaaattggctgcttgggcggttttagttaccacctta

SEQ ID NO: 7638 - DNA, 8029 bp, Homo sapiens
  source 1..8029: mol_type = unassigned DNA
gtgactccgggggctccgccccgagccttggcccagtcttggggtccaaggctgagggagcgggacggaagtgagcgggtcccgccccttccccttctcgtctccgttggagtcgtctctgccgcggcttcctcggctgccagctctccggcgagccggagtcctagtgccgtaccgtcagtccccggccgcgcggagccgggatgcactgttcctgctgtgggtcctcatcatggagaccaaacgggtggagattcccggcagcgtcctggacgatttctgcagccgatttattttgcatattcccagcgaggaaagagacaatgcaatccgagtgtgttttcagattgaacttgcccattggttttacttggatttctacatgcagaacacaccaggattacctcagtgtgggataagagactttgctaaagctgtcttcagtcattgtccgtttttgctgcctcaaggtgaagatgtggaaaaagttttggatgaatggaaggaatataaaatgggagtaccaacatatggtgcaattattcttgatgagacacttgaaaatgtactactagttcaggggtacctagcaaaatcaggctggggatttccaaaaggaaaagtaaataaagaagaagctcctcatgattgtgctgctagagaggtctttgaagaaactggttttgatatcaaagactatatttgtaaggatgattacattgaacttcgaatcaatgaccagcttgctcgtttgtacatcattccaggaattccaaaagacacaaaatttaacccaaaaactagaagagaaattcggaacattgagtggttctctattgagaaattgccttgtcatagaaatgatatgacccccaaatccaaacttggtttggcacctaacaaattttttatggccattccctttatcagaccattaagggactggctttctcgaagatttggcgattcctcagacagtgacaatggattttcctcaactggtagcacgccggctaaacccactgtggaaaaattgagtcgaaccaaattccgccacagtcagcagttatttcctgacggttctcctggtgaccagtgggtaaagcacaggcaaccactgcagcaaaagccatataataatcattctgaaatgtctgaccttttaaaaggaaagaagtgtgaaaagaaacttcatccacggaaacttcaggataattttgaaacagatgctgtatatgacttgcctagctccagtgaagaccagttgctagaacatgctgagggacagcccgtggcatgtaatggacattgcaagttccccttttcatccagagcctttttgagtttcaagtttgaccataatgctataatgaaaatcttggacctttgatagcagcacatgtattgtaaatgtcccaggatcagagacctgttgaatttgagtgggtgtctcctcaagccttacctttctcaggtgttttaaagaaatgcagggaggcaatgtttctgaagacattttctgtttataagagagtagaaagaaacacgagtttgcactgtaaatgcagttataaccttttatacagatttaccttttcagtgttcagtacaagtttaagttgctttctttgagggcatttattctgtgtgactgtgggttttattttgtattctggttaagaaaataatgtattgagttactgtcaagtagccaagttaatgggaatgctccatctacctgttacagtgattgcaataatagtatattggagtttttcaaagaaacttaaagtaatgcccaattattaaatgaacacaagagctgagatgtcacattcgtcagcattacaggtgatctattttggtggcattttgtacttctctctgcttctaaccactgaggctctctaatcttcctctggagttttagtgaaaggatttattgagcagcttctggaatataatgtgcatgtccaaaatgaactcagcgcttcaaaaggacaaagtctgtagcctggaggggcttgagtggatgggagctgatgctgtgattttgagctgtggttacatgcagtcagtaaacctgtgagactgctggaggaaatgtagcagacagcatggaggctgggacccagcagctactttgggtcatgtctttactgtcctgcctccaaccctttagtctcgtagacttttgttcttgtggaaatttcttctgtattccagttgtgtaaatatgtatggaaaactgatattactaggttttacgttgcatctccagtattgatctttggaaactgatgttacattaggttccaattcgcaatagtagcagagactgacatgcttttattgacctgctaagcccctggatgatggagcgagaagggaaggggtatgcagtttacccaagtccaaataaagcatttcactaggttacacgttatgtatatgtgttacataacagtaacatacataactcactcctaggaatgtattttgcttcaggatttttaaattcaaataaggatggcagtgcccattttaaggaggatttcagctataactgaggacaatcaccagggcgttaagggggctttagtgttttggctgcatctgacctcattgaaggaatttcttgggagtcgggggtgtttgagtatatgtgtgtgtgtgtaactatcatgtgggttttaaaaatccttttttacagtggtatccacaaaatacttctctgcttataaatgttattgtagaaatctttattctgtgtaggtagcctatttaattgggttccactgaacctcatgggacttttaaaagaagggctatttaaggaattcacttggtagtactttgctttagcttttaaatggcttgattttaaaggagaaattctatttattaatgaaagtgtcacccttttggtgctaagcaggagaattcacaattaaagcagtgtgtatagaattatgatattcagaatcctgcatcttttaatgtgacaaatttttgaatcctgtgacttttgctttttaatgcattatatgattgtgtttggaagcttttactgttcttttcagaaatacggctgctttgcttgggtctcttcgagccatatttatagttggtcccagcattccagacttctggtaaattgttaaaggagtgaaaatgtagtttgcctggcagatgaataattttcactcatttattgtcttctggaaaccatttaacttttactgttttttatttttttggtatgtgtttttttttttctttttaagtgcatactttggccagtcttcctggtgcctgtagagttggatttttcagctctcaatactgaagcaaaagagattatagttaccagaagtatggcctctaatggtgttgagccttttcaagaaccaacaaattatctttgtgattacagtagtttaactatggttaaatgttactgctgttgcgctgctttatttaatgcactgtggaacaaaatataagggtactgttggggtgtgattatgataacttcaggcttttagctctcctcaaagtttgaggttaaaaaaatgttaaaagatgtgagttaaagtttatgtgtgtgatgtgacttaactatgcagaaaatatttaagttggatgtacttgttttaggtacatctactatacttattctctcaaacctgggtaatagtttctcagtgttcaggttaccttgagaaaggccatgcttagcgaactggatttctcctttgagaaattttagtatggtttgaggaaatcaagtgataaaggagtatgctgaatatgcaatcatttacttctactgagtgctgcattttaagatgctagatgagaagagtagttggttttgcttcattatgttttatgtctttgagagagatacaggtcttggaattcactttttaaatgttacgttccaaccttatatgttccaaggtgcagtgcactgtgaatcttttatttttaaaaaaatttgtaggtgcttttatgtataactttaatgatttataagatgctaaatgaattgtttttgtacctaaccattgtaatccaaaagataagggtgtggtttacatgcttttcaaaaatttttgttaagaagtagcaaatgaatggtttaggatttcaaatagtgataccctcctgagacatgagcatttggagaggcctgagaacctaatagaactcatatagtgtgagtgaaatttgattaaagatgttggaaaatgaagttggatttttgtattcatgtataaaggaaagtctcccagtgctgtcaaaggaattgtggttactacttgctgttctgagctttgaatatcgttatttttctattaaatatcaattagtaagtatagctaatgaagacatataatgaaagtaattttatgctgtaagattgaattggtacttttccttattaaggctttagtaatttgtatgtaatgtcaaataaaaggaattcaaatctgagtaaataacagcctcctactataggaattagattcttctataaaagtcaccatattgtatcctatagaaaagttaaggtctgagtgcatgtgtgcattaaaaacatttcactacctattctctcatggacttctcatcctttcttttttcatctccaacagttaaatggtaaggagagcaaagttaattataaaaattagacattttgccaagttagttttcttaccacaataccctcttggcttttttttttttttttttgagatggagtttcactcctgttgcccaggctggagtgcaatggtgcaatttcggctcaccgcaacctacgcctcccgggttcaagtgattctcctgcctcagcctcccaagtagctgggattacaggcatgcgccaccacgccctgctaattctgtctttttagtagagacggggtttctccatgttggtcagggtggtctctcttggctttttatctttatttttgtaccagtggaccttcctgctccctgagactgttttgattgacatcttttgtgtttctatattttccgaggcagtattttctttgtatgttaatcatagttatagtaaagtcagactcattaacttttcttcctagtaattttgacttggattattttctagcctgggggatggggttcatatgtgttgttgtaactttagattactaaacaaaacaaactgtttttttgtttgaaggtatcctttacatacctgtctgtaggtaagcaagtgttagtaaaaacaattttgtcaaacagtactcctgacagcttggtaaagtctaggtagagtttctgattttgtattatgtcctaagacttgaaagtgcatttgtctagttgccaaaagttctaaaaatgagatggtgggctttctcagcatctttttgcttcctagaattgagttgctcttgaagtctgtactcctgtgtcagaaagatggcagactgcaaatgggcagtacaggctttgccccatgctttcaaagtaggattctggattgcagtttcaaaaaaatatgatagattattgttatagaatcaaagtgtcctgaagggagaagaatagctatagttgctgggcaaagagtgtaagaaagaaactttagagcatttatcaatacttgagtgctttattatgttccaggctagaaatgtgatcattgcatggcctaagtgtagtcattcatatatatatgaatatctatatctatatctatacatatatatgtatcgccattatcgagtgttttctagccctggataaagttaatttttttgaagtttgattgccaagcaatccagtgaatctaaagtaatttttctcactttaaagaccagtgatgaggagtctggtccttcctgtactgatactgtagaactccagtcaaacttcagtgcactgctttcttacaggaagacaactcagaacacacagccataatctgctttggtgtcagtcacatcacagtggttatacatttgtcctgaatggtgattcattcctttccatctaacttccttgtgacaaatagcatttactattgaaatagtcttaaaatagggaaaagagtgaaagttactcttatgcatgggagtgggcttaaagggttgacttccaccagctgagtacaaacaagtgtaaagaaaaactatgataaagtatggaggtcttgagaattgttcataatgaaatctttaatctgggttatcagagtaatgaaatcaccaataaaaacattccatttatcttggatcttctgtggttagcagaggagtatggtctagctatgttagcagcttgaaggcacaacgtaaaaggaatgagctttcacaaggtgcttacgttagctgggtagtattggtcaaaggtactctgaagagtgaatgcagaaatcagttggctgtgtttgtaatcttgtcccacatggaccctaacctttagtagacttcagtcttttagtccagtagaagacaatggccctgaatatgtgttttctgctttttggtggaaggtttcctgcaggtggttgggtggtttttgggttattggctactgttcgttcagtgccatttgaagacctgttgtttcttaatcctttttcttggtgtgactggccaggaaaaagtccattgagtcctttttttctccctggtgtcttaccccttctgtagaataatccatattttaaaatttgtttcacatctttatagcaaacctgccacagacttgcaagcagtgattttatctttccttcctgagaaggtgatctcacttttgatgtttgggtcacctgtggacacctgtgctcttttgagtctcaaggcttatagctttcacattggcttgggaacaacagacttgtgtgtggttctagagtgaaatgggcagtgttctgctggtcctcagtctttgagaggtcttaggcaacatccttagtatagtggaatttctgaggtcaaatttaacatttaatatattctccttttagttcattgaatctgaggttctaaatctgtagcttcattttgagcacaagtctgcattgtcattttttaagagattggcaggcatatccttttgtgatacttaggaaaagactatggatggcagcaaatgaaagtaaaggttctcaactgtgaatgaaatttagaaagataattcttcagcagttggttgattagatgggttagtgcttttggaatatataacagtagacttgtattctttatgcactatacatatgatacgcactgacagaaaagcacagaagacatactgctaagagtttctttgtgcatttcactactgttctaggggactgctgtctctttggttccttttaggtttgtgttaggatgttgcacaagtaatcatttaatgttaaatgcaagtgtccaaagaaatgagtcttaaagttctttggtcatatttcactttagagttaggacaggagacagctaacctgacttccattttacaaatattagaaactttttcttcagtaacaaaaacagggaaggacaataaaaccatgaactattttgctttatgtctgtttttaaaaaataattgttttgaagtttgcttattagcttaataccttatagtacttttaaaaaatcatccttggtaattattgacttatcctagatccatgtacaattcagacttttatctgttagctttaataaaaatttaaaaccatctcatttcagaataaaataaacggaattacagttcatgcattagcatttttaagtgaagttctcttaataagattgccttttgtctaaccgaaatagggcatacagattagtttggatgggaaagtggtaagacttgactttttaatactgtgcctatttccaaaagaagacttgatgtggctttttacattatgctttaaagatgttaatggaggatacatagtcttaaaacaatttgtttgggagtaagttttagtcggaaaaaggtgaagatatttatgctgagttat

SEQ ID NO: 7639 - DNA, 1500 bp, Homo sapiens
  source 1..1500: mol_type = unassigned DNA
cccgccccttccccttctcgtctccgttggagtcgtctctgccgcggcttcctcggctgccagctctccggcgagccggagtcctagtgccgtaccgtcagtccccggccgcgcggagccgggatgcactgttcctgctgtgggtcctcatcatggagaccaaacgggtggagattcccggcagcgtcctggacgatttctgcaggtactactagttcaggggtacctagcaaaatcaggctggggatttccaaaaggaaaagtaaataaagaagaagctcctcatgattgtgctgctagagaggtctttgaagaaactggttttgatatcaaagactatatttgtaaggatgattacattgaacttcgaatcaatgaccagcttgctcgtttgtacatcattccaggaattccaaaagacacaaaatttaacccaaaaactagaagagaaattcggaacattgagtggttctctattgagaaattgccttgtcatagaaatgatatgacccccaaatccaaacttggtttggcacctaacaaattttttatggccattccctttatcagaccattaagggactggctttctcgaagatttggcgattcctcagacagtgacaatggattttcctcaactggtagcacgccggctaaacccactgtggaaaaattgagtcgaaccaaattccgccacagtcagcagttatttcctgacggttctcctggtgaccagtgggtaaagcacaggcaaccactgcagcaaaagccatataataatcattctgaaatgtctgaccttttaaaaggaaagaatcaaagtatgaggggaaatggcagaaaacagtatcaagattcacctaatcaaaagaaaagaacaaatgggcttcagccagcaaagcagcagaattctttgatgaagtgtgaaaagaaacttcatccacggaaacttcaggataattttgaaacagatgctgtatatgacttgcctagctccagtgaagaccagttgctagaacatgctgagggacagcccgtggcatgtaatggacattgcaagttccccttttcatccagagcctttttgagtttcaagtttgaccataatgctataatgaaaatcttggacctttgatagcagcacatgtattgtaaatgtcccaggatcagagacctgttgaatttgagtgggtgtctcctcaagccttacctttctcaggtgttttaaagaaatgcagggaggcaatgtttctgaagacattttctgtttataagagagtagaaagaaacacgagtttgcactgtaaatgcagttataaccttttatacagatttaccttttcagtgttcagtacaagtttaagttgctttctttgagggcatttattctgtgtgactgtgggttttattttgtattctggttaagaaaataatgtattgagttactgtcaagtagccaagttaatgggaatgctccatctacctgttacagtgattgca

SEQ ID NO: 7640 - DNA, 2469 bp, Homo sapiens
  source 1..2469: mol_type = unassigned DNA
cttcacaggattggagaaggtttgtgttcccgacgccttggtagttggcataggctaaagaaaagggatctcagccccgaggaagggtcaccctcctagagatagctactaccccgtctcaggagaccctggtatttctagagcacgctttgctttcaccaaacccaaggaggtgacaggaggagcccccgcacaggacctaagaatgctgtgaccagaagatgggatcgcggaacagcagcagtgcaggatccgggtccggagacccctccgagggcttgccccgaagaggggctggcctgcgtcggagtgaggaagaggaagaagaggatgaagatgtggatctggcccaggtactggcctatctcctccgcagaggccaagtgaggttggtgcagggaggaggtgcagcaaatttacaattcattcaggccctcttggactcagaggaagagaatgacagagcttgggatggtcgtcttggggatcgatacaacccacctgtggatgctacccctgacacccgggagctggaattcaatgagatcaagacacaagtggaactggccacagggcagctggggcttaggcgggccgcccagaagcacagctttcctcgaatgttgcaccagcttcttgcccaatgatctgggcttcactgatagctactctcagaaggctttctgtggcatctacagcaaagatggtcaaatattcatgtctgcttgccaagaccagacaatccgactctatgactgccgatatggccgtttccgtaaattcaagagcatcaaggcccgcgacgtaggctggagcgtcttggatgtggccttcacccctgatgggaaccacttcctctactctagctggtctgattacattcatatctgcaatatctatggtgagggagatacacacactgccctggatctcaggccagatgagcgtcgctttgctgtcttctccattgctgtctcctcagatggacgagaagtactaggaggggccaatgatggctgcctgtatgtctttgaccgagaacagaaccggcgcacccttcagattgagtcccatgaggatgatgtgaatgcagtggcctttgctgatataagctcccaaatcctgttctctgggggagatgatgccatctgcaaagtgtgggatcgacgcaccatgcgggaggatgaccccaagcctgtgggtgcactggctggacaccaggatggcatcaccttcattgacagcaagggtgatgcccggtatctgatctccaactctaaagaccagaccatcaaactctgggatatccgacgcttttccagccgggaaggcatggaagcttcacgccaggctgccacacagcaaaactgggactatcggtggcagcaagtgcccaaaaaagcctggcggaagctgaagctcccaggggacagctccttgatgacctaccggggccacggagtgctgcacaccctcatccgctgccggttctcccccattcatagcactggccagcagttcatctacagtggctgctccactggcaaagtggttgtgtacgaccttctaagtggccacattgtgaagaagctgaccaaccacaaggcctgtgtgcgtgacgtcagttggcacccctttgaagagaagattgtcagcagttcgtgggacgggaacctgcgtctgtggcagtaccgccaggctgagtacttccaggatgacatgccagaatctgaggaatgtgccagcgcccctgccccagtgccccaatcctctacacccttttcctcaccccagtagatccaacctccagccccatatagggtgaacctcttgataagctctctgcctcctcctccctttctcccttgtggggaatgtttggaggaatcactggcatttgatggggaataacataagcctgggctctgagcctcagctgagccctggaagattctccccatggggcagagtggtctccttacgtgctcacacccagtcagcttgggtccctatctctggccagagtttggcaggactgccattatctggggtgtggcctctgccagcaagagaagtgtcctgggtgtttttaatcatgtttgaatgttaggggttggatcctagagtagatgcctgaggccacatctgaacagacctgtcagccaggcctgccaggtcttcacgttgaggattcaactggccaatcacaggacaggtgtcctggcctttcttcctgaggtctctaggggaggggcatgggtaagggtgtttcctcagcaccctcctggggtggggattatgtctgctgtcatgtctgggtctttagggtaggacaggctgtggtatgagaggcaggagtctccacaaggcttcatgtggccccttatagggcaggccctgccctctgggaaggtcccttcatgctggaggcacacagctttaaggaagtaggttgaagtaggactcctt

SEQ ID NO: 7641 - DNA, 2402 bp, Homo sapiens
  source 1..2402: mol_type = unassigned DNA
agttggtgagctagggtagcgcactacggttcactcttgctttctttgcttcacaggattggagaaggaggtgacaggaggagcccccgcacaggacctaagaatgctgtgaccagaagatgggatcgcggaacagcagcagtgcaggatccgggtccggagacccctccgagggcttgccccgaagaggggctggcctgcgtcggagtgaggaagaggaagaagaggatgaagatgtggatctggcccaggccctcttggactcagaggaagagaatgacagagcttgggatggtcgtcttggggatcgatacaacccacctgtggatgctacccctgacacccgggagctggaattcaatgagatcaagacacaagtggaactggccacagggcagctggggcttaggcgggccgcccagaagcacagctttcctcgaatgttgcaccagagagaacggggcctctgccatcggggaagcttctcccttggagaacagtctcgagtgatatctcacttcttgcccaatgatctgggcttcactgatagctactctcagaaggctttctgtggcatctacagcaaagatggtcaaatattcatgtctgcttgccaagaccagacaatccgactctatgactgccgatatggccgtttccgtaaattcaagagcatcaaggcccgcgacgtaggctggagcgtcttggatgtggccttcacccctgatgggaaccacttcctctactctagctggtctgattacattcatatctgcaatatctatggtgagggagatacacacactgccctggatctcaggccagatgagcgtcgctttgctgtcttctccattgctgtctcctcagatggacgagaagtactaggaggggccaatgatggctgcctgtatgtctttgaccgagaacagaaccggcgcacccttcagattgagtcccatgaggatgatgtgaatgcagtggcctttgctgatataagctcccaaatcctgttctctgggggagatgatgccatctgcaaagtgtgggatcgacgcaccatgcgggaggatgaccccaagcctgtgggtgcactggctggacaccaggatggcatcaccttcattgacagcaagggtgatgcccggtatctgatctccaactctaaagaccagaccatcaaactctgggatatccgacgcttttccagccgggaaggcatggaagcttcacgccaggctgccacacagcaaaactgggactatcggtggcagcaagtgcccaaaaaagcctggcggaagctgaagctcccaggggacagctccttgatgacctaccggggccacggagtgctgcacaccctcatccgctgccggttctcccccattcatagcactggccagcagttcatctacagtggctgctccactggcaaagtggttgtgtacgaccttctaagtggccacattgtgaagaagctgaccaaccacaaggcctgtgtgcgtgacgtcagttggcacccctttgaagagaagattgtcagcagttcgtgggacgggaacctgcgtctgtggcagtaccgccaggctgagtacttccaggatgacatgccagaatctgaggaatgtgccagcgcccctgccccagtgccccaatcctctacacccttttcctcaccccagtagatccaacctccagccccatatagggtgaacctcttgataagctctctgcctcctcctccctttctcccttgtggggaatgtttggaggaatcactggcatttgatggggaataacataagcctgggctctgagcctcagctgagccctggaagattctccccatggggcagagtggtctccttacgtgctcacacccagtcagcttgggtccctatctctggccagagtttggcaggactgccattatctggggtgtggcctctgccagcaagagaagtgtcctgggtgtttttaatcatgtttgaatgttaggggttggatcctagagtagatgcctgaggccacatctgaacagacctgtcagccaggcctgccaggtcttcacgttgaggattcaactggccaatcacaggacaggtgtcctggcctttcttcctgaggtctctaggggaggggcatgggtaagggtgtttcctcagcaccctcctggggtggggattatgtctgctgtcatgtctgggtctttagggtaggacaggctgtggtatgagaggcaggagtctccacaaggcttcatgtggccccttatagggcaggccctgccctctgggaaggtcccttcatgctggaggcacacagctttaaggaagtaggttgaagtaggactccttcgtcctctcactggctttggctccctcaataaactgtgtgggaacctg

SEQ ID NO: 7642 - DNA, 4299 bp, Homo sapiens
  source 1..4299: mol_type = unassigned DNA
tgacgtttgcagcccgccggccaggaagccgcgagatgcgtgacgagcgaagcgcgtgacggaggagcggttggccaacgcagtggcggcagtcggtgtaaacaaggcctcgcgccgctgcgggtcctgcgaccgctcctggctggtgggtggtctcgcgtggggcggttaccgccggcttcagtgggaggtgcttctcggcttcctccccctcatggcgtacacacccccggcgcaccacgtgggcgtgaggcgaggaaggaggggtgttaggccaaattctattttcattggctgtcactgctgccggcctttgtaagggggcgctctgattggtcgataaggtgggggcgtcgagggtctttgagtcctaaggcttctaattggttagatgagataagctagtgaagcgctttcttccgagagggatttcgattggtcggtcagagaggttacctggaaatccaacaccgcccaacacccctcccgctccccagtccggggacttcgataggattggagaaggtttgtgttcccgacgccttggtagttggcataggctaaagaaaagggatctcagccccgaggaagggtcaccctcctagagatagctactaccccgtctcaggagaccctggtatttctagagcacgctttgctttcaccaaacccaaggaggtgacaggaggagcccccgcacaggacctaagaatgctgtgaccagaagatgggatcgcggaacagcagcagtgcaggatccgggtccggagacccctccgagggcttgccccgaagaggggctggcctgcgtcggagtgaggaagaggaagaagaggatgaagatgtggatctggcccaggtactggcctatctcctccgcagaggccaagtgaggttggtgcagggaggaggtgcagcaaatttacaattcattcaggccctcttggactcagaggaagagaatgacagagcttgggatggtcgtcttggggatcgatacaacccacctgtggatgctacccctgacacccgggagctggaattcaatgagatcaagacacaagtggaactggccacagggcagctggggcttaggcgggccgcccagaagcacagctttcctcgaatgttgcaccagagagaacggggcctctgccatcggggaagcttctcccttggagaacagtctcgagtgatatctcacttcttgcccaatgatctgggcttcactgatagctactctcagaaggctttctgtggcatctacagcaaagatggtcaaatattcatgtctgcttgccaagaccagacaatccgactctatgactgccgatatggccgtttccgtaaattcaagagcatcaaggcccgcgacgtaggctggagcgtcttggatgtggccttcacccctgatgggaaccacttcctctactctagctggtctgattacattcatatctgcaatatctatggtgagggagatacacacactgccctggatctcaggccagatgagcgtcgctttgctgtcttctccattgctgtctcctcagatggacgagaagtactaggaggggccaatgatggctgcctgtatgtctttgaccgagaacagaaccggcgcacccttcagattgagtcccatgaggatgatgtgaatgcagtggcctttgctgatataagctcccaaatcctgttctctgggggagatgatgccatctgcaaagtgtgggatcgacgcaccatgcgggaggatgaccccaagcctgtgggtgcactggctggacaccaggatggcatcaccttcattgacagcaagggtgatgcccggtatctgatctccaactctaaagaccagaccatcaaactctgggatatccgacgcttttccagccgggaaggcatggaagcttcacgccaggctgccacacagcaaaactgggactatcggtggcagcaagtgcccaaaaaagcctggcggaagctgaagctcccaggggacagctccttgatgacctaccggggccacggagtgctgcacaccctcatccgctgccggttctcccccattcatagcactggccagcagttcatctacagtggctgctccactggcaaagtggttgtgtacgaccttctaagtggccacattgtgaagaagctgaccaaccacaaggcctgtgtgcgtgacgtcagttggcacccctttgaagagaagattgtcagcagttcgtgggacgggaacctgcgtctgtggcagtaccgccaggctgagtacttccaggatgacatgccagaatctgaggaatgtgccagcgcccctgccccagtgccccaatcctctacacccttttcctcaccccagtagatccaacctccagccccatatagggtgaacctcttgataagctctctgcctcctcctccctttctcccttgtggggaatgtttggaggaatcactggcatttgatggggaataacataagcctgggctctgagcctcagctgagccctggaagattctccccatggggcagagtggtctccttacgtgctcacacccagtcagcttgggtccctatctctggccagagtttggcaggactgccattatctggggtgtggcctctgccagcaagagaagtgtcctgggtgtttttaatcatgtttgaatgttaggggttggatcctagagtagatgcctgaggccacatctgaacagacctgtcagccaggcctgccaggtcttcacgttgaggattcaactggccaatcacaggacaggtgtcctggcctttcttcctgaggtctctaggggaggggcatgggtaagggtgtttcctcagcaccctcctggggtggggattatgtctgctgtcatgtctgggtctttagggtaggacaggctgtggtatgagaggcaggagtctccacaaggcttcatgtggccccttatagggcaggccctgccctctgggaaggtcccttcatgctggaggcacacagctttaaggaagtaggttgaagtaggactccttcgtcctctcactggctttggctccctcaataaactgtgtgggaacctggctcagtgtctgtctctctctctcactctctgtttttcctatctgaggtctttcatctcctcacttcaggaaaacacagttcagcaaagtcttcagatgcgatcctgtgtaggagaaaatacccttctggtgccccatgaaaaagggaaataccaaaaccatttgttcactgagccttgcaataggtgctcccttaccaatttcagaagcttccctgcaagtagatatcgagagagcacactttccattagagcctggtaatacccatatcacctctgctctgaggctgggcctgcagctgtgtagtctttggaagaggtagcccctgaacgcagagcctaagagaagcaagtcggccctgacgccaggccccagtgggcgcctcacactcagaacctcataccccagagcaaaccgatggtcagggagagggctagagctcacacccagctcggaatagatcttccctgatgacatttcatgccctctaaggcagtttttaaatgaaggtacacacatccaggggtgttcacaggctttcacagcaagggtacctatttcatggcaaaataggcagttttaaaagaataaacaagctaggtgtggtggctcatgcctgtaatcctagcactttgggaagccaaagctgatggatcgcttgagcccaggagtttgagaccagcctgggcaacatggcaaaaccccatctctacaaaaaatacaaaaagtaggccgggcacggtggttcacacctgtaatcccggcattttgggaggccgagataggtggatcacctgaagtcaggtgtttgagaccagcctggccaacatggtggaacccaatctctactaaaaatacaaaaaaactagccggatatggtggcgggtgcctgtaatctcagctacttgagaggctgaggcaggagaatcgcttgaacttgggagcagaggtgagctgagtgcagtgagccaagaccatgccattacactcaagcttgggcaacgagagcaaaactctgtctcaaaaaaaaaattagccagatgtggtgacgcatgcctgtagtcctagctactcaggaggctgaggtgggaggatcacctaaggccaggaggtcaaggctgcggtgagccgtgattgtgccaatgtactccagcctaggtgacagagtgagaccctgtctcaaaaataaataataaataaataaatgttca

SEQ ID NO: 7643 - DNA, 947 bp, Homo sapiens
  source 1..947: mol_type = unassigned DNA
gtgtgacgtttgcagcccgccggccaggaagccgcgagatgcgtgacgagcgaagcgcgtgacggaggagcggttggccaacgcagtggcggcagtcggtgtaaacaaggcctcgcgccgctgcgggtcctgcgaccgctcctggctggtgggtggtctcgcgtggggcggttaccgccggcttcagtgggaggtgcttctcggcttcctccccctcatggcgtacacacccccggcgcaccacgtgggcgtgaggcgaggaaggaggggtgttaggccaaattctattttcattggctgtcactgctgccggcctttgtaagggggcgctctgattggtcgataaggtgggggcgtcgagggtctttgagtcctaaggcttctaattggttagatgagataagctagtgaagcgctttcttccgagagggatttcgattggtcggtcagagaggttacctggaaatccaacaccgcccaacacccctcccgctccccagtccggggacttcgataggattggagaaggaggtgacaggaggagcccccgcacaggacctaagaatgctgtgaccagaagatgggatcgcggaacagcagcagtgcaggatccgggtccggagacccctccgagggcttgccccgaagaggggctggcctgcgtcggagtgaggaagaggaagaagaggatgaagatgtggatctggcccaggtactggcctatctcctccgcagaggccaagtgaggttggtgcagggaggaggtgcagcaaatttacaattcattcaggccctcttggactcagaggaagagaatgacagagcttgggatggtcgtcttggggatcgatacaacccacctgtggatgctacccctgacacccgggagctggaattcaatgagatcaagacacaagtggaactggccacagggcagctggggctta

SEQ ID NO: 7644 - DNA, 581 bp, Homo sapiens
  source 1..581: mol_type = unassigned DNA
gtgtgacgtttgcagcccgccggccaggaagccgcgagatgcgtgacgagcgaagcgcgtgacggaggagcggttggccaacgcagtggcggcagtcggtgtaaacaaggcctcgcgccgctgcgggtcctgcgaccgctcctggctggattggagaaggtttgtgttcccgacgccttggtagttggcataggctaaagaaaagggatctcagccccgaggaagggtcaccctcctagagatagctactaccccgtctcaggagaccctggtatttctagagcacgctttgctttcaccaaacccaaggaggtgacaggaggagcccccgcacaggacctaagaatgctgtgaccagaagatgggatcgcggaacagcagcagtgcaggatccgggtccggagacccctccgagggcttgccccgaagaggggctggcctgcgtcggagtgaggaagaggaagaagaggatgaagatgtggatctggcccaggtactggcctatctcctccgcagaggccaagtgaggttggtgcagggaggaggtgcagcaaatttacaattcattcaggccctcttgg

SEQ ID NO: 7645 - DNA, 592 bp, Homo sapiens
  source 1..592: mol_type = unassigned DNA
gacttcgataggtgagtttggtgtagaaaacaaatctttcttcagttggtgagctagggtagcgcactacggttcactcttgctttctttgcttcacaggattggagaaggtttgtgttcccgacgccttggtagttggcataggctaaagaaaagggatctcagccccgaggaagggtcaccctcctagagatagctactaccccgtctcaggagaccctggtatttctagagcacgctttgctttcaccaaacccaaggaggtgacaggaggagcccccgcacaggacctaagaatgctgtgaccagaagatgggatcgcggaacagcagcagtgcaggatccgggtccggagacccctccgagggcttgccccgaagaggggctggcctgcgtcggagtgaggaagaggaagaagaggatgaagatgtggatctggcccaggtactggcctatctcctccgcagaggccaagtgaggttggtgcagggaggaggtgcagcaaatttacaattcattcaggccctcttggactcagaggaagagaatgacagagcttgggatggtcgtcttggggatcgatacaacccac

SEQ ID NO: 7646 - DNA, 849 bp, Homo sapiens
  source 1..849: mol_type = unassigned DNA
gaaagacgcgtgtattagggaacgtctgcaaagaccgcggcggaaagccagggattgtcttaaaaaattgtcagaccggataaagggaggtctaaaaggggaccgtcccaagagcaaggcttccaaaagctaagcccggaaggacggcacctcgcgcattctcccgcctacctatcaatcatcgtgctccgctgtccagttggctggccaagggggcggggccgtcgtgtgacgtttgcagcccgccggccaggaagccgcgagatgcgtgacgagcgaagcgcgtgacggaggagcggttggccaacgcagtggcggcagtcggtgtaaacaaggcctcgcgccgctgcgggtcctgcgaccgctcctggctgggatttcgattggtcggtcagagaggttacctggaaatccaacaccgcccaacacccctcccgctccccagtccggggacttcgataggattggagaaggaggtgacaggaggagcccccgcacaggacctaagaatgctgtgaccagaagatgggatcgcggaacagcagcagtgcaggatccgggtccggagacccctccgagggcttgccccgaagaggggctggcctgcgtcggagtgaggaagaggaagaagaggatgaagatgtggatctggcccaggtactggcctatctcctccgcagaggccaagtgaggttggtgcagggaggaggtgcagcaaatttacaattcattcaggccctcttggactcagaggaagagaatgacagagcttgggatggtcgtcttggggatcgatacaacccacctgtggatgctacccctgacacccgggagctggaattcaatgag

SEQ ID NO: 7647 - DNA, 2711 bp, Homo sapiens
  source 1..2711: mol_type = unassigned DNA
agttcccacttactcctccccagcaagagctaacagccctccttgggtgtgcactttctcctcccctcaggcacctcgcgcattctcccgcctacctatcaatcatcgtgctccgctgtccagttggctggccaagggggcggggccgtcgtgtgacgtttgcagcccgccggccaggaagccgcgagatgcgtgacgagcgaagcgcgtgacggaggagcggttggccaacgcagtggcggcagtcggtgtaaacaaggcctcgcgccgctgcgggtcctgcgaccgctcctggctggaggtgacaggaggagcccccgcacaggacctaagaatgctgtgaccagaagatgggatcgcggaacagcagcagtgcaggatccgggtccggagacccctccgagggcttgccccgaagaggggctggcctgcgtcggagtgaggaagaggaagaagaggatgaagatgtggatctggcccaggtactggcctatctcctccgcagaggccaagtgaggttggtgcagggaggaggtgcagcaaatttacaattcattcaggccctcttggactcagaggaagagaatgacagagcttgggatggtcgtcttggggatcgatacaacccacctgtggatgctacccctgacacccgggagctggaattcaatgagatcaagacacaagtggaactggccacagggcagctggggcttaggcgggccgcccagaagcacagctttcctcgaatgttgcaccagagagaacggggcctctgccatcggggaagcttctcccttggagaacagtctcgagtgatatctcacttcttgcccaatgatctgggcttcactgatagctactctcagaaggctttctgtggcatctacagcaaagatggtcaaatattcatgtctgcttgccaagaccagacaatccgactctatgactgccgatatggccgtttccgtaaattcaagagcatcaaggcccgcgacgtaggctggagcgtcttggatgtggccttcacccctgatgggaaccacttcctctactctagctggtctgattacattcatatctgcaatatctatggtgagggagatacacacactgccctggatctcaggccagatgagcgtcgctttgctgtcttctccattgctgtctcctcagatggacgagaagtactaggaggggccaatgatggctgcctgtatgtctttgaccgagaacagaaccggcgcacccttcagattgagtcccatgaggatgatgtgaatgcagtggcctttgctgatataagctcccaaatcctgttctctgggggagatgatgccatctgcaaagtgtgggatcgacgcaccatgcgggaggatgaccccaagcctgtgggtgcactggctggacaccaggatggcatcaccttcattgacagcaagggtgatgcccggtatctgatctccaactctaaagaccagaccatcaaactctgggatatccgacgcttttccagccgggaaggcatggaagcttcacgccaggctgccacacagcaaaactgggactatcggtggcagcaagtgcccaaaaaagcctggcggaagctgaagctcccaggggacagctccttgatgacctaccggggccacggagtgctgcacaccctcatccgctgccggttctcccccattcatagcactggccagcagttcatctacagtggctgctccactggcaaagtggttgtgtacgaccttctaagtggccacattgtgaagaagctgaccaaccacaaggcctgtgtgcgtgacgtcagttggcacccctttgaagagaagattgtcagcagttcgtgggacgggaacctgcgtctgtggcagtaccgccaggctgagtacttccaggatgacatgccagaatctgaggaatgtgccagcgcccctgccccagtgccccaatcctctacacccttttcctcaccccagtagatccaacctccagccccatatagggtgaacctcttgataagctctctgcctcctcctccctttctcccttgtggggaatgtttggaggaatcactggcatttgatggggaataacataagcctgggctctgagcctcagctgagccctggaagattctccccatggggcagagtggtctccttacgtgctcacacccagtcagcttgggtccctatctctggccagagtttggcaggactgccattatctggggtgtggcctctgccagcaagagaagtgtcctgggtgtttttaatcatgtttgaatgttaggggttggatcctagagtagatgcctgaggccacatctgaacagacctgtcagccaggcctgccaggtcttcacgttgaggattcaactggccaatcacaggacaggtgtcctggcctttcttcctgaggtctctaggggaggggcatgggtaagggtgtttcctcagcaccctcctggggtggggattatgtctgctgtcatgtctgggtctttagggtaggacaggctgtggtatgagaggcaggagtctccacaaggcttcatgtggccccttatagggcaggccctgccctctgggaaggtcccttcatgctggaggcacacagctttaaggaagtaggttgaagtaggactccttcgtcctctcactggctttggctccctcaataaactgtgtgggaacctg

SEQ ID NO: 7648 - DNA, 547 bp, Homo sapiens
  source 1..547: mol_type = unassigned DNA
ctttcttcagttggtgagctagggtagcgcactacggttcactcttgctttctttgcttcacaggattggagaaggtttgtgttcccgacgccttggtagttggcataggctaaagaaaagggatctcagccccgaggaagggtcaccctcctagagatagctactaccccgtctcaggagaccctggtatttctagagcacgctttgctttcaccaaacccaaggaggtgacaggaggagcccccgcacaggacctaagaatgctgtgaccagaagatgggatcgcggaacagcagcagtgcaggatccgggtccggagacccctccgagggcttgccccgaagaggggctggcctgcgtcggagtgaggaagaggaagaagaggatgaagatgtggatctggcccaggccctcttggactcagaggaagagaatgacagagcttgggatggtcgtcttggggatcgatacaacccacctgtggatgctacccctgacacccgggagctggaattcaatgagatcaagacacaagtggaactggcc

SEQ ID NO: 7649 - DNA, 300 bp, Homo sapiens
  source 1..300: mol_type = unassigned DNA
ataagctagtgaagcgctttcttccgagagggatttcgattggtcggtcagagaggttacctggaaatccaacaccgcccaacacccctcccgctccccagtccggggacttcgataggattggagaagagcacgctttgctttcaccaaacccaaggaggtgacaggaggagcccccgcacaggacctaagaatgctgtgaccagaagatgggatcgcggaacagcagcagtgcaggatccgggtccggagacccctccgagggcttgccccgaagaggggctggcctgcgtcggagtg

SEQ ID NO: 7650 - DNA, 575 bp, Homo sapiens
  source 1..575: mol_type = unassigned DNA
agttggtgagctagggtagcgcactacggttcactcttgctttctttgcttcacaggattggagaagagcacgctttgctttcaccaaacccaaggaggtgacaggaggagcccccgcacaggacctaagaatgctgtgaccagaagatgggatcgcggaacagcagcagtgcaggatccgggtccggagacccctccgagggcttgccccgaagaggggctggcctgcgtcggagtgaggaagaggaagaagaggatgaagatgtggatctggcccaggtactggcctatctcctccgcagaggccaagtgaggttggtgcagggaggaggtgcagcaaatttacaattcattcaggccctcttggactcagaggaagagaatgacagagcttgggatggtcgtcttggggatcgatacaacccacctgtggatgctacccctgacacccgggagctggaattcaatgagatcaagacacaagtggaactggccacagggcagctggggcttaggcgggccgcccagaagcacagctttcctcgaatgttgcaccagagagaacggggcctctg

SEQ ID NO: 7651 - DNA, 476 bp, Homo sapiens
  source 1..476: mol_type = unassigned DNA
aggaagccgcgagatgcgtgacgagcgaagcgcgtgacggaggagcggttggccaacgcagtggcggcagtcggtgtaaacaaggcctcgcgccgctgcgggtcctgcgaccgctcctggctgggatttcgattggtcggtcagagaggttacctggaaatccaacaccgcccaacacccctcccgctccccagtccggggacttcgataggattggagaaggaggtgacaggaggagcccccgcacaggacctaagaatgctgtgaccagaagatgggatcgcggaacagcagcagtgcaggatccgggtccggagacccctccgagggcttgccccgaagaggggctggcctgcgtcggagtgaggaagaggaagaagaggatgaagatgtggatctggcccagaggccaagtgaggttggtgcagggaggaggtgcagcaaatttacaattcattcaggccctcttggactca

SEQ ID NO: 7652 - DNA, 587 bp, Homo sapiens
  source 1..587: mol_type = unassigned DNA
agttggtgagctagggtagcgcactacggttcactcttgctttctttgcttcacaggattggagaaggtttgtgttcccgacgccttggtagttggcataggctaaagaaaagggatctcagccccgaggaagggtcaccctcctagagatagctactaccccgtctcaggagaccctggtatttctagagcacgctttgctttcaccaaacccaaggaggtgacaggaggagcccccgcacaggacctaagaatgctgtgaccagaagatgggatcgcggaacagcagcagtgcaggatccgggtccggagacccctccgagggcttgccccgaagaggggctggcctgcgtcggagtgaggaagaggaagaagaggatgaagatgtggatctggcccaggtactggcctatctcctccgcaggccctcttggactcagaggaagagaatgacagagcttgggatggtcgtcttggggatcgatacaacccacctgtggatgctacccctgacacccgggagctggaattcaatgagatcaagacacaagtggaactggccacagggcagctggggcttaggcggg

SEQ ID NO: 7653 - DNA, 545 bp, Homo sapiens
  source 1..545: mol_type = unassigned DNA
agtggcggcagtcggtgtaaacaaggcctcgcgccgctgcgggtcctgcgaccgctcctggctggtgggtggtctcgcgtggggcggttaccgccggcttcagtgggaggaggtgacaggaggagcccccgcacaggacctaagaatgctgtgaccagaagatgggatcgcggaacagcagcagtgcaggatccgggtccggagacccctccgagggcttgccccgaagaggggctggcctgcgtcggagtgaggaagaggaagaagaggatgaagatgtggatctggcccaggccctcttggactcagaggaagagaatgacagagcttgggatggtcgtcttggggatcgatacaacccacctgtggatgctacccctgacacccgggagctggaattcaatgagatcaagacacaagtggaactggccacagggcagctggggcttaggcgggccgcccagaagcacagctttcctcgaatgttgcaccagagagaacggggcctctgccatcggggaagcttctcccttggagaacagtct

SEQ ID NO: 7654 - DNA, 570 bp, Homo sapiens
  source 1..570: mol_type = unassigned DNA
ggaaatccaacaccgcccaacacccctcccgctccccagtccggggacttcgataggaggtgacaggaggagcccccgcacaggacctaagaatgctgtgaccagaagatgggatcgcggaacagcagcagtgcaggatccgggtccggagacccctccgagggcttgccccgaagaggggctggcctgcgtcggagtgaggaagaggaagaagaggatgaagatgtggatctggcccaggtactggcctatctcctccgcagaggccaagtgaggttggtgcagggaggaggtgcagcaaatttacaattcattcaggccctcttggactcagaggaagagaatgacagagcttgggatggtcgtcttggggatcgatacaacccacctgtggatgctacccctgacacccgggagctggaattcaatgagatcaagacacaagtggaactggccacagggcagctggggcttaggcgggccgcccagaagcacagctttcctcgaatgttgcaccagagagaacggggcctctgccatcggggaagcttctcccttggagaacagtct

SEQ ID NO: 7655 - DNA, 5953 bp, Homo sapiens
  source 1..5953: mol_type = unassigned DNA
tgtctgcacacctcgctctgcctgccatggctggttaaagaaccatccggatcgcagcgcggggggagggccgggtggggggagcagcggccgcgcgtgaggccgagggaggggcggcggcgcgagcggcggcggcggcggttccagcatgaagaggagagctggcctggggggcagcatgaggtcagtggtgggcttcttgtcccagcggggcttgcatggggaccccctgctcactcaggactttcagaggagacgcctgcggggctgcagaaacctctacaagaaggacctcctcggccacttcggctgtgtcaatgccattgaattctccaacaatggaggccagtggctggtctcaggaggagatgaccgccgggttctgctatggcacatggaacaagccatccactccagggtcaagcccatacagctgaaaggagagcaccattccaacattttttgcctggctttcaacagtgggaacactaaagtgttctctggaggcaatgatgagcaagttatcctccatgatgttgaaagcagtgagacattggacgtgtttgctcatgaagatgcagtatatggcttgtctgtgagcccagtgaatgacaacatttttgccagttcctcagatgatggccgggttctcatttgggacattcgggaatccccccatggagagcccttctgcctggcaaactatccatcagcctttcatagtgtcatgtttaaccctgtggagcccaggttgttggccacagccaattcaaaggaaggagtgggactctgggacattcgaaaacctcagagttctctcctgcgctatggtggaaacctgtccctccaaagtgccatgagtgtacgattcaacagcaacgggacccagctcctggccctgaggcgacgcctgccccctgtgctctatgacatccattcccgcctgcctgtgtttcagtttgacaatcagggttacttcaactcatgcaccatgaaaagctgctgttttgcaggagatcgtgaccagtatatcctttcgggctctgatgacttcaacctgtacatgtggagaattcctgcagatccagaagcaggtggcattggtagggtggtcaacggagccttcatggtgctgaaagggcatcgatctattgttaaccaagtccgatttaatccccacacctacatgatctgctcttctggtgtagaaaagattatcaagatctggagcccatacaagcagccaggatgtactggagacctcgacggtcggattgaggacgattcccgctgcctctatacccatgaagagtacatcagccttgtgctgaacagtgggagtggcctgtcgcatgactacgccaaccagtcggtccaggaagacccccggatgatggccttctttgactcactggtacgccgagagatcgagggctggagctctgactcagacagtgacctcagtgagagtactatcctccaactgcacgctggggtcagcgagcgctcaggctacactgactcagagtcttcggcctcattgcctcgctccccgcctcccacagtagatgagtctgccgacaacgccttccacctggggcccctgcgggtcaccaccacaaacacagtagcctcaactccaccaacacccacgtgtgaggatgcagcctctcgccagcagcgtctgtctgctctgcggcgctaccaagacaaacgcctcctggccctttccaatgagtccgattctgaggagaatgtctgtgaggtggaactagacacagatctctttccccggccacggtcacccagccccgaagatgaatccagcagttccagcagctctagcagctctgaggatgaggaggagctgaatgaacgccgagcctctacctggcagcggaatgccatgcggcgccgacagaagacaacccgagaagacaagcccagtgccccaatcaagcccaccaacacttacattggagaagacaactatgattacccccagatcaaagtggatgacctctcctcctccccaacctcgtcccctgagcggagcacttccacgctagagattcaaccaagccgggcatcaccaacttctgacatagaatcagttgagcgaaaaatttataaagcttacaagtggctccgctactcttatatctcctactcaaataacaaagatggagagacctccttggtgaccggggaggcagatgaagggagagcaggaaccagccacaaagacaacccagccccttcttccagtaaggaagcctgtctaaacatagcaatggcccagaggaaccaggacctgccacctgaaggctgcagcaaggacacttttaaagaagagactcctagaactcccagcaatggcccaggccatgagcacagcagccatgcttgggcagaggtgccagagggtacctctcaggacactggcaatagcggctctgtagagcacccttttgaaaccaagaagctcaatggaaaggccctgagcagtcgggctgaggagccgccttctcctcctgtccccaaggcatctggctccactctcaacagcgggtctggcaactgtcccaggacccagtctgatgacagtgaggagaggagcctcgaaaccatctgtgccaaccacaacaatggacgcttacaccctcgtccccctcaccctcacaataacgggcagaacttgggggagctggaggtggtggcctactcttccccaggacactcagacactgaccgtgataactcgtccctgacagggacactcctacacaaagattgttgcgggtctgaaatggcctgtgagacccccaatgctggaacaagagaggaccccactgacaccccagccacagatagtagcagggctgttcatggccacagtggcctcaaaaggcaacgaattgaattggaagatacagattcagagaattcctcctcagagaagaaattaaaaacatgataaatacaaagggaaaacaaaaagctacaaaagtagccttacaaaaaaaaaaaaattgtttagtgaatacagaggaaaggaaaaacaagtattaaaggcacatgaaaccagggcctgaaattttgtgtctgatgctgctcccttctatccaacattcaacaacgggtctgaatgtctagctggccattggcttgtgctgtgttaagaaaggggaaaaaaaaataacccaagtgactcctttctagtgagacgtgagcgtagtgtgccgcgcaaggctctgtggaagtaaatctttgttgagacgttcgacttgttcttgtgtacgcacaatggcacgtgtgcgcttattgtctcataagaccttccttttagttctccatcagaaaggacctatgaatttgtactttttgccatctcaccctgtttacatgccataggtgttctggtctggatgatgggtgcctgttaaatcaggttgtgctgccagtgagttgtagatttatgctggaagaatggagaatggaaacaggccttcagcccattggctgcgctggagaggaaagcatggttcctttcttaaagaaatcttccatgttttctctaagtaacacttctttattgagcatttaatgtggacatactataaaaaagaatttttaatgctaatgagaggtttagcacttaagatcagattcaagagaatatagattcctgataaatttcactgtttgcaaattgagcagtgctgcaacatgtactgtatgaaggccataaaatagagctagtcatggataacagactttaaccagttaggtgctagatcctaagaggcactcacaaggccagcaggtgcttccttggctcccatgatcgatcgaggcatagtgaaagaagggcaaagacagctttccagagctttgtgctcaggctactaaagtagttgttataggtgtgttaacgaagaagcttagtgaggagcagaatgtggtactatattcatttaactcaacccagaaccattggtcagaattggtgggactggcatcttccctcagacttgcagttgatagaggctgtggtgttctcactagactttgcagagcagtaggcatctcaaggtaacagattcttattgagtaggtctattaggagtcagaaggtgttggggaggagtctctggcttatgactcctggttcccattagtcttaagtcttctggttcccataaaagactcagttttattgaggtagatacaggtttagaagagaaaagagcaacagattttcagcgttgcagtcactcggttatctatgaagggttgtgcaaaacaggaaggtctgggaatgaccagatatcttgttggcataaatgttatgaaaaggcagaatactggcaagaaatgaggaagagagagaaaaacaatataactttcttgagtgcaaaggtgctagacaactaggagcccagctgggattggtgtagggagggccgaacgctgactagtgtggcctcactgccccaggcttcctttcagaggaaggcctgtcctgctggaactggagccaaggggaggctgcctatgaaggcagaagatgtggatgaattcaggcactgggggtgggggggttatttataaacacaaggtggttggtttaagccaaaaggagataccatcctgataagctctgtgaaagagaagatgtgcctggtgtgtgtaatgcggctggggtatgaaaacactgagaaggagatgaaggagtgtgtgtagcatgggggtgtgtacaacttaacacctggacttttactgggggagtgggaaagtgattctgtaaccaacattagaattactttggatttgtaatcagattggttctatgatttgtctttgactattcacagataattgtaaatgctggttttataagcccaagtcattttacatttgcttttccaaaatgtattaaattggaattttttaatcctttatatacaaaaaaaatacgatcactcagtgtgtgtttctcttccccttcttagtcagcacacccagtcctttattttattctattctatttattttattttaataagtacttagcctcttctgacttctcaaaggacaatcggatacatatcttcctgaaaagaagtagttaaagttcccttgggaactagctacttggtagttacaattcccaaatgcagaacttggtcttttcatgttaaaagccttaatctcatttgggtactcaaaagagaaatcagagtttattctggttaacttgagaagccaagaaagatcatttttagcaagtatgccttccatccttggcagaggcttcccagcatcctaggctcagcttaccgggtgataggccccataagacacacacatgagcagggtgagaaatgcttgctttatagctgctccaccctcatctccagagattttgtgtctatggttgtgggtctggaaacctggcaggaaccacttctagagtacctttgcctaaactcttttagaattgaggccccaactttgatggcacatttaatacccaatttcttccataatagatatttttaatagcaggacagatggcactgattagatcaagaactatttggaagtgcctcttatgtttttttcctgcattctgtacataaagttttaagtggcaggtccagatatgtaaaatcatttctctctattttccagctggttttgttaatgattctctaggacagcaggtaaatgagttaagttgttggcttggggcaagtgaagtttgtgactatgcttgatttaataagctgagagtctcttgtttgtctgtcaaggtgccttcctctgctgaagccttacctccttctcacccagtaacggttaactcttctcttgtgtatatgcaaataaacctattattcacttctcacgtcttcctcttctcttccagggaagacttggttgctta

SEQ ID NO: 7656 - DNA, 4803 bp, Homo sapiens
  source 1..4803: mol_type = unassigned DNA
gaggggaaggagaggatgtcttctataaaaaagacctaaaatggttgacagctccttaattcgctttatcccaagtgcaaagtgatctctcctgatgcctgccctgaaagtgtaggtcggggaggggggcgaggttaccgctctacaaagtttgacggcaaactcttcctccgcgtactttaaaaggaggagatgaccgccgggttctgctatggcacatggaacaagccatccactccagggtcaagcccatacagctgaaaggagagcaccattccaacattttttgcctggctttcaacagtgggaacactaaagtgttctctggaggcaatgatgagcaagttatcctccatgatgttgaaagcagtgagacattggacgtgtttgctcatgaagatgcagtatatggcttgtctgtgagcccagtgaatgacaacatttttgccagttcctcagatgatggccgggttctcatttgggacattcgggaatccccccatggagagcccttctgcctggcaaactatccatcagcctttcatagtgtcatgtttaaccctgtggagcccaggttgttggccacagccaattcaaaggaaggagtgggactctgggacattcgaaaacctcagagttctctcctgcgctatggtggaaacctgtccctccaaagtgccatgagtgtacgattcaacagcaacgggacccagctcctggccctgaggcgacgcctgccccctgtgctctatgacatccattcccgcctgcctgtgtttcagtttgacaatcagggttacttcaactcatgcaccatgaaaagctgctgttttgcaggagatcgtgaccagtatatcctttcgggctctgatgacttcaacctgtacatgtggagaattcctgcagatccagaagcaggtggcattggtagggtggtcaacggagccttcatggtgctgaaagggcatcgatctattgttaaccaagtccgatttaatccccacacctacatgatctgctcttctggtgtagaaaagattatcaagatctggagcccatacaagcagccaggatgtactggagacctcgacggtcggattgaggacgattcccgctgcctctatacccatgaagagtacatcagccttgtgctgaacagtgggagtggcctgtcgcatgactacgccaaccagtcggtccaggaagacccccggatgatggccttctttgactcactggtacgccgagagatcgagggctggagctctgactcagacagtgacctcagtgagagtactatcctccaactgcacgctggggtcagcgagcgctcaggctacactgactcagagtcttcggcctcattgcctcgctccccgcctcccacagtagatgagtctgccgacaacgccttccacctggggcccctgcgggtcaccaccacaaacacagtagcctcaactccaccaacacccacgtgtgaggatgcagcctctcgccagcagcgtctgtctgctctgcggcgctaccaagacaaacgcctcctggccctttccaatgagtccgattctgaggagaatgtctgtgaggtggaactagacacagatctctttccccggccacggtcacccagccccgaagatgaatccagcagttccagcagctctagcagctctgaggatgaggaggagctgaatgaacgccgagcctctacctggcagcggaatgccatgcggcgccgacagaagacaacccgagaagacaagcccagtgccccaatcaagcccaccaacacttacattggagaagacaactatgattacccccagatcaaagtggatgacctctcctcctccccaacctcgtcccctgagcggagcacttccacgctagagattcaaccaagccgggcatcaccaacttctgacatagaatcagttgagcgaaaaatttataaagcttacaagtggctccgctactcttatatctcctactcaaataacaaagatggagagacctccttggtgaccggggaggcagatgaagggagagcaggaaccagccacaaagacaacccagccccttcttccagtaaggaagcctgtctaaacatagcaatggcccagaggaaccaggacctgccacctgaaggctgcagcaaggacacttttaaagaagagactcctagaactcccagcaatggcccaggccatgagcacagcagccatgcttgggcagaggtgccagagggtacctctcaggacactggcaatagcggctctgtagagcacccttttgaaaccaagaagctcaatggaaaggccctgagcagtcgggctgaggagccgccttctcctcctgtccccaaggcatctggctccactctcaacagcgggtctggcaactgtcccaggacccagtctgatgacagtgaggagaggagcctcgaaaccatctgtgccaaccacaacaatggacgcttacaccctcgtccccctcaccctcacaataacgggcagaacttgggggagctggaggtggtggcctactcttccccaggacactcagacactgaccgtgataactcgtccctgacagggacactcctacacaaagattgttgcgggtctgaaatggcctgtgagacccccaatgctggaacaagagaggaccccactgacaccccagccacagatagtagcagggctgttcatggccacagtggcctcaaaaggcaacgaattgaattggaagatacagattcagagaattcctcctcagagaagaaattaaaaacatgataaatacaaagggaaaacaaaaagctacaaaagtagccttacaaaaaaaaaaaaattgtttagtgaatacagaggaaaggaaaaacaagtattaaaggcacatgaaaccagggcctgaaattttgtgtctgatgctgctcccttctatccaacattcaacaacgggtctgaatgtctagctggccattggcttgtgctgtgttaagaaaggggaaaaaaaaataacccaagtgactcctttctagtgagacgtgagcgtagtgtgccgcgcaaggctctgtggaagtaaatctttgttgagacgttcgacttgttcttgtgtacgcacaatggcacgtgtgcgcttattgtctcataagaccttccttttagttctccatcagaaaggacctatgaatttgtactttttgccatctcaccctgtttacatgccataggtgttctggtctggatgatgggtgcctgttaaatcaggttgtgctgccagtgagttgtagatttatgctggaagaatggagaatggaaacaggccttcagcccattggctgcgctggagaggaaagcatggttcctttcttaaagaaatcttccatgttttctctaagtaacacttctttattgagcatttaatgtggacatactataaaaaagaatttttaatgctaatgagaggtttagcacttaagatcagattcaagagaatatagattcctgataaatttcactgtttgcaaattgagcagtgctgcaacatgtactgtatgaaggccataaaatagagctagtcatggataacagactttaaccagttaggtgctagatcctaagaggcactcacaaggccagcaggtgcttccttggctcccatgatcgatcgaggcatagtgaaagaagggcaaagacagctttccagagctttgtgctcaggctactaaagtagttgttataggtgtgttaacgaagaagcttagtgaggagcagaatgtggtactatattcatttaactcaacccagaaccattggtcagaattggtgggactggcatcttccctcagacttgcagttgatagaggctgtggtgttctcactagactttgcagagcagtaggcatctcaaggtaacagattcttattgagtaggtctattaggagtcagaaggtgttggggaggagtctctggcttatgactcctggttcccattagtcttaagtcttctggttcccataaaagactcagttttattgaggtagatacaggtttagaagagaaaagagcaacagattttcagcgttgcagtcactcggttatctatgaagggttgtgcaaaacaggaaggtctgggaatgaccagatatcttgttggcataaatgttatgaaaaggcagaatactggcaagaaatgaggaagagagagaaaaacaatataactttcttgagtgcaaaggtgctagacaactaggagcccagctgggattggtgtagggagggccgaacgctgactagtgtggcctcactgccccaggcttcctttcagaggaaggcctgtcctgctggaactggagccaaggggaggctgcctatgaaggcagaagatgtggatgaattcaggcactgggggtgggggggttatttataaacacaaggtggttggtttaagccaaaaggagataccatcctgataagctctgtgaaagagaagatgtgcctggtgtgtgtaatgcggctggggtatgaaaacactgagaaggagatgaaggagtgtgtgtagcatgggggtgtgtacaacttaacacctggacttttactgggggagtgggaaagtgattctgtaaccaacattagaattactttggatttgtaatcagattggttctatgatttgtctttgactattcacagataattgtaaatgctggttttataagcccaagtcattttacatttgcttttccaaaatgtattaaattggaattttttaatcctttatatacaaaaaaaata

SEQ ID NO: 7657 - DNA, 759 bp, Homo sapiens
  source 1..759: mol_type = unassigned DNA
gcggccgcgcgtgaggccgagggaggggcggcggcgcgagcggcggcggcggcggttccagcatgaagaggagagctggcctggggggcagcatgaggaggagatgaccgccgggttctgctatggcacatggaacaagccatccactccagggtcaagcccatacagctgaaaggagagcaccattccaacattttttgcctggctttcaacagtgggaacactaaagtgttctctggaggcaatgatgagcaagttatcctccatgatgttgaaagtgagacattggacgtgtttgctcatgaagatgcagtatatggcttgtctgtgagcccagtgaatgacaacatttttgccagttcctcagatgatggccgggttctcatttgggacattcgggaatccccccatggagagcccttctgcctggcaaactatccatcagcctttcatagtgtcatgtttaaccctgtggagcccaggttgttggccacagccaattcaaaggaaggagtgggactctgggacattcgaaaacctcagagttctctcctgcgctatggtggaaacctgtccctccaaagtgccatgagtgtacgattcaacagcaacgggacccagctcctggccctgaggcgacgcctgccccctgtgctctatgacatccattcccgcctgcctgtgtttcagtttgacaatcagggttacttcaactcatgcaccatgaaaagctgctgttttgcaggagatcgtgaccag

SEQ ID NO: 7658 - DNA, 2791 bp, Homo sapiens
  source 1..2791: mol_type = unassigned DNA
attgcagggggaggggaaggagaggatgtcttctataaaaaagacctaaaatggttgacagctccttaattcgctttatcccaagtgcaaagtgatctctcctgatgcctgccctgaaagtgaggagatgaccgccgggttctgctatggcacatggaacaagccatccactccagggtcaagcccatacagctgaaaggagagcaccattccaacattttttgcctggctttcaacagtgggaacactaaagtgttctctggaggcaatgatgagcaagttatcctccatgatgttgaaagcagtgagacattggacgtgtttgctcatgaagatgcagtatatggcttgtctgtgagcccagtgaatgacaacatttttgccagttcctcagatgatggccgggttctcatttgggacattcgggaatccccccatggagagcccttctgcctggcaaactatccatcagcctttcatagtgtcatgtttaaccctgtggagcccaggttgttggccacagccaattcaaaggaaggagtgggactctgggacattcgaaaacctcagagttctctcctgcgctatggtggaaacctgtccctccaaagtgccatgagtgtacgattcaacagcaacgggacccagctcctggccctgaggcgacgcctgccccctgtgctctatgacatccattcccgcctgcctgtgtttcagtttgacaatcagggttacttcaactcatgcaccatgaaaagctgctgttttgcaggagatcgtgaccagtatatcctttcgggctctgatgacttcaacctgtacatgtggagaattcctgcagatccagaagcaggtggcattggtagggtggtcaacggagccttcatggtgctgaaagggcatcgatctattgttaaccaagtccgatttaatccccacacctacatgatctgctcttctggtgtagaaaagattatcaagatctggagcccatacaagcagccaggatgtactggagacctcgacggtcggattgaggacgattcccgctgcctctatacccatgaagagtacatcagccttgtgctgaacagtgggagtggcctgtcgcatgactacgccaaccagtcggtccaggaagacccccggatgatggccttctttgactcactggtacgccgagagatcgagggctggagctctgactcagacagtgacctcagtgagagtactatcctccaactgcacgctggggtcagcgagcgctcaggctacactgactcagagtcttcggcctcattgcctcgctccccgcctcccacagtagatgagtctgccgacaacgccttccacctggggcccctgcgggtcaccaccacaaacacagtagcctcaactccaccaacacccacgtgtgaggatgcagcctctcgccagcagcgtctgtctgctctgcggcgctaccaagacaaacgcctcctggccctttccaatgagtccgattctgaggagaatgtctgtgaggtggaactagacacagatctctttccccggccacggtcacccagccccgaagatgaatccagcagttccagcagctctagcagctctgaggatgaggaggagctgaatgaacgccgagcctctacctggcagcggaatgccatgcggcgccgacagaagacaacccgagaagacaagcccagtgccccaatcaagcccaccaacacttacattggagaagacaactatgattacccccagatcaaagtggatgacctctcctcctccccaacctcgtcccctgagcggagcacttccacgctagagattcaaccaagccgggcatcaccaacttctgacatagaatcagttgagcgaaaaatttataaagcttacaagtggctccgctactcttatatctcctactcaaataacaaagatggagagacctccttggtgaccggggaggcagatgaagggagagcaggaaccagccacaaagacaacccagccccttcttccagtaaggaagcctgtctaaacatagcaatggcccagaggaaccaggacctgccacctgaaggctgcagcaaggacacttttaaagaagagactcctagaactcccagcaatggcccaggccatgagcacagcagccatgcttgggcagaggtgccagagggtacctctcaggacactggcaatagcggctctgtagagcacccttttgaaaccaagaagctcaatggaaaggccctgagcagtcgggctgaggagccgccttctcctcctgtccccaaggcatctggctccactctcaacagcgggtctggcaactgtcccaggacccagtctgatgacagtgaggagaggagcctcgaaaccatctgtgccaaccacaacaatggacgcttacaccctcgtccccctcaccctcacaataacgggcagaacttgggggagctggaggtggtggcctactcttccccaggacactcagacactgaccgtgataactcgtccctgacagggacactcctacacaaagattgttgcgggtctgaaatggcctgtgagacccccaatgctggaacaagagaggaccccactgacaccccagccacagatagtagcagggctgttcatggccacagtggcctcaaaaggcaacgaattgaattggaagatacagattcagagaattcctcctcagagaagaaattaaaaacatgataaatacaaagggaaaacaaaaagctacaaaagtagccttacaaaaaaaaaaaaa

SEQ ID NO: 7659 - DNA, 671 bp, Homo sapiens
  source 1..671: mol_type = unassigned DNA
gatcccggtgccagggaccctgcccagttccaggcgtcgccctgacccagaaacgactgggcgccgccgtcctggaaaggccccagcgcacggacatctgaggagctgtttccgttcctctgcccgccatgccgttcctggagctggacacgaatttgcccgccaaccgagtgcccgcggggctggagaaacgactctgcgccgccgctgcctccatcctgggcaaacctgcggaccgcgtgaacgtgacggtacggccgggcctggccatggcgctgagcgggtccaccgagccctgcgcgcagctgtccatctcctccatcggcgtagtgggcaccgccgaggacaaccgcagccacagcgcccacttctttgagtttctcaccaaggagctagccctgggccaggaccggatacttatccgctttttccccttggagtcctggcagattggcaagatagggacggtcatgacttttttatgattgggcacggagggatccagggcatctgtgaactggctgcttcttccagagagatctcttggcagagtgagggcctggagataaccagctttggattatcccgcatgcaacattcctgtgatcacataatcctcttcttcatcctcatatgaaataaatgaagagagcttcctcattcaaacatga

SEQ ID NO: 7660 - DNA, 713 bp, Homo sapiens
  source 1..713: mol_type = unassigned DNA
gtttgcagaagcgggaggtaccctaggcagccaatcggggagcgccgagtctctgtccagccaatgagaagccaggttgctgtggcgcctcgcccctcctccctggtccgcgagccttgggtacccccagcttttcttccgccagagctgtttccgttcctctgcccgccatgccgttcctggagctggacacgaatttgcccgccaaccgagtgcccgcggggctggagaaacgactctgcgccgccgctgcctccatcctgggcaaacctgcggaccgcgtgaacgtgacggtacggccgggcctggccatggcgctgagcgggtccaccgagccctgcgcgcagctgtccatctcctccatcggcgtagtgggcaccgccgaggacaaccgcagccacagcgcccacttctttgagtttctcaccaaggagctagccctgggccaggaccggatacttatccgctttttccccttggagtcctggcagattggcaagatagggacggtcatgacttttttatgattgggcacggagggatccagggcatctgtgaactggctgcttcttccagagagatctcttggcagagtgagggcctggagataaccagctttggattatcccgcatgcaacattcctgtgatcacataatcctcttcttcatcctcatatgaaataaatgaagagagcttcctcattcaaacatga

SEQ ID NO: 7661 - DNA, 805 bp, Homo sapiens
  source 1..805: mol_type = unassigned DNA
atcccttcaaggccactcagtccacagcattctctggtggcagacgctgcaggaggagcccatcagtgctggctgctgagtctttgaaagcggacccacggtggcagcatggtgcccaacacgtggaggctgcagtgcgggaggacctcttccaggaggccctcccagctgtcctgaaggccaaggacctgcctccagtagaacctgctgttaaagagaatctgaagaccttaatgcagcttttcttgctagctgtttccgttcctctgcccgccatgccgttcctggagctggacacgaatttgcccgccaaccgagtgcccgcggggctggagaaacgactctgcgccgccgctgcctccatcctgggcaaacctgcggaccgcgtgaacgtgacggtacggccgggcctggccatggcgctgagcgggtccaccgagccctgcgcgcagctgtccatctcctccatcggcgtagtgggcaccgccgaggacaaccgcagccacagcgcccacttctttgagtttctcaccaaggagctagccctgggccaggaccggatacttatccgctttttccccttggagtcctggcagattggcaagatagggacggtcatgacttttttatgattgggcacggagggatccagggcatctgtgaactggctgcttcttccagagagatctcttggcagagtgagggcctggagataaccagctttggattatcccgcatgcaacattcctgtgatcacataatcctcttcttcatcctcatatgaaataaatgaagagagcttcct

SEQ ID NO: 7662 - DNA, 1545 bp, Homo sapiens
  source 1..1545: mol_type = unassigned DNA
ttcctctgcccgccatgccgttcctggagctggacacgaatttgcccgccaaccgagtgcccgcggggctggagaaacgactctgcgccgccgctgcctccatcctgggcaaacctgcggaccgcgtgaacgtgacggtacggccgggcctggccatggcgctgagcgggtccaccgagccctgcgcgcagctgtccatctcctccatcggcgtagtgggcaccgccgaggacaaccgcagccacagcgcccacttctttgagtttctcaccaaggagctagccctgggccaggaccggttccctacggtcttatccaccagccctgctgcccatggtggccccagatgcccaggagagataatagaaggtaagaagtcatgtttgaatgaggaagctctcttcatttatttcatatgaggatgaagaagaggattatgtgatcacaggaatgttgcatgcgggataatccaaagctggttatctccaggccctcactctgccaagagatctctctggaagaagcagccagttcacagatgccctggatccctccgtgcccaatcataaaaaagtcatgaccgtccctatcttgccaatctgccaggactccaaggggaaaaagcggataagtatccttcaggagacagagaaaaagatatcatcagctccttggctaataccacatcttgcaagacccctgccaggtactcccactgtgggtactcaggacagcctgcctcagtccaccaggcattttgcaaacctgctcatcccaataatgattttccccaacccccagcagggcagtgggacactcaggtgtgggaggtagccgcacatcatgacccagctaggacagacacacaatacagtagcctcggtgtgtgtgccgtacactctatcatctccatcagtttgtgtactgaggggtaccctgcctcctaattgcaggctccctaagggcacagtacctcagccacctgttttctcaaaggctgagcacagggtgaccccccaccccaccaaccccgccactaatgtctgggccataagtgaacatgcccctctcagaggtaacagcaagtttccagtgaggaaaaccagaacttgggacagcctggttggggcgggcgggagtatgaacagcctgtcttctcatcataaaattggcataatggagattatctacctcatggggatagcatgtcttgtctgagcaaagggagagtggatagggattgtaaggatcaaatgggatcatgagtgtaaagtacctgtagaggacctagcacatggtaagtgtataacacttgttgttagagtaacagttttccctgagtatccgtgggagatttgttctagaatccccagaggaaaccagaatctacatttgctcaagtcccttacataaaatggtgtaatatttgcatgtaacctacacacatcctctcatatactttaaataatctctgggttacttataatacctaatataatgtacgtactatgtaaatagttgtattgtttagggaataatgacaag

SEQ ID NO: 7663 - DNA, 2706 bp, Homo sapiens
  source 1..2706: mol_type = unassigned DNA
ctctgtagctgtgaccctgataccgcgtggtgtgctccgaacacatggtgcccagaacgaaggcggcgtccagaagccctaggtcccagaggtccgctcagcggcaggcgcataaggcggggccggcgcgggcctttccttccatcggaaccgttctcccggggctgagtccctgcccggactccgaacgccgaagaccaggggccggaagcgcgcgccgccactgccacgccgtgtcagtcgggagggagggagcgagcaggcgaagccgcggaggacggggtgaagatggcggccttctccgagatgggtgtaatgcctgagattgcacaagctgtggaagagatggattggctcctcccaactgatatccaggctgaatctatcccattgatcttaggaggaggtgatgtacttatggctgcagaaacaggaagtggcaaaactggtgcttttagtattccagttatccagatagtttatgaaactctgaaagaccaacaggaaggcaaaaaaggaaaaacaacaattaaaactggtgcttcagtgctgaacaaatggcagatgaacccatatgacagaggatctgcttttgcaattgggtcagatggtctttgttgtcaaagcagagaagtaaaggaatggcatgggtgtagagctactaaaggattaatgaaagggaaacactactatgaagtatcctgtcatgaccaagggttatgcagggtcgggtggtctaccatgcaggcctctttggacctaggtactgacaagtttggatttggctttggtggaacaggaaagaaatcccataacaaacaatttgataattatggagaggaattcactatgcatgataccattggatgttacctggatatagataagggacatgtcaagttctccaaaaatggaaaagatcttggtctggcatttgaaataccaccacatatgaaaaaccaagccctctttcctgcctgtgttttgaagaatgctgaactgaaatttaacttcggtgaagaggaatttaagtttccaccaaaagatggctttgttgctctttccaaggcaccggatggttacattgtcaaatcacagcactcaggtaatgcacaggtgacacaaacaaagtttctccccaatgctccgaaagctctcattgttgaaccttcccgggagttagctgaacaaactttgaacaacatcaagcagtttaagaaatacattgataatcctaaattaagggagcttctgataattggaggtgttgcagcccgggatcagctctctgttttggaaaatggagtagatatagttgtaggtactccgggaagactagatgacttggtgtcaactggaaagctgaacttatctcaagttagattcctggtcctggatgaagctgatgggcttctttctcaaggttattctgattttataaataggatgcacaatcagattcctcaggttacctctgatggaaaaagacttcaggtgattgtttgctctgccactttgcattctttcgatgtaaagaaactgtccgagaagataatgcattttcctacatgggttgacttaaaaggagaagactctgttccagatactgtacaccatgttgttgtcccagtaaatcccaaaactgacagactctgggaaaggcttggaaagagccacattagaactgatgatgtacatgcaaaagataacacaagacctggtgctaatagtccagagatgtggtctgaagctattaaaatcctgaaaggggagtatgctgtccgggcaatcaaggaacataagatggatcaagcaattatcttctgtagaaccaaaattgactgtgataacttggagcagtactttatacaacaaggaggaggacctgataaaaaaggacaccagttctcatgtgtttgtcttcatggtgacagaaagcctcatgagagaaagcaaaacttggaaagatttaagaaaggagatgtaagattcttgatttgcacagatgtagctgctagaggaattgatatccacggtgttccttatgttataaatgtcactctgcccgatgaaaagcaaaactacgtacatcgaattggcagagtaggaagagctgaaaggatgggtctggcaatttccctggtggcaacagaaaaagaaaaggtttggtaccatgtatgtagcagccgtggaaaagggtgttataacacaagactcaaggaagatggaggctgtaccatatggtacaacgagatgcagttactatctgagatagaagaacacctgaactgtaccatttctcaggttgagccggatataaaggtaccagtggatgaatttgatgggaaagttacctacggtcagaaaagggctgctggtggtggaagctataaaggccatgtggatattttggcacctactgttcaagagttggctgcccttgaaaaggaggcgcagacatctttcctgcatcttggctaccttcctaaccagctgttcagaaccttctgatttttacatttactgaataagatttgagtaatgaaagtctgtagtcttaaaactctaaaacagttgtactgcttccaagcagcagtatttatagtaacgtaagctattaatgctaactcttgcatgtcaagaaacattagtcttaggaattcttcaaaaaatggcatcccaatgaaaataaatttgatgactata

SEQ ID NO: 7664 - DNA, 2807 bp, Homo sapiens
  source 1..2807: mol_type = unassigned DNA
ggctcagatcccacgctgccattcggtagatatgtgtctttagataagtgacttaactttcccgaattttagagtcctcatctaaagattctaataccttcctgacagactgtgaccctgataccgcgtggtgtgctccgaacacatggtgcccagaacgaaggcggcgtccagaagccctaggtcccagaggtccgctcagcggcaggcgcataaggcggggccggcgcgggcctttccttccatcggaaccgttctcccggggctgagtccctgcccggactccgaacgccgaagaccaggggccggaagcgcgcgccgccactgccacgccgtgtcagtcgggagggagggagcgagcaggcgaagccgcggaggacggggtgaagatggcggccttctccgagatgggtgtaatgcctgagattgcacaagctgtggaagagatggattggctcctcccaactgatatccaggctgaatctatcccattgatcttaggaggaggtgatgtacttatggctgcagaaacaggaagtggcaaaactggtgcttttagtattccagttatccagatagtttatgaaactctgaaagaccaacaggaaggcaaaaaaggaaaaacaacaattaaaactggtgcttcagtgctgaacaaatggcagatgaacccatatgacagaggatctgcttttgcaattgggtcagatggtctttgttgtcaaagcagagaagtaaaggaatggcatgggtgtagagctactaaaggattaatgaaagggaaacactactatgaagtatcctgtcatgaccaagggttatgcagggtcgggtggtctaccatgcaggcctctttggacctaggtactgacaagtttggatttggctttggtggaacaggaaagaaatcccataacaaacaatttgataattatggagaggaattcactatgcatgataccattggatgttacctggatatagataagggacatgtcaagttctccaaaaatggaaaagatcttggtctggcatttgaaataccaccacatatgaaaaaccaagccctctttcctgcctgtgttttgaagaatgctgaactgaaatttaacttcggtgaagaggaatttaagtttccaccaaaagatggctttgttgctctttccaaggcaccggatggttacattgtcaaatcacagcactcaggtaatgcacaggtgacacaaacaaagtttctccccaatgctccgaaagctctcattgttgaaccttcccgggagttagctgaacaaactttgaacaacatcaagcagtttaagaaatacattgataatcctaaattaagggagcttctgataattggaggtgttgcagcccgggatcagctctctgttttggaaaatggagtagatatagttgtaggtactccgggaagactagatgacttggtgtcaactggaaagctgaacttatctcaagttagattcctggtcctggatgaagctgatgggcttctttctcaaggttattctgattttataaataggatgcacaatcagattcctcaggttacctctgatggaaaaagacttcaggtgattgtttgctctgccactttgcattctttcgatgtaaagaaactgtccgagaagataatgcattttcctacatgggttgacttaaaaggagaagactctgttccagatactgtacaccatgttgttgtcccagtaaatcccaaaactgacagactctgggaaaggcttggaaagagccacattagaactgatgatgtacatgcaaaagataacacaagacctggtgctaatagtccagagatgtggtctgaagctattaaaatcctgaaaggggagtatgctgtccgggcaatcaaggaacataagatggatcaagcaattatcttctgtagaaccaaaattgactgtgataacttggagcagtactttatacaacaaggaggaggacctgataaaaaaggacaccagttctcatgtgtttgtcttcatggtgacagaaagcctcatgagagaaagcaaaacttggaaagatttaagaaaggagatgtaagattcttgatttgcacagatgtagctgctagaggaattgatatccacggtgttccttatgttataaatgtcactctgcccgatgaaaagcaaaactacgtacatcgaattggcagagtaggaagagctgaaaggatgggtctggcaatttccctggtggcaacagaaaaagaaaaggtttggtaccatgtatgtagcagccgtggaaaagggtgttataacacaagactcaaggaagatggaggctgtaccatatggtacaacgagatgcagttactatctgagatagaagaacacctgaactgtaccatttctcaggttgagccggatataaaggtaccagtggatgaatttgatgggaaagttacctacggtcagaaaagggctgctggtggtggaagctataaaggccatgtggatattttggcacctactgttcaagagttggctgcccttgaaaaggaggcgcagacatctttcctgcatcttggctaccttcctaaccagctgttcagaaccttctgatttttacatttactgaataagatttgagtaatgaaagtctgtagtcttaaaactctaaaacagttgtactgcttccaagcagcagtatttatagtaacgtaagctattaatgctaactcttgcatgtcaagaaacattagtcttaggaattcttcaaaaaatggcatcccaatgaaaataaatttgatgactata

SEQ ID NO: 7665 - DNA, 500 bp, Homo sapiens
  source 1..500: mol_type = unassigned DNA
ggcattggtgctcagggcaatgaatccagtccatctctccgggtcattcacacaccaaggccctgctcacctttggaaagctgggggactgagtggggagggcacggtgtggtgtcagcctgagcccactggatgaccctaatcaccaaacatctgcttccttctctgtagctgtgaccctgataccgcgtggtgtgctccgaacacatggtgcccagaacgaaggcggcgtccagaagccctaggtcccagaggtccgctcagcggcaggcgcataaggcggggccggcgcgggcctttccttccatcggaaccgttctcccggggctgagtccctgcccggactccgaacgccgaagaccaggggccggaagcgcgcgccgccactgccacgccgtgtcagtcgggagggagggagcgagcaggcgaagccgcggaggacggggtgaagatggcggccttctccgagatgggtgtaatgcctgagattgcacaagctg

SEQ ID NO: 7666 - DNA, 2155 bp, Homo sapiens
  source 1..2155: mol_type = unassigned DNA
gtcagtcgggagggagggagcgagcaggcgaagccgcggaggacggggtgaagatggcggccttctccgagatgggtgtaatgcctgagattgcacaagctgtggaagagatggattggctcctcccaactgatatccaggctgaatctatcccattgatcttaggaggaggtgatgtacttatggctgcagaaacaggaagtggcaaaactggtgcttttagtattccagttatccagatagtttatgaaactctgaaagaccaacaggaaggcaaaaaaggaaaaacaacaattaaaactggtgcttcagtgctgaacaaatggcagatgaacccatatgacagagaagtaaaggaatggcatgggtgtagagctactaaaggattaatgaaagggaaacactactatgaagtatcctgtcatgaccaagggttatgcagggtcgggtggtctaccatgcaggcctctttggacctaggtactgacaagtttggatttggctttggtggaacaggaaagaaatcccataacaaacaatttgataattatggagaggaattcactatgcatgataccattggatgttacctggatatagataagggacatgtcaagttctccaaaaatggaaaagatcttggtctggcatttgaaataccaccacatatgaaaaaccaagccctctttcctgcctgtgttttgaagaatgctgaactgaaatttaacttcggtgaagaggaatttaagtttccaccaaaagatggctttgttgctctttccaaggcaccggatggttacattgtcaaatcacagcactcaggtaatgcacaggtgacacaaacaaagtttctccccaatgctccgaaagctctcattgttgaaccttcccgggagttagctgaacaaactttgaacaacatcaagcagtttaagaaatacattgataatcctaaattaagggagcttctgataattggaggtgttgcagcccgggatcagctctctgttttggaaaatggagtagatatagttgtaggtactccgggaagactagatgacttggtgtcaactggaaagctgaacttatctcaagttagattcctggtcctggatgaagctgatgggcttctttctcaaggttattctgattttataaataggatgcacaatcagattcctcaggttacctctgatggaaaaagacttcaggtgattgtttgctctgccactttgcattctttcgatgtaaagaaactgtccgagaagataatgcattttcctacatgggttgacttaaaaggagaagactctgttccagatactgtacaccatgttgttgtcccagtaaatcccaaaactgacagactctgggaaaggcttggaaagagccacattagaactgatgatgtacatgcaaaagataacacaagacctggtgctaatagtccagagatgtggtctgaagctattaaaatcctgaaaggggagtatgctgtccgggcaatcaaggaacataagatggatcaagcaattatcttctgtagaaccaaaattgactgtgataacttggagcagtactttatacaacaaggaggaggacctgataaaaaaggacaccagttctcatgtgtttgtcttcatggtgacagaaagcctcatgagagaaagcaaaacttggaaagatttaagaaaggagatgtaagattcttgatttgcacagatgtagctgctagaggaattgatatccacggtgttccttatgttataaatgtcactctgcccgatgaaaagcaaaactacgtacatcgaattggcagagtaggaagagctgaaaggatgggtctggcaatttccctggtggcaacagaaaaagaaaaggtttggtaccatatggtacaacgagatgcagttactatctgagatagaagaacacctgaactgtaccatttctcaggttgagccggatataaaggtaccagtggatgaatttgatgggaaagttacctacggtcagaaaagggctgctggtggtggaagctataaaggccatgtggatattttggcacctactgttcaagagttggctgcccttgaaaaggaggcgcagacatctttcctgcatcttggctaccttcctaaccagctgttcagaa

SEQ ID NO: 7667 - DNA, 3264 bp, Homo sapiens
  source 1..3264: mol_type = unassigned DNA
aaaagctcgggggcgggcttctgagttcgcgcatgcgcctctgtgcgtttgtcccatgctggttccgtgagtctggccttaggtgtctcgtgtctggggttgatccgagctgtcgccgccgccgccgcaatgggcaaaacggccaactctccgggttcgggagcccgacccgacccggtgcggagcttcaatcgctggaagaaaaaacacagccataggcagaacaaaaagaagcagttgaggaagcaactgaagaaacccgaatggcaggtcgagcgcgagagtatcagccgcctcatgcagaactatgaaaagataaatgtaaatgaaatcacaagattttcagattttcccttgtccaaaaaaacattgaaaggtttgcaagaagctcagtaccgtttggtgactgagatacagaagcagaccattggattggctttgcaaggtaaagatgtacttggagcggccaaaactggatctggcaagactctggcttttcttgttccagtgctggaagccttatatcgtctgcaatggacttcaacagatgggctgggggttctcataatatcacctacgagagaactggcctatcagacctttgaggttctccgaaaagtaggaaagaatcatgacttctcagctggtctcatcattggtggaaaggatctaaaacacgaagctgagaggatcaacaacataaatatactcgtgtgcacaccaggtcggcttcttcaacacatggatgaaacagtatcttttcatgctaccgacctccaaatgttagttcttgatgaagcagatagaatcttggatatgggctttgctgataccatgaatgctgttattgaaaatctccccaagaaacgtcagactttacttttctcagcaacacaaactaaatctgtaaaggaccttgcacgcttgagtttgaaaaaccctgagtatgtctgggttcatgaaaaagcaaaatatagcacccctgccactttggaacagaactacatagtctgtgagctgcagcaaaaaataagtgtgctgtattcctttttgagaagccatctgaagaagaagagcattgtatttttttccagttgcaaagaggtccagtatctgtaccgagtgttttgccggctacgtcctggtgtttctatccttgcactccatggtcgacagcagcaaatgagaagaatggaagtctataatgagtttgtccgtaagagagctgcagtactctttgctactgatattgcagccaggggtctggatttcccggccgtgaattgggttcttcagtttgattgtcctgaggatgccaacacatatattcacagagcaggtagaactgccaggtacaaagaggatggtgaagctttgctaattttgctaccctcagaaaaagctatggtgcagcagcttcttcagaagaaagtacctgtgaaggaaatcaaaatcaatccagaaaaacttatagatgtccagaaaaaattggaatctattttagctcaagatcaagatttaaaagaaagagctcaaaggtgtttcgtctcctatgtacgatctgtatatctgatgaaggataaagaagtatttgatgtgagcaagttacctatacctgaatatgccctgtctcttggtcttgctgtggcaccacgcgtaagatttcttcagaaaatgcagaaacaacccaccaaagaattggtaaggagccaagccgataaagtaattgagccaagggctccctccctcaccaatgacgaagtggaagaatttagagcctacttcaatgagaaaatgtccatccttcaaaaaggtggaaaaagactcgaagggacagagcacagacaggataatgatactggtaatgaagaacaggaagaagaagaagacgatgaagaagaaatggaagagaaactggcaaaagcaaaaggatctcaagccccatctcttcctaacaccagtgaggcacagaagatcaaggaagttcctacacagttcttggacagagatgaggaggaagaagatgctgatttcttgaaggtgaagcggcataatgtgtttggattggaccttaaagacgagaaaacattacagaagaaagaaccttctaaatccagcatcaagaaaaaaatgaccaaagttgcagaagcaaaaaaagtaatgaagagaaattttaaagtgaataagaagataacatttactgatgaaggggagttggttcagcagtggccacaaatgcagaaatctgccatcaaggatgctgaggaagatgatgacacaggtggtatcaacttacataaagcaaaggaaagacttcaggaagaggacaaatttgacaaagaagaatataggaaaaaaattaaggcaaagcatcgggagaaaagactgaaagaaagggaagccagaagagaagccaacaagagacaagcaaaggccaaagatgaagaggaagcctttctggattggagtgatgatgatgatgatgatgatgatggatttgatccaagcacactcccagatccagataaatacagaagctctgaagattcagatagtgaagatatggaaaataaaataagtgataccaagaagaagcaggggatgaagaagaggagcaacagtgaagtggaagacgtgggaccaacaagtcataacagaaagaaggccaggtgggacactttagagcctttggataccggcctgtctttagcagaggatgaagagctggtgttacatctgctaagaagtcaaagctaaatacttcctgcgcctgccttctccttgaaaccttggttatgactgcgtaggcaagaagttgaaaaacagttgatttgggggcacttaggtaccatatgccccattcccaaagggcacatttctggatagaagcgatcgtatctccaagtccctctcacaggacatgctttgtgccatcactgagcatactcagatcgagggtggatgataccatttcctgaccccgttttccagcatgtgttctgttagatttttatccatgggttcctacgccttgtcattggaaacactgcctttgtcttactggcaagttctggagctcttgtgtcattgttagaaatccctgtcttgcttactgtacagaagtttctgttgctgttaaaattgctcatgatttcgacgtatttaatattttcaaagagactatgatggaccagccctgagaaagaatgagtatttttgaattgagatgatcaataataaacatatttcctataaaagaaagta

SEQ ID NO: 7668 - DNA, 2929 bp, Homo sapiens
  source 1..2929: mol_type = unassigned DNA
cccatgctggttccgtgagtctggccttaggtgtctcgtgtctggggttgatccgagctgtcgccgccgccgccgcaatgggcaaaacggccaactctccgggttcgggagcccgacccgacccggtgcggagcttcaatcgctggaagaaaaaacacagccataggcagaacaaaaagaagcagttgaggaagcaactgaagaaacccgaatggcaggtcgagcgcgagagtatcagccgcctcatgcagaactatgaaaagataaatgtaaatgaaatcacaagattttcagattttcccttgtccaaaaaaacattgaaaggtttgcaagaagctcagtaccgtttggtgactgagatacagaagcagaccattggattggctttgcaaggtaaagatgtacttggagcggccaaaactggatctggcaagactctggcttttcttgttccagtaaatgaagcagatagaatcttggatatgggctttgctgataccatgaatgctgttattgaaaatctccccaagaaacgtcagactttacttttctcagcaacacaaactaaatctgtaaaggaccttgcacgcttgagtttgaaaaaccctgagtatgtctgggttcatgaaaaagcaaaatatagcacccctgccactttggaacagaactacatagtctgtgagctgcagcaaaaaataagtgtgctgtattcctttttgagaagccatctgaagaagaagagcattgtatttttttccagttgcaaagaggtccagtatctgtaccgagtgttttgccggctacgtcctggtgtttctatccttgcactccatggtcgacagcagcaaatgagaagaatggaagtctataatgagtttgtccgtaagagagctgcagtactctttgctactgatattgcagccaggggtctggatttcccggccgtgaattgggttcttcagtttgattgtcctgaggatgccaacacatatattcacagagcaggtagaactgccaggtacaaagaggatggtgaagctttgctaattttgctaccctcagaaaaagctatggtgcagcagcttcttcagaagaaagtacctgtgaaggaaatcaaaatcaatccagaaaaacttatagatgtccagaaaaaattggaatctattttagctcaagatcaagatttaaaagaaagagctcaaaggtgtttcgtctcctatgtacgatctgtatatctgatgaaggataaagaagtatttgatgtgagcaagttacctatacctgaatatgccctgtctcttggtcttgctgtggcaccacgcgtaagatttcttcagaaaatgcagaaacaacccaccaaagaattggtaaggagccaagccgataaagtaattgagccaagggctccctccctcaccaatgacgaagtggaagaatttagagcctacttcaatgagaaaatgtccatccttcaaaaaggtggaaaaagactcgaagggacagagcacagacaggataatgatactggtaatgaagaacaggaagaagaagaagacgatgaagaagaaatggaagagaaactggcaaaagcaaaaggatctcaagccccatctcttcctaacaccagtgaggcacagaagatcaaggaagttcctacacagttcttggacagagatgaggaggaagaagatgctgatttcttgaaggtgaagcggcataatgtgtttggattggaccttaaagacgagaaaacattacagaagaaagaaccttctaaatccagcatcaagaaaaaaatgaccaaagttgcagaagcaaaaaaagtaatgaagagaaattttaaagtgaataagaagataacatttactgatgaaggggagttggttcagcagtggccacaaatgcagaaatctgccatcaaggatgctgaggaagatgatgacacaggtggtatcaacttacataaagcaaaggaaagacttcaggaagaggacaaatttgacaaagaagaatataggaaaaaaattaaggcaaagcatcgggagaaaagactgaaagaaagggaagccagaagagaagccaacaagagacaagcaaaggccaaagatgaagaggaagcctttctggattggagtgatgatgatgatgatgatgatgatggatttgatccaagcacactcccagatccagataaatacagaagctctgaagattcagatagtgaagatatggaaaataaaataagtgataccaagaagaagcaggggatgaagaagaggagcaacagtgaagtggaagacgtgggaccaacaagtcataacagaaagaaggccaggtgggacactttagagcctttggataccggcctgtctttagcagaggatgaagagctggtgttacatctgctaagaagtcaaagctaaatacttcctgcgcctgccttctccttgaaaccttggttatgactgcgtaggcaagaagttgaaaaacagttgatttgggggcacttaggtaccatatgccccattcccaaagggcacatttctggatagaagcgatcgtatctccaagtccctctcacaggacatgctttgtgccatcactgagcatactcagatcgagggtggatgataccatttcctgaccccgttttccagcatgtgttctgttagatttttatccatgggttcctacgccttgtcattggaaacactgcctttgtcttactggcaagttctggagctcttgtgtcattgttagaaatccctgtcttgcttactgtacagaagtttctgttgctgttaaaattgctcatgatttcgacgtatttaatattttcaaagagactatgatggaccagccctgagaaagaatgagtatttttgaattgagatgatcaataataaacatatttcctataaaagaaagt

SEQ ID NO: 7669 - DNA, 4770 bp, Homo sapiens
  source 1..4770: mol_type = unassigned DNA
gttaagttggagccgactcagcggcggccgccattttgtgcagtcgctgggaaggaaggagacgcctaaaccgcggcactgcccggtttgagcgtagccaaacctgcccaccggctttgtagccccgattctctgtgttttgctcccgtctccgacgagagaggcggcgacggtggcgtctgcgacgggagacagcgcgtcggagcgagagagcgctgcgcctgccgccgccccaacagcggaggcgccgccgccatcggtcgtcaccagaccggagccgcaggccctcccgagcccggccatccgtgccccgctcccagatctctatccttttgggaccatgcgcggaggaggctttggggaccgggaccgggatcgtgaccgtggaggatttggagcaagaggtggtggtggccttcccccgaagaaatttggtaatcctggggagcgtttgcgtaaaaaaaagtgggatttgagtgagctccccaagtttgagaaaaatttttatgtggaacatccggaagtagcaaggctgacaccatatgaggttgatgagctacgccgaaagaaggagattacagtgagggggggagatgtttgtcctaaacccgtgtttgccttccatcatgctaacttcccacaatatgtaatggatgtgttgatggatcagcactttacagaaccaactccaattcagtgccagggatttccgttggctcttagtggccgggatatggtgggcattgctcagactggctctgggaagacgttggcgtatctcctgcctgcaattgttcatattaaccaccagccatacttggaaaggggagatggcccaatctgtctagttctggctcctaccagagagcttgcccagcaagtacagcaggtggccgatgactatggcaaatgttctagattgaagagtacttgtatttatggaggtgctcctaaaggtccccagattcgagacttggaaagaggtgttgagatctgcatagccactcctggacgtctgatagatttcctggagtcaggaaagacaaatcttcgccgatgtacttaccttgtattggacgaagctgacagaatgcttgatatggggtttgaaccccagatccgtaaaattgttgaccaaatcaggcctgataggcagacactgatgtggagtgcaacctggccaaaagaagtaagacagcttgcagaggatttccttcgtgattacacccagatcaacgtaggcaatctggagttgagtgccaaccacaacatcctccagatagtggatgtctgcatggaaagtgaaaaagaccacaagttgatccaactaatggaagaaataatggctgaaaaggaaaacaaaacaataatatttgtggagacaaagagacgctgtgatgatctgactcgaaggatgcgcagagatggttggccagctatgtgtatccatggagacaagagtcaaccagaaagagattgggtacttaatgagttccgttctggaaaggcacccatccttattgctacagatgtagcctcccgtgggctaggttttgatgtggaagatgtcaagtttgtgatcaactatgactatccaaacagctcagaggattatgtgcaccgtattggccgaacagcccgtagcaccaacaagggtaccgcctataccttcttcaccccagggaacctaaaacaggccagagagcttatcaaagtgctggaagaggccaatcaggctatcaatccaaaactgatgcagcttgtggaccacagaggaggcggcggaggcgggggtggtcgttctcgttaccggaccacttcttcagccaacaatcccaatctgatgtatcaggatgagtgtgaccgaaggcttcgaggagtcaaggatggtggccggagagactctgcaagctatcgggatcgtagtgaaaccgatagagctggttatgctaatggcagtggctatggaagtccaaattctgcctttggagcacaagcaggccaatacacctatggtcaaggcacctatggggcagctgcttatggcaccagtagctatacagctcaagaatatggtgctggcacttatggagctagtagcaccacctcaactgggagaagttcacagagctctagccagcagtttagtgggataggccggtctgggcagcagccacagccactgatgtcacaacagtttgcacagcctccgggagctaccaatatgataggttacatggggcagactgcctaccaataccctcctcctcctccccctcctcctccttcacgtaaatgaaaccactcaagtggtagtgactccagcagacttaattacattttaaggaacactgtctttcctttttttttcctcttcgccttttctttttttttccttttttctttttttttttttaatttttccccccaaccatcgtgatttgtcttttcatgcagattagttagaattcactgccaggtttcttctgcccaccaaaatgatccagtctggaataacattttgtaaaaaaaaaaaaaatatatatatatatatatagctgactggaagagattaatttcttcccccaacttcttgcatgttgaagatatttgagctatttttcatctaaaagagtaaggtattaggcccttttgtgggagccccatgttttgtttttctgagttggtggggagggagggagggggagggctgaattgttttgcagaggaagatggcatctgtgctttaaatttctcattactgggttagaaaacaaagagggattgccctgcacattttcttttgtgcttttaaatgtttcttaagttggaacaggtttcctcgggcctgttttgactgattgctggagtgcatttgatagttaaaaattactaattggttttatttcccttcacactctgcctccccacttctccccccgttactgaaaaataaccattttagtgtcaggctagaaattgaattgctgagttttgtgtatcctttaaattaaaaaccacaagtgtttattgtagtggttaaactgtagcatctcagcatctgggtggaagctgcctatatttcttcccagtttaactggggaccatctgtgaaattaattttccatccagacagctgctgtgagcaaatgaacataaatgctcgctggaaatttactaaccagtttttatattgacctgcagtgtaaaaagcacatttaattataaacaatatattcaaaatgggcaaattttattttcaaatgcagtgtagagctagattaaaagcaactctttgccacctactctgcccttttggcaaagttaccttgaacaaagaatcttaagggtttattaagaactctttattttcttcataccctgttctctgcagtgctttctaacagcttctgggtgcagattttcttcggcatccttttgcactcagcttattacaggtaggtagtgcttaagaaaagtcatggaggactaaagcctaagtccttttcacttttcctccatctgaaggtaggtgagttcatcctcttcatggtaatgctgttttaccaagactttatagcagatggacccagaaagaattttctgctattgtgttcactacaacaggatagggacatcagacagccccagaaaccccttccagatctgatatgggactattaatttttatgctgttaattggtattcattcacaatgcagttgaagggggaaggctccactgcattctttggctaaggcctgaatgcttgctcatctgtaagatctatactcgaggttttgttttccttttaaaattctttagggagagagggatggtttctgaggggttctgaaagtatgattcaatgtgcaacatacaggtaggtcttcagcataagctgaaatatatgcatgtaaaaactttgacatctttttttttaattttccactttcttcttaactttacttctctttttgtcccccccccatcttacagaagttgaggccaagggagaatggtaggcacagaagaaacatggcaaactgctctgtgctttcaaaccaaagtgttccccccaaccccaaatttgtctaagcactggccagtctgttgtgggcattgttttctacaaccaaattctgggtttttttcttctttctttaaacatagaggtaccaccacaagggatgccctactctctcgcagctcttgaaagcatctgtttgagggaaaggtctctgggcaagcaagtggttatttggattgcttgcttccctttttccacctgggacattgtaatcataaaataacagtaaattccaaacctcaaaaactattatggcctgagcacagctgaaatctagcagagtttaactcttctgcctccatgtctgtcacttataattcaggttctgctgttggcttcagaacatgagcagaagaatcgttttatgctagttattgcattcatggttgaaactcaacttagggaaagggttccaatgtattaagcaatgggctgcttctccccaatcctccctaacaattcgttgtgtggacttctcatctaaaaggttagtggcttttgcttgggatcagtgctctctattgatgttcttgctggtctccagacacattcctgttgcattaagacttgaaagacttgtagatgtgtgatgttcaggcacaggatgctgaaagctatgttactattcttagtttgtaaattgtccttttgataccatcatcttgttttctttttgtaggt

SEQ ID NO: 7670 - DNA, 4791 bp, Homo sapiens
  source 1..4791: mol_type = unassigned DNA
aagttggagccgactcagcggcggccgccattttgtgcagtcgctgggaaggaaggagacgcctaaaccgcggcactgcccggtttgagcgtagccaaacctgcccaccggctttgtagccccgattctctgtgttttgctcccgtctccgacgagagaggcggcgacggtggcgtctgcgacgggagacagcgcgtcggagcgagagagcgctgcgcctgccgccgccccaacagcggaggcgccgccgccatcggtcgtcaccagaccggagccgcaggccctcccgagcccggccatccgtgccccgctcccagatctctatccttttgggaccatgcgcggaggaggctttggggaccgggaccgggatcgtgaccgtggaggatttggagcaagaggtggtggtggccttcccccgaagaaatttggtaatcctggggagcgtttgcgtaaaaaaaagtgggatttgagtgagctccccaagtttgagaaaaatttttatgtggaacatccggaagtagcaaggctgacaccatatgaggttgatgagctacgccgaaagaaggagattacagtgagggggggagatgtttgtcctaaacccgtgtttgccttccatcatgctaacttcccacaatatgtaatggatgtgttgatggatcagcactttacagaaccaactccaattcagtgccagggatttccgttggctcttagtggccgggatatggtgggcattgctcagactggctctgggaagacgttggcgtatctcctgcctgcaattgttcatattaaccaccagccatacttggaaaggggagatggcccaatctgtctagttctggctcctaccagagagcttgcccagcaagtacagcaggtggccgatgactatggcaaatgttctagattgaagagtacttgtatttatggaggtgctcctaaaggtccccagattcgagacttggaaagaggtgttgagatctgcatagccactcctggacgtctgatagatttcctggagtcaggaaagacaaatcttcgccgatgtacttaccttgtattggacgaagctgacagaatgcttgatatggggtttgaaccccagatccgtaaaattgttgaccaaatcaggcctgataggcagacactgatgtggagtgcaacctggccaaaagaagtaagacagcttgcagaggatttccttcgtgattacacccagatcaacgtaggcaatctggagttgagtgccaaccacaacatcctccagatagtggatgtctgcatggaaagtgaaaaagaccacaagttgatccaactaatggaagaaataatggctgaaaaggaaaacaaaacaataatatttgtggagacaaagagacgctgtgatgatctgactcgaaggatgcgcagagatggttggccagctatgtgtatccatggagacaagagtcaaccagaaagagattgggtacttaatgagttccgttctggaaaggcacccatccttattgctacagatgtagcctcccgtgggctagatgtggaagatgtcaagtttgtgatcaactatgactatccaaacagctcagaggattatgtgcaccgtattggccgaacagcccgtagcaccaacaagggtaccgcctataccttcttcaccccagggaacctaaaacaggccagagagcttatcaaagtgctggaagaggccaatcaggctatcaatccaaaactgatgcagcttgtggaccacagaggaggcggcggaggcgggggtaagggtggtcgttctcgttaccggaccacttcttcagccaacaatcccaatctgatgtatcaggatgagtgtgaccgaaggcttcgaggagtcaaggatggtggccggagagactctgcaagctatcgggatcgtagtgaaaccgatagagctggttatgctaatggcagtggctatggaagtccaaattctgcctttggagcacaagcaggccaatacacctatggtcaaggcacctatggggcagctgcttatggcaccagtagctatacagctcaagaatatggtgctggcacttatggagctagtagcaccacctcaactgggagaagttcacagagctctagccagcagtttagtgggataggccggtctgggcagcagccacagccactgatgtcacaacagtttgcacagcctccgggagctaccaatatgataggttacatggggcagactgcctaccaataccctcctcctcctccccctcctcctccttcacgtaaatgaaaccactcaagtggtagtgactccagcagacttaattacattttaaggaacactgtctttcctttttttttcctcttcgccttttctttttttttccttttttctttttttttttttaatttttccccccaaccatcgtgatttgtcttttcatgcagattagttagaattcactgccaggtttcttctgcccaccaaaatgatccagtctggaataacattttgtaaaaaaaaaaaaaatatatatatatatatatagctgactggaagagattaatttcttcccccaacttcttgcatgttgaagatatttgagctatttttcatctaaaagagtaaggtattaggcccttttgtgggagccccatgttttgtttttctgagttggtggggagggagggagggggagggctgaattgttttgcagaggaagatggcatctgtgctttaaatttctcattactgggttagaaaacaaagagggattgccctgcacattttcttttgtgcttttaaatgtttcttaagttggaacaggtttcctcgggcctgttttgactgattgctggagtgcatttgatagttaaaaattactaattggttttatttcccttcacactctgcctccccacttctccccccgttactgaaaaataaccattttagtgtcaggctagaaattgaattgctgagttttgtgtatcctttaaattaaaaaccacaagtgtttattgtagtggttaaactgtagcatctcagcatctgggtggaagctgcctatatttcttcccagtttaactggggaccatctgtgaaattaattttccatccagacagctgctgtgagcaaatgaacataaatgctcgctggaaatttactaaccagtttttatattgacctgcagtgtaaaaagcacatttaattataaacaatatattcaaaatgggcaaattttattttcaaatgcagtgtagagctagattaaaagcaactctttgccacctactctgcccttttggcaaagttaccttgaacaaagaatcttaagggtttattaagaactctttattttcttcataccctgttctctgcagtgctttctaacagcttctgggtgcagattttcttcggcatccttttgcactcagcttattacaggtaggtagtgcttaagaaaagtcatggaggactaaagcctaagtccttttcacttttcctccatctgaaggtaggtgagttcatcctcttcatggtaatgctgttttaccaagactttatagcagatggacccagaaagaattttctgctattgtgttcactacaacaggatagggacatcagacagccccagaaaccccttccagatctgatatgggactattaatttttatgctgttaattggtattcattcacaatgcagttgaagggggaaggctccactgcattctttggctaaggcctgaatgcttgctcatctgtaagatctatactcgaggttttgttttccttttaaaattctttagggagagagggatggtttctgaggggttctgaaagtatgattcaatgtgcaacatacaggtaggtcttcagcataagctgaaatatatgcatgtaaaaactttgacatctttttttttaattttccactttcttcttaactttacttctctttttgtcccccccccatcttacagaagttgaggccaagggagaatggtaggcacagaagaaacatggcaaactgctctgtgctttcaaaccaaagtgttccccccaaccccaaatttgtctaagcactggccagtctgttgtgggcattgttttctacaaccaaattctgggtttttttcttctttctttaaacatagaggtaccaccacaagggatgccctactctctcgcagctcttgaaagcatctgtttgagggaaaggtctctgggcaagcaagtggttatttggattgcttgcttccctttttccacctgggacattgtaatcataaaataacagtaaattccaaacctcaaaaactattatggcctgagcacagctgaaatctagcagagtttaactcttctgcctccatgtctgtcacttataattcaggttctgctgttggcttcagaacatgagcagaagaatcgttttatgctagttattgcattcatggttgaaactcaacttagggaaagggttccaatgtattaagcaatgggctgcttctccccaatcctccctaacaattcgttgtgtggacttctcatctaaaaggttagtggcttttgcttgggatcagtgctctctattgatgttcttgctggtctccagacacattcctgttgcattaagacttgaaagacttgtagatgtgtgatgttcaggcacaggatgctgaaagctatgttactattcttagtttgtaaattgtccttttgataccatcatcttgttttctttttgtaggtataaataaaaacactgttgacaat

SEQ ID NO: 7671 - DNA, 2322 bp, Homo sapiens
  source 1..2322: mol_type = unassigned DNA
cgccattttgtgcagtcgctgggaaggaaggagacgcctaaaccgcggcactgcccggtttgagcgtagccaaacctgcccaccggctttgtagccccgattctctgtgttttgctcccgtctccgacgagagaggcggcgacggtggcgtctgcgacgggagacagcgcgtcggagcgagagagcgctgcgcctgccgccgccccaacagcggaggcgccgccgccatcggtcgtcaccagaccggagccgcaggccctcccgagcccggccatccgtgccccgctcccagatctctatccttttgggaccatgcgcggaggaggctttggggaccgggaccgggatcgtgaccgtggaggatttggagcaagaggtggtggtggccttcccccgaagaaatttggtaatcctggggagcgtttgcgtaaaaaaaagtgggatttgagtgagctccccaagtttgagaaaaatttttatgtggaacatccggaagtagcaaggctgacaccatatgaggttgatgagctacgccgaaagaaggagattacagtgagggggggagatgtttgtcctaaacccgtgtttgccttccatcatgctaacttcccacaatatgtaatggatgtgttgatggatcagcactttacagaaccaactccaattcagtgccagggatttccgttggctcttagtggccgggatatggtgggcattgctcagactggctctgggaagacgttggcgtatctcctgcctgcaattgttcatattaaccaccagccatacttggaaaggggagatggcccaatctgtctagttctggctcctaccagagagcttgcccagcaagtacagcaggtggccgatgactatggcaaatgttctagattgaagagtacttgtatttatggaggtgctcctaaaggtccccagattcgagacttggaaagaggtgttgagatctgcatagccactcctggacgtctgatagatttcctggagtcaggaaagacaaatcttcgccgatgtacttaccttgtattggacgaagctgacagaatgcttgatatggggtttgaaccccagatccgtaaaattgttgaccaaatcaggcctgataggcagacactgatgtggagtgcaacctggccaaaagaagtaagacagcttgcagaggatttccttcgtgattacacccagatcaacgtaggcaatctggagttgagtgccaaccacaacatcctccagatagtggatgtctgcatggaaagtgaaaaagaccacaagttgatccaactaatggaagaaataatggctgaaaaggaaaacaaaacaataatatttgtggagacaaagagacgctgtgatgatctgactcgaaggatgcgcagagatggttggccagctatgtgtatccatggagacaagagtcaaccagaaagagattgggtacttaatgagttccgttctggaaaggcacccatccttattgctacagatgtagcctcccgtgggctagatgtggaagatgtcaagtttgtgatcaactatgactatccaaacagctcagaggattatgtgcaccgtattggccgaacagcccgtagcaccaacaagggtaccgcctataccttcttcaccccagggaacctaaaacaggccagagagcttatcaaagtgctggaagaggccaatcaggctatcaatccaaaactgatgcagcttgtggaccacagaggaggcggcggaggcgggggtggtcgttctcgttaccggaccacttcttcagccaacaatcccaatctgatgtatcaggatgagtgtgaccgaaggcttcgaggagtcaaggatggtggccggagagactctgcaagctatcgggatcgtagtgaaaccgatagagctggttatgctaatggcagtggctatggaagtccaaattctgcctttggagcacaagcaggccaatacacctatggtcaaggcacctatggggcagctgcttatggcaccagtagctatacagctcaagaatatggtgctggcacttatggagctagtagcaccacctcaactgggagaagttcacagagctctagccagcagtttagtgggataggccggtctgggcagcagccacagccactgatgtcacaacagtttgcacagcctccgggagctaccaatatgataggttacatggggcagactgcctaccaataccctcctcctcctccccctcctcctccttcacgtaaatgaaaccactcaagtggtagtgactccagcagacttaattacattttaaggaacactgtc

SEQ ID NO: 7672 - DNA, 2311 bp, Homo sapiens
  source 1..2311: mol_type = unassigned DNA
gttaagttggagccgactcagcggcggccgccattttgtgcagtcgctgggaaggaaggagacgcctaaaccgcggcactgcccggtttgagcgtagccaaacctgcccaccggctttgtagccccgattctctgtgttttgctcccgtctccgacgagagaggcggcgacggtggcgtctgcgacgggagacagcgcgtcggagcgagagagcgctgcgcctgccgccgccccaacagcggaggcgccgccgccatcggtcgtcaccagaccggagccgcaggccctcccgagcccggccatccgtgccccgctcccagatctctatccttttgggaccatgcgcggaggaggctttggggaccgggaccgggatcgtgaccgtggaggatttggagcaagaggtggtggtggccttcccccgaagaaatttggtaatcctggggagcgtttgcgtaaaaaaaagtgggatttgagtgagctccccaagtttgagaaaaatttttatgtggaacatccggaagtagcaaggctgacaccatatgaggttgatgagctacgccgaaagaaggagattacagtgagggggggagatgtttgtcctaaacccgtgtttgccttccatcatgctaacttcccacaatatgtaatggatgtgttgatggatcagcactttacagaaccaactccaattcagtgccagggatttccgttggctcttagtggccgggatatggtgggcattgctcagactggctctgggaagacgttggcgtatctcctgcctgcaattgttcatattaaccaccagccatacttggaaaggggagatggcccaatctgtctagttctggctcctaccagagagcttgcccagcaagtacagcaggtggccgatgactatggcaaatgttctagattgaagagtacttgtatttatggaggtgctcctaaaggtccccagattcgagacttggaaagaggtgttgagatctgcatagccactcctggacgtctgatagatttcctggagtcaggaaagacaaatcttcgccgatgtacttaccttgtattggacgaagctgacagaatgcttgatatggggtttgaaccccagatccgtaaaattgttgaccaaatcaggcctgataggcagacactgatgtggagtgcaacctggccaaaagaagtaagacagcttgcagaggatttccttcgtgattacacccagatcaacgtaggcaatctggagttgagtgccaaccacaacatcctccagatagtggatgtctgcatggaaagtgaaaaagaccacaagttgatccaactaatggaagaaataatggctgaaaaggaaaacaaaacaataatatttgtggagacaaagagacgctgtgatgatctgactcgaaggatgcgcagagatggttggccagctatgtgtatccatggagacaagagtcaaccagaaagagattgggtacttaatgagttccgttctggaaaggcacccatccttattgctacagatgtagcctcccgtgggctagatgtggaagatgtcaagtttgtgatcaactatgactatccaaacagctcagaggattatgtgcaccgtattggccgaacagcccgtagcaccaacaagggtaccgcctataccttcttcaccccagggaacctaaaacaggccagagagcttatcaaagtgctggaagaggccaatcaggctatcaatccaaaactgatgcagcttgtggaccacagaggaggcggcggaggcgggggtaagggtggtcgttctcgttaccggaccacttcttcagccaacaatcccaatctgatgtatcaggatgagtgtgaccgaaggcttcgaggagtcaaggatggtggccggagagactctgcaagctatcgggatcgtagtgaaaccgatagagctggttatgctaatggcagtggctatggaagtccaaattctgcctttggagcacaagcaggccaatacacctatggtcaaggcacctatggggcagctgcttatggcaccagtagctatacagctcaagaatatggtgctggcacttatggagctagtagcaccacctcaactgggagaagttcacagagctctagccagcagtttagtgggataggccggtctgggcagcagccacagccactgatgtcacaacagtttgcacagcctccgggagctaccaataccctcctcctcctccccctcctcctccttcacgtaaatgaaaccactcaagtggtagtgactccagcagacttaattacattttaa

SEQ ID NO: 7673 - DNA, 3629 bp, Homo sapiens
  source 1..3629: mol_type = unassigned DNA
gagtagaagtgatttggcctcataacttcacagtggtttaccactttgttctatgttctggttttgtaaaggatagtactggaatttgcgtctgaagaccaatattggtgtaactcctgtcagtatattggtaaaatgtagcagaggcaggagtttggatgtttggatgggattcccttaggattctacagccaataaagatcctatttcctatgcatgtcccaggaatcagtaatcctcttttactctgttgggatgagtctttttttgtttctgttcagagtggttactaacttcaccttctttcctcttgctgtcatctgcattcgtgcttcccacctgttgttggcatgtcctttaccttctctttccctgccacatcaacctacacactgactcatcattgacgtggaagatgtggaagatgtcaagtttgtgatcaactatgactatccaaacagctcagaggattatgtgcaccgtattggccgaacagcccgtagcaccaacaagggtaccgcctataccttcttcaccccagggaacctaaaacaggccagagagcttatcaaagtgctggaagaggccaatcaggctatcaatccaaaactgatgcagcttgtggaccacagaggaggcggcggaggcgggggtggtcgttctcgttaccggaccacttcttcagccaacaatcccaatctgatgtatcaggatgagtgtgaccgaaggcttcgaggagtcaaggatggtggccggagagactctgcaagctatcgggatcgtagtgaaaccgatagagctggttatgctaatggcagtggctatggaagtccaaattctgcctttggagcacaagcaggccaatacacctatggtcaaggcacctatggggcagctgcttatggcaccagtagctatacagctcaagaatatggtgctggcacttatggagctagtagcaccacctcaactgggagaagttcacagagctctagccagcagtttagtgggataggccggtctgggcagcagccacagccactgatgtcacaacagtttgcacagcctccgggagctaccaatatgataggttacatggggcagactgcctaccaataccctcctcctcctccccctcctcctccttcacgtaaatgaaaccactcaagtggtagtgactccagcagacttaattacattttaaggaacactgtctttcctttttttttcctcttcgccttttctttttttttccttttttctttttttttttttaatttttccccccaaccatcgtgatttgtcttttcatgcagattagttagaattcactgccaggtttcttctgcccaccaaaatgatccagtctggaataacattttgtaaaaaaaaaaaaaatatatatatatatatatagctgactggaagagattaatttcttcccccaacttcttgcatgttgaagatatttgagctatttttcatctaaaagagtaaggtattaggcccttttgtgggagccccatgttttgtttttctgagttggtggggagggagggagggggagggctgaattgttttgcagaggaagatggcatctgtgctttaaatttctcattactgggttagaaaacaaagagggattgccctgcacattttcttttgtgcttttaaatgtttcttaagttggaacaggtttcctcgggcctgttttgactgattgctggagtgcatttgatagttaaaaattactaattggttttatttcccttcacactctgcctccccacttctccccccgttactgaaaaataaccattttagtgtcaggctagaaattgaattgctgagttttgtgtatcctttaaattaaaaaccacaagtgtttattgtagtggttaaactgtagcatctcagcatctgggtggaagctgcctatatttcttcccagtttaactggggaccatctgtgaaattaattttccatccagacagctgctgtgagcaaatgaacataaatgctcgctggaaatttactaaccagtttttatattgacctgcagtgtaaaaagcacatttaattataaacaatatattcaaaatgggcaaattttattttcaaatgcagtgtagagctagattaaaagcaactctttgccacctactctgcccttttggcaaagttaccttgaacaaagaatcttaagggtttattaagaactctttattttcttcataccctgttctctgcagtgctttctaacagcttctgggtgcagattttcttcggcatccttttgcactcagcttattacaggtaggtagtgcttaagaaaagtcatggaggactaaagcctaagtccttttcacttttcctccatctgaaggtaggtgagttcatcctcttcatggtaatgctgttttaccaagactttatagcagatggacccagaaagaattttctgctattgtgttcactacaacaggatagggacatcagacagccccagaaaccccttccagatctgatatgggactattaatttttatgctgttaattggtattcattcacaatgcagttgaagggggaaggctccactgcattctttggctaaggcctgaatgcttgctcatctgtaagatctatactcgaggttttgttttccttttaaaattctttagggagagagggatggtttctgaggggttctgaaagtatgattcaatgtgcaacatacaggtaggtcttcagcataagctgaaatatatgcatgtaaaaactttgacatctttttttttaattttccactttcttcttaactttacttctctttttgtcccccccccatcttacagaagttgaggccaagggagaatggtaggcacagaagaaacatggcaaactgctctgtgctttcaaaccaaagtgttccccccaaccccaaatttgtctaagcactggccagtctgttgtgggcattgttttctacaaccaaattctgggtttttttcttctttctttaaacatagaggtaccaccacaagggatgccctactctctcgcagctcttgaaagcatctgtttgagggaaaggtctctgggcaagcaagtggttatttggattgcttgcttccctttttccacctgggacattgtaatcataaaataacagtaaattccaaacctcaaaaactattatggcctgagcacagctgaaatctagcagagtttaactcttctgcctccatgtctgtcacttataattcaggttctgctgttggcttcagaacatgagcagaagaatcgttttatgctagttattgcattcatggttgaaactcaacttagggaaagggttccaatgtattaagcaatgggctgcttctccccaatcctccctaacaattcgttgtgtggacttctcatctaaaaggttagtggcttttgcttgggatcagtgctctctattgatgttcttgctggtctccagacacattcctgttgcattaagacttgaaagacttgtagatgtgtgatgttcaggcacaggatgctgaaagctatgttactattcttagtttgtaaattgtccttttgataccatcatcttgttttctttttgtaggt

SEQ ID NO: 7674 - DNA, 3796 bp, Homo sapiens
  source 1..3796: mol_type = unassigned DNA
ccagcgttcctgtgacgcgtttcctgttggccgagctgcgcacgtgcggccggaagggaagtaacgtcagcctgagaactgagtagctgtactgtgtggcgccttattctaggcacttgttgggcagaatgtcacacctgccgatgaaactcctgcgtaagaagatcgagaagcggaacctcaaattgcggcagcggaacctaaagtttcagggggcctcaaatctgaccctatcggaaactcaaaatggagatgtatctgaagaaacaatgggaagtagaaaggttaaaaaatcaaaacaaaagcccatgaatgtgggcttatcagaaactcaaaatggaggcatgtctcaagaagcagtgggaaatataaaagttacaaagtctccccagaaatccactgtattaaccaatggagaagcagcaatgcagtcttccaattcagaatcaaaaaagaaaaagaagaaaaagagaaaaatggtgaatgatgctgagcctgatacgaaaaaagcaaaaactgaaaacaaagggaaatctgaagaagaaagtgccgagactactaaagaaacagaaaataatgtggagaagccagataatgatgaagatgagagtgaggtgcccagtctgcccctgggactgacaggagcttttgaggatacttcgtttgcttctctatgtaatcttgtcaatgaaaacactctgaaggcaataaaagaaatgggttttacaaacatgactgaaattcagcataaaagtatcagaccacttctggaaggcagggatcttctagcagctgcaaaaacaggcagtggtaaaaccctggcttttctcatccctgcagttgaactcattgttaagttaaggttcatgcccaggaatggaacaggagtccttattctctcacctactagagaactagccatgcaaacctttggtgttcttaaggagctgatgactcaccacgtgcatacctatggcttgataatgggtggcagtaacagatctgctgaagcacagaaacttggtaatgggatcaacatcattgtggccacaccaggccgtctgctggaccatatgcagaataccccaggatttatgtataaaaacctgcagtgtctggttattgatgaagctgatcgtatcttggatgtggggtttgaagaggaattaaagcaaattattaaacttttgccaacacgtagacagactatgctcttttctgccacccaaactcgaaaagttgaagacctggcaaggatttctctgaaaaaggagccattgtatgttggcgttgatgatgataaagcgaatgcaacagtggatggtcttgaacagggatatgttgtttgtccttctgaaaagagattccttctgctctttacattccttaagaagaaccgaaagaagaagcttatggtcttcttttcatcttgtatgtctgtgaaataccactatgagttgctgaactacattgatttgcccgtcttggccattcatggaaagcaaaagcaaaataagcgtacaaccacattcttccagttctgcaatgcagattcgggaacactattgtgtacggatgtggcagcgagaggactagacattcctgaagtcgactggattgttcagtatgaccctccggatgaccctaaggaatatattcatcgtgtgggtagaacagccagaggcctaaatgggagagggcatgccttgctcattttgcgcccagaagaattgggttttcttcgctacttgaaacaatccaaggttccattaagtgaatttgacttttcctggtctaaaatttctgacattcagtctcagcttgagaaattgattgaaaagaattactttcttcataagtcagcccaggaagcatataagtcatacatacgagcctatgattcccattctctgaaacagatctttaatgttaataacctaaatttgcctcaggttgctctgtcatttggtttcaaggtgcctcccttcgttgatctgaacgtcaacagtaatgaaggcaagcagaaaaagcgaggaggtggtggtggatttggctaccagaaaaccaagaaagttgagaaatccaaaatctttaaacacattagcaagaaatcatctgacagcaggcagttctctcactgaacacatgccttcctttcatcttgaataactttgtcctaaaatgaattttttttccccttgatttaacaggatttttgtagactttagaatttggacttacctaacaagagtataaattgacttgggttgcaagcactgagcactgttacttctatcacgtctctcttttatttctgggatataaaacaggctttaagtttcttggttgcccaagggcagagcaaggaatatctggtgtttcttgtgatgataatattttaattttaaatatccctccctcatacaagtgtatgttaccattttaatataattctttttgtacctttccttcttgttttgcgaagatttttgtggcatggattgctgtgctcactgctgtaaaaggtgacctagtgtactgggcagctggtggcggtgcagaaaagagtctcaggttattttttgtttttagttatttcttggaccttgacagtatctaatgactcctcctgaaaatgctgcagtataaaagagcaaagagctttgggaaatacctaagaagcaccttaagattagggtggcattgcttttatagattcttgattttaaagcaacaggcctttctcaggtgttgcattttttggagcaaaaactatgggttgtaatttgaataaagtgtcactaagcagttataacgtttgatggctggggggtaggaagaggatggaattgagatgtttgagcctcatttacatcaatagaggtgtaatgtactgcatttcttcatttggtaacataacaaagactttcatacaaagaacgatgatgctcctcattaagatttgtttaattcaaggtggtttggatttggtaagcctttgcactctgtagagtacttagaagacaagggcaacttacttggagttagagccaagctgtcagacggtgcccagcacacattaatgttagcttctttctgagaaaaaaatacctcttccaggccctgaaacaaaaaatacatttgctgtgaagattgaaaatgaacaaagttagaaaaaaaaacagcaaaatcagtgatttagtcagatgagtttttcgttgtaggagcacttgatttctagtgtgttttgtacagtatataactacaagatagtacattttgtagcagttcaaagccaaagttgctagcatcattttgctgttgtgccagttaatcataggatcccattaaataagtgtgctaacatcgaatatagagaaaactggtaaagaacattccagtaggaaaagaaaagaacaatcttccatttctgggcttggccaccatcaccctggtcggacctgtcctggacttccaaccttgactgctgagctcctggcttagcttcttgggttcctaattcctggtgtttaataattctctccacgatcatgtttttctgattttttttttcagaaataatgttttttaaaagacaaaaacaaagggaagaatatttaattactgagcagaagtaaatactgttggcattttgtacataatctaatttttatatgcatgttcatgctttttaatttttttatcaaaaattaagtcatctacctactacttgtaaccagcttgtttcataacatgttattttcctgtgtcattaaataattacttcaatgttgta

SEQ ID NO: 7675 - DNA, 3195 bp, Homo sapiens
  source 1..3195: mol_type = unassigned DNA
aaacagaaaataatgtggagaagccagataatgatgaagatgagagtgaggtgcccagtctgcccctgggactgacaggagcttttgaggatacttcgtttgcttctctatgtaatcttgtcaatgaaaacactctgaaggcaataaaagaaatgggttttacaaacatgactgaaattcagcataaaagtatcagaccacttctggaaggcagggatcttctagcagctgcaaaaacaggcagtggtaaaaccctggcttttctcatccctgcagttgaactcattgttaagttaaggttcatgcccaggaatggaacaggagcaaacctttggtgttcttaaggagctgatgactcaccacgtgcatacctatggcttgataatgggtggcagtaacagatctgctgaagcacagaaacttggtaatgggatcaacatcattgtggccacaccaggccgtctgctggaccatatgcagaataccccaggatttatgtataaaaacctgcagtgtctggttattgatgaagctgatcgtatcttggatgtggggtttgaagaggaattaaagcaaattattaaacttttgccaacacgtagacagactatgctcttttctgccacccaaactcgaaaagttgaagacctggcaaggatttctctgaaaaaggagccattgtatgttggcgttgatgatgataaagcgaatgcaacagtggatggtcttgaacagggatatgttgtttgtccttctgaaaagagattccttctgctctttacattccttaagaagaaccgaaagaagaagcttatggtcttcttttcatcttgtatgtctgtgaaataccactatgagttgctgaactacattgatttgcccgtcttggccattcatggaaagcaaaagcaaaataagcgtacaaccacattcttccagttctgcaatgcagattcgggaacactattgtgtacggatgtggcagcgagaggactagacattcctgaagtcgactggattgttcagtatgaccctccggatgaccctaaggaatatattcatcgtgtgggtagaacagccagaggcctaaatgggagagggcatgccttgctcattttgcgcccagaagaattgggttttcttcgctacttgaaacaatccaaggttccattaagtgaatttgacttttcctggtctaaaatttctgacattcagtctcagcttgagaaattgattgaaaagaattactttcttcataagtcagcccaggaagcatataagtcatacatacgagcctatgattcccattctctgaaacagatctttaatgttaataacctaaatttgcctcaggttgctctgtcatttggtttcaaggtgcctcccttcgttgatctgaacgtcaacagtaatgaaggcaagcagaaaaagcgaggaggtggtggtggatttggctaccagaaaaccaagaaagttgagaaatccaaaatctttaaacacattagcaagaaatcatctgacagcaggcagttctctcactgaacacatgccttcctttcatcttgaataactttgtcctaaaatgaattttttttccccttgatttaacaggatttttgtagactttagaatttggacttacctaacaagagtataaattgacttgggttgcaagcactgagcactgttacttctatcacgtctctcttttatttctgggatataaaacaggctttaagtttcttggttgcccaagggcagagcaaggaatatctggtgtttcttgtgatgataatattttaattttaaatatccctccctcatacaagtgtatgttaccattttaatataattctttttgtacctttccttcttgttttgcgaagatttttgtggcatggattgctgtgctcactgctgtaaaaggtgacctagtgtactgggcagctggtggcggtgcagaaaagagtctcaggttattttttgtttttagttatttcttggaccttgacagtatctaatgactcctcctgaaaatgctgcagtataaaagagcaaagagctttgggaaatacctaagaagcaccttaagattagggtggcattgcttttatagattcttgattttaaagcaacaggcctttctcaggtgttgcattttttggagcaaaaactatgggttgtaatttgaataaagtgtcactaagcagttataacgtttgatggctggggggtaggaagaggatggaattgagatgtttgagcctcatttacatcaatagaggtgtaatgtactgcatttcttcatttggtaacataacaaagactttcatacaaagaacgatgatgctcctcattaagatttgtttaattcaaggtggtttggatttggtaagcctttgcactctgtagagtacttagaagacaagggcaacttacttggagttagagccaagctgtcagacggtgcccagcacacattaatgttagcttctttctgagaaaaaaatacctcttccaggccctgaaacaaaaaatacatttgctgtgaagattgaaaatgaacaaagttagaaaaaaaaacagcaaaatcagtgatttagtcagatgagtttttcgttgtaggagcacttgatttctagtgtgttttgtacagtatataactacaagatagtacattttgtagcagttcaaagccaaagttgctagcatcattttgctgttgtgccagttaatcataggatcccattaaataagtgtgctaacatcgaatatagagaaaactggtaaagaacattccagtaggaaaagaaaagaacaatcttccatttctgggcttggccaccatcaccctggtcggacctgtcctggacttccaaccttgactgctgagctcctggcttagcttcttgggttcctaattcctggtgtttaataattctctccacgatcatgtttttctgattttttttttcagaaataatgttttttaaaagacaaaaacaaagggaagaatatttaattactgagcagaagtaaatactgttggcattttgtacataatctaatttttatatgcatgttcatgctttttaatttttttatcaaaaattaagtcatctacctactacttgtaaccagcttgtttcataacatgttattttcctgtgtcattaaataattacttcaatgttg

SEQ ID NO: 7676 - DNA, 4212 bp, Homo sapiens
  source 1..4212: mol_type = unassigned DNA
gtgcgccagggacttgctaggagataaatggggtttatctcaccggagataaatgtggttgcacagcagatggacacaccagccaatgtggtaaataaacccttgggtccagctacgttctgcgcgctctctgccagcacagaggagcagcgagtcagggtacggagcgggtagcgttggggaagaggtggccgcgaagcgagacaggccagcggaacggaaaacggaagcacgagacgggggcgtgacgcaccgggcgcatcacaaagaacggcgagagggcggtggcgccgggggcacggctgggcggctccgcccagaagagggccgagaggcggggcggtgcccccaccgcaggcccgcggcgccctctgcaggccacaggcagcgactcaccagttgcctcatctttcctctcctccctcttggggctttcctcaggccacattttttgtgtgtctgggcagtctctcagcctccgactcccgtccctttcttccacttccaggccgggcgtgttagtgtcttcgcgggaaaactgccaataaagtttttcttcttctcgctcccaagatccccgcctccccttaagcaccgcgagatctgacggcgcggctaccatggcggcggcatttgaagcctcgggagccttagcagcagtggcgactgctatgccggctgagcatgtggccgtgcaggtcccggccccagagccaacacccgggcctgtgaggatcctgcggaccgctcaggatctcagcagcccgcggacccgcacgggggatgtgctgttggcggagccggccgacttcgagtcactgctgctttcgcggccggtgctggaggggctgcgggcggccggcttcgagaggccctcgccggtgcagctcaaggccatcccgttggggcgctgcgggctcgatttaattgttcaagctaaatctggcaccgggaaaacctgtgtgttctccaccatagctttggactctcttgttcttgaaaacttaagtacccagattttgatcttggctcctacaagagaaattgctgtacagatacattctgttattacagccattggaataaaaatggaaggcttagagtgtcatgtctttattggagggaccccattatcacaagacaaaaccagacttaaaaagtgtcatattgctgttggatctcctggcagaattaagcaactcatagaacttgactacttgaacccaggcagtatacgcctctttattcttgatgaagcagataagcttttagaagaaggcagcttccaggagcaaataaattggatttattcttccttgcctgccagtaaacagatgctggcagtatcagctacttatcccgaatttttggctaatgctttgacaaagtacatgagagatcccacttttgtaagactgaattccagtgatccaagtctcataggtttgaagcagtattacaaagttgtcaattcataccctttggcacataaggtttttgaggaaaagactcagcatttacaggaactgttcagcagaattccatttaatcaagctttagtcttttctaatttgcacagcagagcacaacatttggctgatatcctttcttctaaaggctttcctgctgagtgcatttcaggcaatatgaatcagaatcagcgtcttgatgctatggctaaactgaagcactttcattgcagagtcctcatttccacagatttgacttctcgtgggattgatgctgagaaggtgaatctggttgtaaatctggatgtaccattggattgggagacatacatgcatcggattgggagagctggccgttttggtacattggggctgacagtgacctactgttgccggggagaggaagaaaatatgatgatgagaattgcccagaaatgtaatatcaaccttctccctttaccagatcccattccttctggtctgatggaagaatgtgtggattgggatgtggaagttaaagctgctgtgcatacatatggtatagcaagtgtacctaaccaacccttaaaaaagcaaattcagaaaatagagagaacccttcaaattcagaaagctcatggtgaccacatggcttcctctagaaataattctgtatctggactatcagtcaaatcaaaaaataataccaaacaaaagcttcctgtgaaaagccactcagaatgtggaatcatagaaaaagcaacgtcaccaaaagaactgggctgtgacaggcaatccgaagagcaaatgaagaattctgttcagactcccgttgaaaactccaccaacagtcagcaccaggtcaaagaagctttacctgtgtcactcccccagattccttgtctgtcttcctttaaaatccatcagccatacacgttgacttttgctgaattggtagaggattatgaacattatattaaagaggggttagagaaacctgtggaaatcatcaggcactacacaggccctggggatcagactgtgaatcctcaaaatggttttgtgagaaataaagttattgaacagagagtccctgtgttggcaagtagtagccaatctggagactctgagagtgacagtgattcttacagctcaagaacctcttcccagagcaaaggaaataagtcatacttggaaggctcttctgataatcagctgaaagactctgaatctacgcctgtggatgatcgtatttctttggaacaaccaccaaatggaagtgacacccccaatccagagaaatatcaagaatcacctggaatccagatgaagacaagacttaaagagggggctagccagagagctaagcagagccggagaaacctacccaggcggtcttccttcagattgcagactgaagcccaggaagatgattggtatgactgtcatagggaaatacgtctgagtttttctgatacctatcaggattatgaggagtactggagagcttactacagggcatggcaagaatattatgctgccgcttctcattcatattattggaatgctcagagacatccaagttggatggcagcttatcacatgaataccatttatctacaagaaatgatgcatagtaaccagtgattataggatatacctgagaccatcaggaactgtcaacaaatgatacctttggatatccatcctcctcgacttatagtacagtggtgtatagtggcatttctgataaacttgaaaagacttgagtctttccactgggacacatccatttttcagattgttttgatttaggccaggtatattatcttcatttttaagagtttctttaagaaacttcatcagattgttgaaagataatttttgggacatagagctgaaagtttcagggtgccattttctataagatcttcccaaaagaaacatttaaaaagatgacatataccaccacttacttaaaaacaataaaagcaatagatttgattagtaatattattgctgtggagttctttacaaagggcttaggctgcatttccttctatagaggtgcattcttgtagaaatttgtagcatggtagatcagaaaatcctcttaggttttaggcaggaaggaatatttaaacattgctttagattttcctaaaggtatttgatttgatctgttagcttccagtaaaaatatttgtttttagtaaaaacaaatttaaatatatttacatgtttgttgtttatcttttgaatgtcttttgaggctgtgaaagctgtccacatttttgctgtgtattaaatagctgtgggtcatcagttgctgtcttacttgtgttgctcagatagaggagcagctcttaatcttttttggttcttggatccttttatgaatcagctgatagctatagattgacttcaggaaatttctcattccataagcacagaattgtgagtgtaatttcaaggggttcatagaccctctgaagttcatctatacagtccagattaacaagtgacctgctctgctggtaggctaggggaagttctagctcttagttttaagtattttgtggaagctggaattgattctcttcagacacttcttagtacatcctaattttgtgtcttctagaaaattttccccagtttttacctctaatgttaggatccaagaggagcttggatctgagctgatgcatctgtaaattacgatttagaaaaatataattggaaattacatattctttgctttttt

SEQ ID NO: 7677 - DNA, 1263 bp, Homo sapiens
  source 1..1263: mol_type = unassigned DNA
ccgcgagatctgacggcgcggctaccatggcggcggcatttgaagcctcgggagccttagcagcagtggcgactgctatgccggctgagcatgtggccgtgcaggtcccggccccagagccaacacccgggcctgtgaggatcctgcggaccgctcaggatctcagcagcccgcggacccgcacgggggatgtgctgttggcggagccggccgacttcgagtcactgctgctttcgcggccggtgctggaggggctgcgggcggccggcttcgagaggccctcgccggtgcagctcaaggccatcccgttggggcgctgcgggctcgatttaattgttcaagctaaatctggcaccgggaaaacctgtgtgttctccaccatagctttggactctcttgttcttgaaaacttaagtacccaggcagaattaagcaactcatagaacttgactacttgaacccaggcagtatacgcctctttattcttgatgaagcagataagcttttagaagaaggcagcttccaggagcaaataaattggatttattcttccttgcctgccagtaaacagatgctggcagtatcagctacttatcccgaatttttggctaatgctttgacaaagtacatgagagatcccacttttgtaagactgaattccagtgatccaagtctcataggtttgaagcagtattacaaagttgtcaattcataccctttggcacataaggtttttgaggaaaagactcagcatttacaggaactgttcagcagaattccatttaatcaagctttagtcttttctaatttgcacagcagagcacaacatttggctgatatcctttcttctaaaggctttcctgctgagtgcatttcaggcaatatgaatcagaatcagcgtcttgatgctatggctaaactgaagcactttcattgcagagtcctcatttccacagatttgacttctcgtgggattgatgctgagaaggtgaatctggttgtaaatctggatgtaccattggattgggagacatacatgcatcggattgggagagctggccgttttggtacattggggctgacagtgacctactgttgccggggagaggaagaaaatatgatgatgagaattgcccagaaatgtaatatcaaccttctccctttaccagatcccattccttctggtctgatggaagaatgtgtggattgggatgtggaagttaaagctgctgtgcatacatatggtatagcaagtgtacctaa

SEQ ID NO: 7678 - DNA, 4711 bp, Homo sapiens
  source 1..4711: mol_type = unassigned DNA
gggaagtgacgagagccgggtggacccagggtggggaactacctcttcctctccacgcggttgagaagaccggtcggcctgggcaacctgcgctgaagatgccgggaaaactccgtagtgacgctggtttggaatcagacaccgcaatgaaaaaaggggagacactgcgaaagcaaaccgaggagaaagagaaaaaagagaagccaaaatctgataagactgaagagatagcagaagaggaagaaactgttttccccaaagctaaacaagttaaaaagaaagcagagccttctgaagttgacatgaattctcctaaatccaaaaaggcaaaaaagaaagaggagccatctcaaaatgacatttctcctaaaaccaaaagtttgagaaagaaaaaggagcccattgaaaagaaagtggtttcttctaaaaccaaaaaagtgacaaaaaatgaggagccttctgaggaagaaatagatgctcctaagcccaagaagatgaagaaagaaaaggaaatgaatggagaaactagagagaaaagccccaaactgaagaatggatttcctcatcctgaaccggactgtaaccccagtgaagctgccagtgaagaaagtaacagtgagatagagcaggaaatacctgtggaacaaaaagaaggcgctttctctaattttcccatatctgaagaaactattaaacttctcaaaggccgaggagtgaccttcctatttcctatacaagcaaagacattccatcatgtttacagcgggaaggacttaattgcacaggcacggacaggaactgggaagacattctcctttgccatccctttgattgagaaacttcatggggaactgcaagacaggaagagaggccgtgcccctcaggtactggttcttgcacctacaagagagttggcaaatcaagtaagcaaagacttcagtgacatcacaaaaaagctgtcagtggcttgtttttatggtggaactccctatggaggtcaatttgaacgcatgaggaatgggattgatatcctggttggaacaccaggtcgtatcaaagaccacatacagaatggcaaactagatctcaccaaacttaagcatgttgtcctggatgaagtggaccagatgttggatatgggatttgctgatcaagtggaagagattttaagtgtggcatacaagaaagattctgaagacaatccccaaacattgcttttttctgcaacttgccctcattgggtatttaatgttgccaagaaatacatgaaatctacatatgaacaggtggacctgattggtaaaaagactcagaaaacggcaataactgtggagcatctggctattaagtgccactggactcagagggcagcagttattggggatgtcatccgagtatatagtggtcatcaaggacgcactatcatcttttgtgaaaccaagaaagaagcccaggagctgtcccagaattcagctataaagcaggatgctcagtccttgcatggagacattccacagaagcaaagggaaatcaccctgaaaggttttagaaatggtagttttggagttttggtggcaaccaatgttgctgcacgtgggttagacatccctgaggttgatttggttatacaaagctctccaccaaaggatgtagagtcctacattcatcgatccgggcggacaggcagagctggaaggacgggggtgtgcatctgcttttatcagcacaaggaagaatatcagttagtacaagtggagcaaaaagcgggaattaagttcaaacgaataggtgttccttctgcaacagaaataataaaagcttccagcaaagatgccatcaggcttttggattccgtgcctcccactgccattagtcacttcaaacaatcagctgagaagctgatagaggagaagggagctgtggaagctctggcagcagcactggcccatatttcaggtgccacgtccgtagaccagcgctccttgatcaactcaaatgtgggttttgtgaccatgatcttgcagtgctcaattgaaatgccaaatattagttatgcttggaaagaacttaaagagcagctgggcgaggagattgattccaaagtgaagggaatggtttttctcaaaggaaagctgggtgtttgctttgatgtacctaccgcatcagtaacagaaatacaggagaaatggcatgattcacgacgctggcagctctctgtggccacagagcaaccagaactggaaggaccacgggaaggatatggaggcttcaggggacagcgggaaggcagtcgaggcttcaggggacagcgggacggaaacagaagattcagaggacagcgggaaggcagtagaggcccgagaggacagcgatcaggaggtggcaacaaaagtaacagatcccaaaacaaaggccagaagcggagtttcagtaaagcatttggtcaataattagaaatagaagatttatatagcaaaaagagaatgatgtttggcaatatagaactgaacattatttttcatgcaaagttaaaagcacattgtgcctccttttgaccacttgccaagtccctgtctctttcagacacagacaagcttcatttaaattatttcatctgatcattatcatttataactttattgttacttcttcatcagtttttccttttgaaaggtgtatgaattcattacatttttattctaatgtattatctgtagattagaagataaaatcaagcatgtatctgcctatactttgtgagttcacctgtctttatactcaaaagtgtcccttaatagtgtccttccctgaaataaatacctaagggagtgtaacagtctctggaggaccactttgagcctttggaagttaaggtttcctcagccacctgccgaacagtttctcatgtggtcctattatttgtctactgagacttaatactgagcaatgttttgaaacaagatttcaaactaatctgggttgtaatacagtttataccagtgtatgctctagacttggaagatgtagtatgtttgatgtggattacctatacttatgttcgttttgatacatttttagcttctcattataaggtgattcatgctttagtgaattcttcatagatagtatatataaaagtacattttaatagaaagccagggttttaaggaatttcacatgtataaggtggctccatagctttatttgtaagtaggctggataaatggtgcttaaatggtaatgtactccacttcttcctattggaagattaacattatttaccaagaaggacttaagggagtagggggcgcagattagcattgctcaagagtatgtaaaaaaaaaaaaaaaaaaaaagaaccaaaccactggaaataatcaaatgcaaaaaggtaacaaattcataactggaaagcaaagagaagaacaagtatgatttggatgataaagcattgttttaatggtgaaaacttcacagatcactaatgtttctagaggttaacttcaagtgggcaagctggggtttttaggtagtcagtggcctagttcctaaagccacagtataggatctgttaaactgaatgtctgttgaaagtttgttttagctgcttggaggcttccttttaagacaaactgtatgtgattaagttgttttgagggaactgaagaacctgatgtagcccctggccagataactgcctgatttctcagatattatttctctgggaaacattctacatagcacaggagcttaagagtggcattatcttctcgccttaatttccagagattatttctgtactgagaatcctggaactactatgctaggaaatttaaagctgcatggtctgtcttgttttcatttaattattgtgaatacctagaatctttcttggtcctgatttctcttgcttaatccagtctttatctctaactgccccttatttgatcaccatgtactaggagctctgatagccagctcagctcctaatccttgaggcaacattctttttctatttgaacttcagttctgtccttgaatcccgactagatatttcttgccctctggtctcagaattctcttggcttttattccttgatccacttgccagttttatcactttacccttgttcctcatggcttcccatcaagccatgggtattaggtgacagtgtaatttattagattctggttttgcccaaatactgggcatgctttaataataactgaaccatttcattatttggataggcatgggtaccttatcaagcagattaaaaggatatggtacccgtcctttagaaaagaacagctaaaaccttgttgtggattatggatttagcctaaagaaaaataatctggcataaattaagagtaagagagaagattaatagaaatttcacttcacataacttaaaacatggctatttcaataaaggactaaagtttctcctggatcccagaattcaacctgtatttataaatgtataatgtatttagctactttttggtttaaatgaacttgttgggttagcttggtaaatgttataatttttactattttctacaaagaaaatattttctaatttaagttggagctatctgtgcagcagtttctctacagttgtgcataaatgtttttactataaaatgagctaatgtataaaatactgctgtataccataataaagatagtaatacttgatttta

SEQ ID NO: 7679 - DNA, 299 bp, Homo sapiens
  source 1..299: mol_type = unassigned DNA
ttcctctccacgcggttgagaagaccggtcggcctgggcaacctgcgctgaagatgccgggaaaactccgtagtgacgctggtttggaatcagacaccgcaatgaaaaaaggggagacactgcgaaagcaaaccgaggagaaagagaaaaaagagaagccaaaatctgataagactgaagagatagcagaagaggaagaaactgttttccccaaagctaaacaagttaaaaagaaagcagagccttctgaagttgacatgaattctcctaaatccaaaaagaaaaaaaaaaaaaaaaaa

SEQ ID NO: 7680 - DNA, 2832 bp, Homo sapiens
  source 1..2832: mol_type = unassigned DNA
atctccgcgaccaggaaacgggaaagatggcgacggctccgcgacgttgaggccgcgttgggcggttcagactcagggtgatggcaggagagctggctgacaaaaaggaccgtgatgcatcaccttccaaggaggaaaggaagcgatcacggactcctgacagagagcgggatagagaccgggaccggaagtcttccccatctaaagatagaaagcggcatcgttcaagggatagacgtcgaggaggcagccgttctcgctctcgttcccgttccaaatctgcagaaagagaacgacggcacaaagaacgagaacgagataaggagcgggatcggaataagaaggaccgagatcgagacaaggatgggcacagacgggacaaggaccgtaaacgatccagcttatctcctggtcgaggaaaagactttaaatctcggaaggacagagactctaagaaggatgaagaggatgaacatggtgataagaagcctaaggcccagccattatccctggaggagcttctggccaagaaaaaggctgaggaagaagctgaggctaagcccaagttcctctctaaagcagaacgagaggctgaagctctaaagcgacggcagcaggaggtggaagagcggcagaggatgcttgaagaagagaggaagaaaaggaaacagttccaagacttgggcaggaagatgttggaagatcctcaggaacgggaacgtcgggaacgcagggagaggatggaacgggagaccaatggaaatgaggatgaggaagggcggcagaagatccgggaagagaaggataagagcaaggaactgcatgccattaaggagcgttacctgggtggcatcaaaaagcggcgccgaacgagacatctcaatgaccggaaatttgtttttgagtgggatgcatctgaggacacatccattgactacaaccccctgtacaaagaacggcaccaggtgcagttgttagggcgaggcttcattgcaggcattgacctcaagcagcagaagcgagagcagtcacgtttctatggagacctaatggagaagaggcgaaccctggaagaaaaggagcaggaggaggcaagactccgcaaacttcgtaagaaggaagccaagcagcgctgggatgatcgtcattggtctcagaaaaagttagatgagatgacggacagggactggcggatcttccgtgaggactacagcatcaccaccaaaggtggcaagatccccaatcccatccgatcctggaaagactcttctctgcccccacacatcttggaggtcattgataagtgtggctacaaggaaccaacacctatacagcgtcaggcaattcccattgggctacagaatcgtgacatcattggtgtggctgagactggcagtggcaagacagcagccttcctcatccctctgctggtctggatcaccacacttcccaaaattgacaggatcgaagagtcagaccaaggcccttatgccatcatcctggctcccacccgtgagttggctcaacagattgaggaagagaccatcaagtttgggaaaccgctaggtatccgcactgtggctgtcattggtggcatctccagagaagaccagggcttcaggctgcgcatgggttgtgagattgtgattgctacccctgggcgtttgattgatgtgctggagaaccgctacctggtgctgagccgctgtacctatgtggttctggatgaggcagataggatgattgacatgggctttgagccagatgtccagaagatcctggagcacatgcctgtcagcaaccagaagccagacacggatgaggctgaggaccctgagaagatgctggccaactttgagtcgggaaaacataagtaccgccaaacagtcatgttcacggccaccatgcccccagcggtggagcgtctggccaggagctatcttcggcgacctgctgtggtgtacattggctccgcaggcaagccccatgagcgtgtggaacagaaggtcttcctcatgtcagagtcagaaaagaggaaaaagctgctggcaatcttggagcaaggctttgacccacccatcattatttttgtcaaccagaagaagggctgcgacgtgttggccaaatccctggagaagatggggtacaatgcttgcacactgcacggtggaaaaggccaggagcagcgagagtttgcgttgtccaacctcaaggctggggccaaggatattttggtggctacagatgtggctggtcgtggtattgacatccaagatgtgtctatggttgtcaactatgatatggccaaaaatattgaagattacatccaccgcattggccgcacgggacgagcaggcaagagtggggtggccatcaccttcctcacaaaagaggactctgctgtgttctacgagctgaagcaagctatcctggaaagcccagtgtcttcctgtccccccgaactagccaaccacccagatgcccagcataagccaggcaccatcctcaccaagaagcgccgggaagagaccatctttgcctgacacagcactcttcctgtgggctgagggcatctccaaagctgcctgatgcctgtttttcagaaccctcacatccctctttccaggtcctcactcttgggatatgggggcttaggaaaacaatccaactccctagcccagaccctcaggtcaggaggcctgcgtgtggggctgcaaaaggagaggacgacgctgtcggaggcagggagagcaaattaccacagcttcttggcccagttctgcccttctttgctttgggattgcactgggccatcagctcatgccaggctat

SEQ ID NO: 7681 - DNA, 567 bp, Homo sapiens
  source 1..567: mol_type = unassigned DNA
aaagatggcgacggctccgcgacgttgaggccgcgttgggcggttcagactcagggtgtagagatggggtttcaccgtgttggccaggatggtctcaatctcctgacctcatgatctgcccgctttggcctccaaaagtgctaggattacacgatggcaggagagctggctgacaaaaaggaccgtgatgcatcaccttccaaggaggaaaggaagcgatcacggactcctgacagagagcgggatagagaccgggaccggaagtcttccccatctaaagatagaaagcggcatcgttcaagggatagacgtcgaggaggcagccgttctcgctctcgttcccgttccaaatctgcagaaagagaacgacggcacaaagaacgagaacgagataaggagcgggatcggaataagaaggaccgagatcgagacaaggatgggcacagacgggacaaggaccgtaaacgatccagcttatctcctggtcgaggaaaagactttaaatctcggaaggacagagactctaagaaggatgaagaggatgaacatggtgataagaagcctaag

SEQ ID NO: 7682 - DNA, 696 bp, Homo sapiens
  source 1..696: mol_type = unassigned DNA
aaagatggcgacggctccgcgacgttgaggccgcgttgggcggttcagactcagggtgagatggggtttcaccgtgttggccaggatggtctcaatctcctgacctcatgatctgcccgctttggcctccaaaagtgctaggattacacgatggcaggagagctggctgacaaaaaggaccgtgatgcatcaccttccaaggaggaaaggaagcgatcacggactcctgacagagagcgggatagagaccgggaccggaagtcttccccatctaaagatagaaagcggcatcgttcaagggatagacgtcgaggaggcagccgttctcgctctcgttcccgttccaaatctgcagaaagagaacgacggcacaaagaacgagaacgagataaggagcgggatcggaataagaaggaccgagatcgagacaaggatgggcacagacgggacaaggaccgtaaacgatccagcttatctcctggtcgaggaaaagactttaaatctcggaaggacagagactctaagaaggatgaagaggatgaacatggtgataagaagcctaaggcccagccattatccctggaggagcttctggccaagaaaaaggctgaggaagaagctgaggctaagcccaagttcctctctaaagcagaacgagaggctgaagctctaaagcgacggcagcaggaggtggaa

SEQ ID NO: 7683 - DNA, 2981 bp, Homo sapiens
  source 1..2981: mol_type = unassigned DNA
agcgcgcacgagtacgtgcgtggaggtcccgccccggaactgcagttgctgctgcagctgaggtacagcggcggtttctgaggttcttcactcgcgactgacggagctgcggtggcgtctccacacgcaaccatgaagttgaaggacacaaaatcaaggccaaagcagtcaagctgtggcaaatttcagacaaagggaatcaaagttgtgggaaaatggaaggaagtgaagattgacccaaatatgtttgcagatggacagatggatgacttggtgtgctttgaggaattgacagattaccagttggtctcccctgccaagaatccctccagtctcttctcaaaggaagcacccaagagaaaggcacaagctgtttcagaagaagaggaggaggaggagggaaagtctagctcaccaaagaaaaagatcaagttgaagaaaagtaaaaatgtagcaactgaaggaaccagtacccagaaagaatttgaagtgaaagatcctgagctggaggcccagggagatgacatggtttgtgatgatccggaggctggggagatgacatcagaaaacctggtccaaactgctccaaaaaagaagaaaaataaagggaaaaaagggttggagccttctcagagcactgctgccaaggtgcccaaaaaagcgaagacatggattcctgaagttcatgatcagaaagcagatgtgtcagcttggaaggacctgtttgttcccaggccggttctccgagcactcagctttctaggcttctctgcacccacaccaatccaagccctgaccttggcacctgccatccgtgacaaactggacatccttggggctgctgagacaggaagtgggaaaactcttgcctttgccatcccaatgattcatgcggtgttgcagtggcagaagaggaatgctgcccctcctccaagtaacaccgaagcaccacctggagagaccagaactgaggccggagctgagactagatcaccaggcaaggctgaagctgagtctgatgcattgcctgacgatactgtaattgagagtgaagcactgcccagtgatattgcagccgaggccagagccaagactggaggcactgtctcagaccaggcgttgctctttggtgacgatgatgctggtgaagggccttcttccctgatcagggagaaacctgttcccaaacagaatgagaatgaggaggaaaatcttgataaagagcagactggaaatctaaaacaggagttggatgacaaaagcgccacctgtaaggcatatccaaagcgtcctctgcttggactggttctgactcccactcgagagctggccgtccaggtcaaacagcacattgatgctgtggccaggtttacaggaattaaaactgctattttggttggtggaatgtccacgcagaaacagcagaggatgctgaaccgtcgtcctgagattgtggttgctactccaggccggctgtgggaattaattaaagaaaagcattatcatttgaggaaccttcggcagctcaggtgcctggtagtggatgaggctgaccggatggttgagaaaggccattttgctgagctctcacagctgctagagatgctcaatgactcccaatacaacccaaagagacaaacgcttgttttttctgccacactcaccctggtgcatcaggctcctgctcgaatccttcataagaagcacaccaagaaaatggataaaacagccaaacttgacctccttatgcagaaaattggcatgaggggcaagcccaaggtcattgacctcacaaggaatgaggccacggtggagacgctaacagagaccaagatccattgtgagactgatgagaaagacttctacttgtactacttcctgatgcagtatccaggccgcagcttagtgtttgccaacagtatctcctgcatcaaacgcctctctgggctcctcaaagtccttgatatcatgcccttgaccctgcatgcctgtatgcaccagaagcagaggctcagaaacctggagcagtttgcccgtctggaagactgtgttctcttggcaacagatgtggcagctcggggtctggatattcctaaagtccagcatgtcatccattaccaggtcccacgtacctcggagatttatgtccaccgaagtggtcgaactgctcgagctaccaatgaaggcctcagtctgatgctcattgggcctgaggatgtgatcaactttaagaagatttacaaaacgctcaagaaagatgaggatatcccactgttccccgtgcagacaaaatacatggatgtggtcaaggagcgaatccgtttagctcgacagattgagaaatctgagtatcggaacttccaggcttgcctgcacaactcttggattgagcaggcagcagctgccctggagattgagctggaagaagacatgtataagggaggaaaagctgaccagcaagaagaacgtcggagacaaaagcagatgaaggttctgaagaaggagctgcgccacctgctgtcccagccactgtttacggagagccagaaaaccaagtatcccactcagtctggcaagccgcccctgcttgtgtctgccccaagtaagagcgagtctgctttgagctgtctctccaagcagaagaagaagaagacaaagaagccgaaggagccacagccggaacagccacagccaagtacaagtgcaaattaactggtcaagtgtgtcagtgactgcacattggtttctgttctctggctatttgcaaaacctctcccacccttgtgtttcactccaccaccaaccccaggtaaaaaagtctccctctcttccactcacacccatagcgggagagacctcatgcagatttgcattgttttggagtaagaattcaatgcagcagcttaatttttctgtattgcagtgtttataggcttcttgtgtgttaaacttgatttcataaattaaaaacaatggtcaga

SEQ ID NO: 7684 - DNA, 2738 bp, Homo sapiens
  source 1..2738: mol_type = unassigned DNA
gtacagcggcggtttctgaggttcttcactcgcgactgacggagctgcggtggcgtctccacacgcaaccatgaagttgaaggacacaaaatcaaggccaaagcagtcaagctgtggcaaatttcagacaaagggaatcaaagttgtgggaaaatggaaggaagtgaagattgacccaaatatgtttgcagatggacagatggatgacttggtgtgctttgaggaattgacagattaccagttggtctcccctgccaagaatccctccagtctcttctcaaaggaagcacccaagagaaaggcacaagctgtttcagaagaagaggaggaggaggagggaaagtctagctcaccaaagaaaaagatcaagttgaagaaaagtaaaaatgtagcaactgaaggaaccagtacccagaaagaatttgaagtgaaagatcctgagctggaggcccagggagatgacatggtttgtgatgatccggaggctggggagatgacatcagaaaacctggtccaaactgctccaaaaaagaagaaaaataaagggaaaaaagggttggagccttctcagagcactgctgccatccgtgacaaactggacatccttggggctgctgagacaggaagtgggaaaactcttgcctttgccatcccaatgattcatgcggtgttgcagtggcagaagaggaatgctgcccctcctccaagtaacaccgaagcaccacctggagagaccagaactgaggccggagctgagactagatcaccaggcaaggctgaagctgagtctgatgcattgcctgacgatactgtaattgagagtgaagcactgcccagtgatattgcagccgaggccagagccaagactggaggcactgtctcagaccaggcgttgctctttggtgacgatgatgctggtgaagggccttcttccctgatcagggagaaacctgttcccaaacagaatgagaatgaggaggaaaatcttgataaagagcagactggaaatctaaaacaggagttggatgacaaaagcgccacctgtaaggcatatccaaagcgtcctctgcttggactggttctgactcccactcgagagctggccgtccaggtcaaacagcacattgatgctgtggccaggtttacaggaattaaaactgctattttggttggtggaatgtccacgcagaaacagcagaggatgctgaaccgtcgtcctgagattgtggttgctactccaggccggctgtgggaattaattaaagaaaagcattatcatttgaggaaccttcggcagctcaggtgcctggtagtggatgaggctgaccggatggttgagaaaggccattttgctgagctctcacagctgctagagatgctcaatgactcccaatacaacccaaagagacaaacgcttgttttttctgccacactcaccctggtgcatcaggctcctgctcgaatccttcataagaagcacaccaagaaaatggataaaacagccaaacttgacctccttatgcagaaaattggcatgaggggcaagcccaaggtcattgacctcacaaggaatgaggccacggtggagacgctaacagagaccaagatccattgtgagactgatgagaaagacttctacttgtactacttcctgatgcagtatccaggccgcagcttagtgtttgccaacagtatctcctgcatcaaacgcctctctgggctcctcaaagtccttgatatcatgcccttgaccctgcatgcctgtatgcaccagaagcagaggctcagaaacctggagcagtttgcccgtctggaagactgtgttctcttggcaacagatgtggcagctcggggtctggatattcctaaagtccagcatgtcatccattaccaggtcccacgtacctcggagatttatgtccaccgaagtggtcgaactgctcgagctaccaatgaaggcctcagtctgatgctcattgggcctgaggatgtgatcaactttaagaagatttacaaaacgctcaagaaagatgaggatatcccactgttccccgtgcagacaaaatacatggatgtggtcaaggagcgaatccgtttagctcgacagattgagaaatctgagtatcggaacttccaggcttgcctgcacaactcttggattgagcaggcagcagctgccctggagattgagctggaagaagacatgtataagggaggaaaagctgaccagcaagaagaacgtcggagacaaaagcagatgaaggttctgaagaaggagctgcgccacctgctgtcccagccactgtttacggagagccagaaaaccaagtatcccactcagtctggcaagccgcccctgcttgtgtctgccccaagtaagagcgagtctgctttgagctgtctctccaagcagaagaagaagaagacaaagaagccgaaggagccacagccggaacagccacagccaagtacaagtgcaaattaactggtcaagtgtgtcagtgactgcacattggtttctgttctctggctatttgcaaaacctctcccacccttgtgtttcactccaccaccaaccccaggtaaaaaagtctccctctcttccactcacacccatagcgggagagacctcatgcagatttgcattgttttggagtaagaattcaatgcagcagcttaatttttctgtattgcagtgtttataggcttcttgtgtgttaaacttgatttcataaatt

SEQ ID NO: 7685 - DNA, 2610 bp, Homo sapiens
  source 1..2610: mol_type = unassigned DNA
agttgctgctgcagctgaggtacagcggcggtttctgaggttcttcactcgcgactgacggagctgcggtggcgtctccacacgatggacagatggatgacttggtgtgctttgaggaattgacagattaccagttggtctcccctgccaagaatccctccagtctcttctcaaaggaagcacccaagagaaaggcacaagctgtttcagaagaagaggaggaggaggagggaaagtctagctcaccaaagaaaaagatcaagttgaagaaaagtaaaaatgtagcaactgaaggaaccagtacccagaaagaatttgaagtgaaagatcctgagctggaggcccagggagatgacatggtttgtgatgatccggaggctggggagatgacatcagaaaacctggtccaaactgctccaaaaaagaagaaaaataaagggaaaaaagggttggagccttctcagagcactgctgccaaggtgcccaaaaaagcgaagacatggattcctgaagttcatgatcagaaagcagatgtgtcagcttggaaggacctgtttgttcccaggccggttctccgagcactcagctttctaggcttctctgcacccacaccaatccaagccctgaccttggcacctgccatccgtgacaaactggacatccttggggctgctgagacaggaagtgggaaaactcttgcctttgccatcccaatgattcatgcggtgttgcagtggcagaagaggaatgctgcccctcctccaagtaacaccgaagcaccacctggagagaccagaactgaggccggagctgagactagatcaccaggcaaggctgaagctgagtctgatgcattgcctgacgatactgtaattgagagtgaagcactgcccagtgatattgcagccgaggccagagccaagactggaggcactgtctcagaccaggcgttgctctttggtgacgatgatgctggtgaagggccttcttccctgatcagggagaaacctgttcccaaacagaatgagaatgaggaggaaaatcttgataaagagcagactggaaatctaaaacaggagttggatgacaaaagcgccacctgtaaggcatatccaaagcgtcctctgcttggactggttctgactcccactcgagagctggccgtccaggtcaaacagcacattgatgctgtggccaggtttacaggaattaaaactgctattttggttggtggaatgtccacgcagaaacagcagaggatgctgaaccgtcgtcctgagattgtggttgctactccaggccggctgtgggaattaattaaagaaaagcattatcatttgaggaaccttcggcagctcaggtgcctggtagtggatgaggctgaccggatggttgagaaaggccattttgctgagctctcacagctgctagagatgctcaatgactcccaatacaacccaaagagacaaacgcttgttttttctgccacactcaccctggtgcatcaggctcctgctcgaatccttcataagaagcacaccaagaaaatggataaaacagccaaacttgacctccttatgcagaaaattggcatgaggggcaagcccaaggtcattgacctcacaaggaatgaggccacggtggagacgctaacagagaccaagatccattgtgagactgatgagaaagacttctacttgtactacttcctgatgcagtatccaggccgcagcttagtgtttgccaacagtatctcctgcatcaaacgcctctctgggctcctcaaagtccttgatatcatgcccttgaccctgcatgcctgtatgcaccagaagcagaggctcagaaacctggagcagtttgcccgtctggaagactgtgttctcttggcaacagatgtggcagctcggggtctggatattcctaaagtccagcatgtcatccattaccaggtcccacgtacctcggagatttatgtccaccgaagtggtcgaactgctcgagctaccaatgaaggcctcagtctgatgctcattgggcctgaggatgtgatcaactttaagaagatttacaaaacgctcaagaaagatgaggatatcccactgttccccgtgcagacaaaatacatggatgtggtcaaggagcgaatccgtttagctcgacagattgagaaatctgagtatcggaacttccaggcttgcctgcacaactcttggattgagcaggcagcagctgccctggagattgagctggaagaagacatgtataagggaggaaaagctgaccagcaagaagaacgtcggagacaaaagcagatgaaggttctgaagaaggagctgcgccacctgctgtcccagccacagccaagtacaagtgcaaattaactggtcaagtgtgtcagtgactgcacattggtttctgttctctggctatttgcaaaacctctcccacccttgtgtttcactccaccaccaaccccaggtaaaaaagtctccctctcttccactcacacccatagcgggagagacctcatgcagatttgcattgttttggagtaagaattcaatgcagcagcttaatttttctgtattgcagtgtttataggcttct

SEQ ID NO: 7686 - DNA, 1730 bp, Homo sapiens
  source 1..1730: mol_type = unassigned DNA
aaagagcagactggaaatctaaaacaggagttggatgacaaaagcgccatgtaaggcatatccaaagcgtcctctgcttggactggttctgactcccactcgagagctggccgtccaggtcaaacagcacattgatgctgtggccaggtttacaggaattaaaactgctattttggttggtggaatgtccacgcagaaacagcagaggatgctgaaccgtcgtcctgagattgtggttgctactccaggccggctgtgggaattaattaaagaaaagcattatcatttgaggaaccttcggcagctcaggtgcctggtagtggatgaggctgaccggatggttgagaaaggccattttgctgagctctcacagctgctagagatgctcaatgactcccaatacaacccaaagagacaaacgcttgttttttctgccacactcaccctggtgcatcaggctcctgctcgaatccttcataagaagcacaccaagaaaatggataaaacagccaaacttgacctccttatgcagaaaattggcatgaggggcaagcccaaggtcattgacctcacaaggaatgaggccacggtggagacgctaacagagaccaagatccattgtgagactgatgagaaagacttctacttgtactacttcctgatgcagtatccaggccgcagcttagtgtttgccaacagtatctcctgcatcaaacgcctctctgggctcctcaaagtccttgatatcatgcccttgaccctgcatgcctgtatgcaccagaagcagaggctcagaaacctggagcagtttgcccgtctggaagactgtgttctcttggcaacagatgtggcagctcggggtctggatattcctaaagtccagcatgtcatccattaccaggtcccacgtacctcggagatttatgtccaccgaagtggtcgaactgctcgagctaccaatgaaggcctcagtctgatgctcattgggcctgaggatgtgatcaactttaagaagatttacaaaacgctcaagaaagatgaggatatcccactgttccccgtgcagacaaaatacatggatgtggtcaaggagcgaatccgtttagctcgacagattgagaaatctgagtatcggaacttccaggcttgcctgcacaactcttggattgagcaggcagcagctgccctggagattgagctggaagaagacatgtataagggaggaaaagctgaccagcaagaagaacgtcggagacaaaagcagatgaaggttctgaagaaggagctgcgccacctgctgtcccagccactgtttacggagagccagaaaaccaagtatcccactcagtctggcaagccgcccctgcttgtgtctgccccaagtaagagcgagtctgctttgagctgtctctccaagcagaagaagaagaagacaaagaagccgaaggagccacagccggaacagccacagccaagtacaagtgcaaattaactggtcaagtgtgtcagtgactgcacattggtttctgttctctggctatttgcaaaacctctcccacccttgtgtttcactccaccaccaaccccaggtaaaaaagtctccctctcttccactcacacccatagcgggagagacctcatgcagatttgcattgttttggagtaagaattcaatgcagcagcttaatttttctgtattgcagtgtttataggcttcttgtgtgttaaac

SEQ ID NO: 7687 - DNA, 2592 bp, Homo sapiens
  source 1..2592: mol_type = unassigned DNA
gagtagagagtgaaccttggcttaaaaggaaggaaaataactgtgaagaaaagatgacccaacttgaaataaaacctgaagaccttatctcccacttgagagagagaagaagctgaaagccatcagcttgcactctgggctcacagacagagagggtgaggggttgagcccagatctatgacttcagacccctgtctcggcccctaggcctgatcattcattcaaactctcaataaacacggattaccagaccctgcgcagggaacacatctgggaaaacagctgcaacctcggataccagcacgggacaagctatctcagggcaatgaggaacaactaaagagaatcccaggaaccaggtaaccaatcgccagaagccctccgccctcatggtccattgggtcaaggccccactgccgcctcgtatcgccagcctccagtcctgcctccacgacgcgcccttccccaaggctggccgggtctggatgtcgccatcccctattcggagctacagacctcgcagctgaactcttaaaaagaacctcgcttcttcctcacggtgctccagctccacacaccgtactgagcctcgccagccaccgtacgcgaggtcgcggcgcgtccgtgacgtcactgatgtgcgcttctcccgcactaagggaaacatggctctaacgcggccggtgcggctcttttccctcgtgactcggttgctcctggcgccgcgacggggcctcacggtccgcagtcccgacgaacccctgccggtggtgcgcatcccagtggctctacagcggcagttggaacagcggcagagcaggcggcggaacctcccgaggccggtgctggttcgacccggaccgctgctggtttcggcgcggcggccggagttgaaccagccggcgcgcctcacactgggccgttgggagcgcgcgccgctagcctctcaaggctggaagagtcgacgcgcgcgtcgggaccacttctccatcgagcgcgcgcaacaggaggcgccagcggtgcgaaagctctcgtctaagggcagctttgctgacctgggcctggagccccgtgtgctgcacgcactacaggaggctgcgcctgaagtcgttcagcccacaaccgtgcagtctagcaccatcccctcactacttcgcggccgccatgtcgtttgcgccgcagaaaccggcagtggcaagactctcagctacctcctgccgctgcttcaacggctcttgggccagccaagcctggactcccttcctatccccgcgccccgaggcctggtccttgttccttcccgagaattggcccaacaggtgcgggctgtggcccaacccttgggccgctccttgggcctgctggtgcgggacctggagggaggccacggcatgcgtaggatcaggctgcagctgtccagacagccttcagcagatgtgcttgtggccactccaggggctctgtggaaggccctgaaaagtcgactgatcagtctggagcaactctccttcttggtgttggatgaggcagacacactgctggatgaaagcttcctggaactggtggactacatcttagagaagagccacatagcagaaggcccagctgacttggaagaccccttcaatcccaaagctcagttagtgctggtaggagccacatttcccgaaggtgtaggccagttgctgaataaagtcgccagcccagatgctgtcaccaccatcaccagctccaagctccactgtatcatgcctcatgtgaaacagacatttctgagactgaagggagcagataaggtggccgagctggtgcacatcctcaagcatcgtgacagagcagaaaggactggtccctcaggaactgttctggtgttctgtaatagctccagcactgtgaactggctgggatatattctggatgaccacaaaatccaacacctaaggttgcaggggcaaatgccagccttgatgagggtaggaatcttccagtccttccagaagagctcccgagacatacttctctgcacagacatagcctctcggggcctggacagcactggtgtggagctggttgtcaattatgatttccccccaacgctgcaagattacatccacagagcagggagagtgggccgtgtggggagcgaggtgccaggcaccgtcatcagttttgtgacccatccctgggatgtgagcctggttcagaagattgagctggcggctcgccgaaggagaagtcttccaggactagcatcctcggtgaaagagcctttgccccaagcaacctgattttgacaaatctgattaaaatgtgatgctagaacagggatctttcccagtatcttgagtgggtgaccacacttgtcagtgggaggctctgggctgccctgtcggctccttgagggcgggatgaactgctttgtgacttggaaaggtacgctgctggccagcattggagaagaagctgctgagcatggctttctgtagtctttagcaagacacaagtggattttgactttgtatcatgtcatgatttctaacaataaatgatgtttttatgtgcctcccctaagaataattagcaccggggcgg

SEQ ID NO: 7688 - DNA, 5334 bp, Homo sapiens
  source 1..5334: mol_type = unassigned DNA
ctttccccttactccgctcccctcttttccctccctctcctccccttccctctgttctctcctcctcttcccctcccctcccccgtccggagcactctatattcaagccaccgtttcctgcttcacaaaatggccaccgcacgcgacacctacggtcacgtggcctgccgccctctcagtttcgggaatctgcctagctcccactaaggggaggctacccgcggaagagcgagggcagattagaccggagaaatcccaccacatctccaagcccgggaactgagagaggaagaagagtgaaggccagtgttaggaaaaaaaaaacaaaaacaaaaaaaacgaaaaacgaaagctgagtgcatagagttggaaaggggagcgaatgcgtaaggttggaaaggggggcgaagaggcctaggttaacattttcaggcgtcttagccggtggaaagcgggagacgcaagttctcgcgagatctcgagaactccgaggctgagactagggttttagcggagagcacgggaagtgtagctcgagagaactgggacagcatttcgcaccctaagctccaaggcaggactgctaggggcgacaggactaagtaggaaatcccttgagcttagacctgagggagcgcgcagtagccgggcagaagtcgccgcgacagggaattgcggtgtgagagggagggcacacgttgtacgtgctgacgtagccggctttccagcgggtatattagatccgtggccgcgcggtgcgctccagagccgcagttctcccgtgagagggccttcgcggtggaacaaacactcgcttagcagcggaagactccgagttctcggtactcttcagggatgagtcatgtggcagtggaaaatgcgctcgggctggaccagcagtttgctggcctagacctgaactcttcagataatcagagtggaggaagtacagccagcaaagggcgctatattcctcctcatttaaggaaccgagaagctactaaaggtttctacgataaagacagttcagggtggagttctagcaaagataaggatgcgtatagcagttttggatctcgtagtgattcaagagggaagtctagcttcttcagtgatcgtggaagtggatcaaggggaaggtttgatgatcgtggacggagtgattacgatggcattggcagccgtggtgacagaagtggctttggcaaatttgaacgtggtggaaacagtcgctggtgtgacaaatcagatgaagatgattggtcaaaaccactcccaccaagtgaacgcttggaacaggaactcttttctggaggcaacactgggattaattttgagaaatacgatgacattccagttgaggcaacaggcaacaactgtcctccacatattgaaagtttcagtgatgttgagatgggagaaattatcatgggaaacattgagcttactcgttatactcgcccaactccagtgcaaaagcatgctattcctattatcaaagagaaaagagacttgatggcttgtgcccaaacagggtctggaaaaactgcagcatttctgttgcccatcttgagtcagatttattcagatggtccaggcgaggctttgagggccatgaaggaaaatggaaggtatgggcgccgcaaacaatacccaatctccttggtattagcaccaacgagagagttggcagtacagatctacgaggaagccagaaaattttcataccgatctagagttcgtccttgcgtggtttatggtggtgccgatattggtcagcagattcgagacttggaacgtggatgccatttgttagtagccactccaggacgtctagtggatatgatggaaagaggaaagattggattagacttttgcaaatacttggtgttagatgaagctgatcggatgttggatatggggtttgagcctcagattcgtagaatagtcgaacaagatactatgcctccaaagggtgtccgccacactatgatgtttagtgctacttttcctaaggaaatacagatgctggctcgtgatttcttagatgaatatatcttcttggctgtaggaagagttggctctacctctgaaaacatcacacagaaagtagtttgggtggaagaatcagacaaacggtcatttctgcttgacctcctaaatgcaacaggcaaggattcactgaccttagtgtttgtggagaccaaaaagggtgcagattctctggaggatttcttataccatgaaggatacgcatgtaccagcatccatggagaccgttctcagagggatagagaagaggcccttcaccagttccgctcaggaaaaagcccaattttagtggctacagcagtagcagcaagaggactggacatttcaaatgtgaaacatgttatcaattttgacttgccaagtgatattgaagaatatgtacatcgtattggtcgtacgggacgtgtaggaaaccttggcctggcaacctcattctttaacgagaggaacataaatattactaaggatttgttggatcttcttgttgaagctaaacaagaagtgccgtcttggttagaaaacatggcttatgaacaccactacaagggtagcagtcgtggacgttctaagagtagcagatttagtggagggtttggtgccagagactaccgacaaagtagcggtgccagcagttccagcttcagcagcagccgcgcaagcagcagccgcagtggcggaggtggccacggtagcagcagaggatttggtggaggtggctatggaggcttttacaacagtgatggatatggaggaaattataactcccagggggttgactggtggggtaactgagcctgctttgcagtaggtcaccctgccaaacaagctaatatggaaaccacatgtaacttagccagactataccttgtgtagcttcaagaactcgcagtacattaccagctgtgattctccactgaaattttttttttaagggagctcaaggtcacaagaagaaatgaaaggaacaatcagcagccctgttcagaaggtggtttgaagacttcattgctgtagtttggattaactcccctcccgcctacccccatcccaaactgcatttataattttgtgactgaggatcatttgtttgttaatgtactgtgcctttaactttagacaactttttattttgatgtcctgttggctcagtaatgctcaagatatcaattgttttgacaaaataaatttactgaacttgggctaaaatcaaaccttggcacacaggtgtgatacaacttaacaggaatcatcgattcatccataaataatataaggaaaaacttatgcggtagcctgcattagggctttttgatacttgcagattgggggaaaacaacaaatgtcttgaagcatattaatggaattagtttctaatgtggcaaactgtattaagttaaagttctgatttgctcactctatcctggataggtatttagaacctgatagtctttaagccattccagtcatgatgaggtgatgtatgaatacatgcatacattcaaagcactgttttcaaagttaatgcaagtaaatacagcaattcctctttcaacgtttaggcagatcattaattatgagctagccaaatgtgggcatactattacagggaaagtttaaaggtctgataacttgaaataggtttttaggagaattcatctacttagactttttaaatgcctgccataaatgaaattgaaatggtagaatggctgaccacagcaatgaccagccctcattagggccctggatgatttttggtctaataacgcatgctagtgttgatgttttttggtcaagagggtatgaacaggaagaattaaatgcagcaggctttattttaaatgccgattcacattactctgttcaagctgcgttgagatgttaaactggcttactatagacttcgtaaaaatggctccagaagagtaacaaactgaaatctttgagatcacacaggttggaaatatgtacataactgcacaaggtgtcaattctgctctacagtgcagttttagtcagttttagttgcataggtttccattgtatttatagtctgtttatgctaaatctggccaaagatgagcattgtccaccactaaaatgcctctgccactttgaattctgtgctaattttgtggccagaatgcggtgatcaaaacgctccatctttttacagtggcataggaagacggcaaaaatttcctaaagtgcaatagattttcaagtgtattgtgccttgttctaaaacttttattaagtaggtgcacttgacagtattgaggtcatttgttatggtgctatttcaattagtctaggtttaggcccttgtacattttgcccataactttttacaaagtacttcttttattgcacattcagagaattttatatatatgtcttgtgtgcgtgtccttaaacttccaatcttactttgtctcttggagattgttgaacgcagcttgtctaggaaggggatgggactagattctaaaatttatttgggaccatgggaatgatagttgggaagaaaactatttgcacacgacagatttctagatactttttgctgctagttttatgtaatatttattgaacattttgacaaatatttatttttgtaagcctaaaagtgattctttgaaagtttaaagaaacttgaccaaaagacagtacaaaaacactggcacttgaatgttgaatgtcaccgtatgcgtgaaattatatatttcggggtagtgtgagcttttaatgtttaagtcatattaaactcttaagtcaaattaagcagacccggcgttggcagtgtagccataactttctgatgttagtaaaaacaaaattggcgacttgaaattaaatcatgccaaggttttgatacacttgtcttaagatattaatgaaacacttcaaaacactgatgtgaagtgtccagattctcagatgtttgttgtgtggattttgtttagttgtgtgtttttttttttttttcagtgaatgtctggcacattgcaatcctcaaacatgtggttatctttgttgtattggcataatcagtgacttgtacattcagcaatagcatttgagcaagttttatcagcaagcaatattttcagttaataaggtttcaaaaatcatgtaaggatttaaacttgctgaatgtaaagattgaacctcaagtcactgtagctttagtaattgcttattgtattagtttagatgctagcactgcatgtgctgtgcatattctgattttattaaaataaaaagttgaactgcacagtc

SEQ ID NO: 7689 - DNA, 1051 bp, Homo sapiens
  source 1..1051: mol_type = unassigned DNA
agagccgcagttctcccgtgagagggccttcgcggtggaacaaacactcgcttagcagcggaagactccgagttctcggtactcttcagggatgagtcatgtggcagtggaaaatgcgctcgggctggaccagcagtttgctggcctagacctgaactcttcagataatcagagtggaggaagtacagccagcaaagggcgctatattcctcctcatttaaggaaccgagaagctactaaaggtttctacgataaagacagttcagggtggagttctagcaaagataaggatgcgtatagcagttttggatctcgtagtgattcaagagggaagtctagcttcttcagtgatcgtggaagtggatcaaggggaaggtttgatgatcgtggacggagtgattacgatggcattggcagccgtggtgacagaagtggctatggaggcttttacaacagtgatggatatggaggaaattataactcccagggggttgactggtggggtaactgagcctgctttgcagtaggtcaccctgccaaacaagctaatatggaaaccacatgtaacttagccagactataccttgtgtagcttcaagaactcgcagtacattaccagctgtgattctccactgaaattttttttttaagggagctcaaggtcacaagaagaaatgaaaggaacaatcagcagccctgttcagaaggtggtttgaagacttcattgctgtagtttggattaactcccctcccgcctacccccatcccaaactgcatttataattttgtgactgaggatcatttgtttgttaatgtactgtgcctttaactttagacaactttttattttgatgtcctgttggctcagtaatgctcaagatatcaattgttttgacaaaataaatttactgaacttgggctaaaatcaaaccttggcacacaggtgtgatacaacttaacaggaatcatcgattcatccataaataatataaggaaaaacttatgcggtagcctgcattagggctttttgatacttgcagattgggggaaa

SEQ ID NO: 7690 - DNA, 2349 bp, Homo sapiens
  source 1..2349: mol_type = unassigned DNA
agagccgcagttctcccgtgagagggccttcgcggtggaacaaacactcgcttagcagcggaagactccgagttctcggtactcttcagggatgagtcatgtggcagtggaaaatgcgctcgggctggaccagcagtttgctggcctagacctgaactcttcagataatcagagtggaggaagtacagccagcagtttctacgataaagacagttcagggtggagttctagcaaagataaggatgcgtatagcagttttggatctcgtagtgattcaagagggaagtctagcttcttcagtgatcgtggaagtggatcaaggggaaggtttgatgatcgtggacggagtgattacgatggcattggcagccgtggtgacagaagtggctttggcaaatttgaacgtggtggaaacagtcgctggtgtgacaaatcagatgaagatgattggtcaaaaccactcccaccaagtgaacgcttggaacaggaactcttttctggaggcaacactgggattaattttgagaaatacgatgacattccagttgaggcaacaggcaacaactgtcctccacatattgaaagtttcagtgatgttgagatgggagaaattatcatgggaaacattgagcttactcgttatactcgcccaactccagtgcaaaagcatgctattcctattatcaaagagaaaagagacttgatggcttgtgcccaaacagggtctggaaaaactgcagcatttctgttgcccatcttgagtcagatttattcagatggtccaggcgaggctttgagggccatgaaggaaaatggaaggtatgggcgccgcaaacaatacccaatctccttggtattagcaccaacgagagagttggcagtacagatctacgaggaagccagaaaattttcataccgatctagagttcgtccttgcgtggtttatggtggtgccgatattggtcagcagattcgagacttggaacgtggatgccatttgttagtagccactccaggacgtctagtggatatgatggaaagaggaaagattggattagacttttgcaaatacttggtgttagatgaagctgatcggatgttggatatggggtttgagcctcagattcgtagaatagtcgaacaagatactatgcctccaaagggtgtccgccacactatgatgtttagtgctacttttcctaaggaaatacagatgctggctcgtgatttcttagatgaatatatcttcttggctgtaggaagagttggctctacctctgaaaacatcacacagaaagtagtttgggtggaagaatcagacaaacggtcatttctgcttgacctcctaaatgcaacaggcaaggattcactgaccttagtgtttgtggagaccaaaaagggtgcagattctctggaggatttcttataccatgaaggatacgcatgtaccagcatccatggagaccgttctcagagggatagagaagaggcccttcaccagttccgctcaggaaaaagcccaattttagtggctacagcagtagcagcaagaggactggacatttcaaatgtgaaacatgttatcaattttgacttgccaagtgatattgaagaatatgtacatcgtattggtcgtacgggacgtgtaggaaaccttggcctggcaacctcattctttaacgagaggaacataaatattactaaggatttgttggatcttcttgttgaagctaaacaagaagtgccgtcttggttagaaaacatggcttatgaacaccactacaagggtagcagtcgtggacgttctaagagtagcagatttagtggagggtttggtgccagagactaccgacaaagtagcggtgccagcagttccagcttcagcagcagccgcgcaagcagcagccgcagtggcggaggtggccacggtagcagcagaggatttggtggaggtggctatggaggcttttacaacagtgatggatatggaggaaattataactcccagggggttgactggtggggtaactgagcctgctttgcagtaggtcaccctgccaaacaagctaatatggaaaccacatgtaacttagccagactataccttgtgtagcttcaagaactcgcagtacattaccagctgtgattctccactgaaattttttttttaagggagctcaaggtcacaagaagaaatgaaaggaacaatcagcagccctgttcagaaggtggtttgaagacttcattgctgtagtttggattaactcccctcccgcctacccccatcccaaactgcatttataattttgtgactgaggatcatttgtttgttaatgtactgtgccttta

SEQ ID NO: 7691 - DNA, 1592 bp, Homo sapiens
  source 1..1592: mol_type = unassigned DNA
gcatgcgcgaatcccgactgattagtgacctgggggggtttgcgggagtgcgcagcgcggcgggacgcgactggaggcccttttggcttggagggcttcggccttcacggctggcgcagcctggattcccgtccggaggacctggcggcacccggtgtttgcgtgcctgcgagcaagggtttgctggcctagacctgaactcttcagataatcagagtggaggaagtacagccagcaaagggcgctatattcctcctcatttaaggaaccgagaagctactaaaggtttctacgataaagacagttcagggtggagttctagcaaagataaggatgcgtatagcagttttggatctcgtagtgattcaagagggaagtctagcttcttcagtgatcgtggaagtggatcaaggggaaggtttgatgatcgtggacggagtgattacgatggcattggcagccgtggtgacagaagtggctttggcaaatttgaacgtggtggaaacagtcgctggtgtgacaaatcagatgaagatgattggtcaaaaccactcccaccaagtgaacgcttggaacaggaactcttttctggaggcaacactgggattaattttgagaaatacgatgacattccagttgaggcaacaggcaacaactgtcctccacatattgaaagtttcagtgatgttgagatgggagaaattatcatgggaaacattgagcttactcgttatactcgcccaactccagtgcaaaagcatgctattcctattatcaaagagaaaagagacttgatggcttgtgcccaaacaggaaaatggaaggtatgggcgccgcaaacaatacccaatctccttggtattagcaccaacgagagagttggcagtacagatctacgaggaagccagaaaattttcataccgatctagagttcgtccttgcgtggtttatggtggtgccgatattggtcagcagattcgagacttggaacgtggatgccatttgttagtagccactccaggacgtctagtggatatgatggaaagaggaaagattggattagacttttgcaaatacttggtgttagatgaagctgatcggatgttggatatggggtttgagcctcagattcgtagaatagtcgaacaagatactatgcctccaaagggtgtccgccacactatgatgtttagtgctacttttcctaaggaaatacagatgctggctcgtgatttcttagatgaatatatcttcttggctgtaggaagagttggctctacctctgaaaacatcacacagaaagtagtttgggtggaagaatcagacaaacggtcatttctgcttgacctcctaaatgcaacaggcaaggattcactgaccttagtgtttgtggagaccaaaaagggtgcagattctctggaggatttcttataccatgaaggatacgcatgtaccagcatccatggagaccgttctcagagggatagagaagaggcccttcaccagttccgctcaggaaaaagcccaattttagtggctacagcagtagcagcaagaggactggacatttcaaatgtgaaacatgttatcaa

SEQ ID NO: 7692 - DNA, 4445 bp, Homo sapiens
  source 1..4445: mol_type = unassigned DNA
gcgtaggctaaccagtgcgcttaatagctgtaggtccagtgtaagagttccgctattcggtctcacacctacagtggactacccgatttttcgcttctcttcagggatgagtcatgtggtggtgaaaaatgaccctgaactggaccagcagcttgctaatctggacctgaactctgaaaaacagagtggaggagcaagtacagcgagcaaagggcgctatatacctcctcacttaaggaacagagaagcatctaaaggattccatgataaagacagttcaggttggagttgcagcaaagataaggatgcatatagcagttttgggtctcgagattctagaggaaagcctggttatttcagtgaacgtggaagtggatcaaggggaagatttgatgatcgtggacggagtgactatgatggtattggcaatcgtgaaagacctggctttggcagatttgaacggagtggacatagtcgttggtgtgacaagtcagttgaagatgattggtcaaaaccacttccaccaagtgaacgcttggagcaagaactgttttctggaggaaacacggggattaactttgagaaatatgatgatataccagtagaggcaaccggcagtaactgtcctccacatattgagaattttagcgatattgacatgggagaaattatcatggggaacattgaacttactcgctatactcgtcctactccagtgcaaaaacatgccattcctattattaagggaaaaagagacttaatggcttgtgcccaaacaggatctgggaaaactgcagcatttcttttacccatactgagtcagatatatacagatggtccaggagaagctttgaaggctgtgaaggaaaatggaaggtatgggcgccgcaaacaatatccaatatccttggttttagccccaacaagagaattggctgtacagatctatgaggaagccagaaaattttcctaccgatctagagttcgtccttgtgtagtttatggtggtgctgatattggtcagcagattcgggacttagaacgtggatgccacttgttagtagccactccaggacgtctagtggatatgatggaaagaggaaagattggattagacttctgcaagtacttagtgttggatgaagctgataggatgctggatatgggatttgaacctcagatacgtcgtatagttgaacaagatactatgccaccaaagggcgttcgtcacaccatgatgtttagtgctacttttcctaaggaaatacagatgcttgctcgtgactttttggatgaatatatctttttggctgtaggcagagtaggctctacctctgagaacatcacacagaaagtagtttgggtggaagacttagataaacggtcatttctactggacattttaggtgcaacagggagtgattcacttactttagtgtttgtggagaccaaaaagggagcagattccctggaggatttcttataccatgaaggatatgcttgtactagtattcatggagaccggtcacagagagatcgagaggaggcccttcaccagtttcgctcaggaaaaagcccaattctagtggctacagctgtggcagcacgaggactagacatttcaaatgtgagacatgttatcaattttgatttgccaagtgatattgaagaatatgtgcatcgtattggccgtacaggacgtgtaggaaacctgggccttgccacctcattctttaatgaaaaaaatatgaatattacaaaggatttgttggatcttcttgtagaagctaaacaagaagtgccttcttggttggaaaatatggcttatgaacaccactacaagggtggcagtcgtggacgatctaaaagtaatagattcagtggaggatttggtgccagagactatcgacaaagtagtggttccagcagttctggctttggtgctagtcgcggaagcagcagccgcagtggtggaggtggttacggcaacagcagaggatttggtggaggtggctatggaggcttctacaatagtgatggatatggaggaaattataactcccagggggttgactggtggggcaactgaatctgctttgcagcaaagtcacccttacaaagaagctaatatggaaaccacatgtaacttagccagactatattgtgtagcttcaagaacttgcagtacattaccagctgtgattctcctgataattcaagggagctcaaagtcacaagaagaaaaatgaaaggaaaaaacagcagccctattcagaaattggtttgaagatgtaattgctctagtttggattaaactcttcccctcctgctttagtgccaccccaaactgcatttataattttgtgactgaggatcgtttgtttgttaacgtactgtgactttaactttagacaacttactactttgatgtcctgttggctcagtaatgctcacgataccaattgttttgacaaaataaatttactaaacttggcctaaaatcaaaccttggcacagaggtatgatacaactttaacaggagtcatcaattcatccataaatataaaaagggaaaaaaacttaaggcagtagtctgcattaggactgtttgagttttgcagacttggggttgggagaacatcttaaagcattaaagcatagttttttgtatggccaaccttactaaattaagttctgacttgctcactctatcctggataggcacttgggaacttacactctttaagccattccagtcatgatgaggtggaatgtatcagtataccaattaatatttttgaaagagctcttttaggttaatttaagtacagcaatttctcatgtaatgtttagggagtttattctaacctaggcaaacggcatgctatcacaagaaaggtttaaagctttgataaaatgggggagatttaatcagtttttttaatgcctgctataaaaatttgaaatattagaatggccgaccatggcagtgaccaggcctcactacaggcctggttggattctggtctttaatgcatgctagtgttgatgttttttggtcaagaacggtttaaacaggaaggattgtgcagcaggctttaatttaatgtagattcatactgctctgttaaagctgcattgaaatgttaaaatggcttacacttgcagactttgcaaatcttaagactaacaaatccttgaaatcacacagcttgcaaatacgtactaaactgcacaaggtgtgtgttctatatgtgcagttttagcgtattttagttgcataggtttccatggtatttatagtctcttgtgctaaatttggccaaagatgattgtccaccactaaaaatgcctctcccacttggaattctgtactgattttgtggccagatgcaatgatctttaaaaacaaatcttttcaatggcataagaagttgacaaaaatttcttaaagtgcaatagattttcaagtgtattgtgccttgttctaaaacttttaagtaggtgcacttgacagtattgaggtcatttgttaaggtgctatttcaattagtgtaggtttagactcttgtacatttctcccataactttttacaaagtattttgttgcacattcagagaattttatatatatatgtcttgtgtgggtgtcctcgaccttccaatcttatttcgtctcttggagattgttgaatgcagccagtgaagaagtagattcctaaattttattggggaccatggaatggtagttgagaagaaaactatttgcacacaacagattttagatactttttgctgctagttgtgtaatatttattgaacattttgacaaatatttatttttgtaagcctaaaaatgattctttgaaagtttaaagaaacttgaccaaaagacagtacaaaaaacactggcacttgaatgttgaatgtcaccgtatgtgaaataatatattttggggtagtgtgagcttttaatgttaagtctgttaaacttgagtcaaattaagcagacccggcattggcaatgtagctgtaattttctgacaaaatttaagacaaaattgtcaacttgaaactaaaacatgccaaggttttgatatacttgtcttaagatattaatgaaacacttctgaacactgataggaagtgtccacatccacaaagtttctcttgagttttgttatgtgttttgttgtgtttgattttcagtgattgtctggtatatttacagtcctcaaacatggttatttctgtcagtgacttaacattcggttttatcagccagcagtattcttcagtaaataaagaatggaattgctgaatgtaatcattgaacctcgagtcactgtaaaagttcagtaattgcttattgtattagttttagatgctggcactgcatgtgctctgtttattctgattttactaaaataaaaagttcaaaagtc

SEQ ID NO: 7693 - DNA, 2709 bp, Homo sapiens
  source 1..2709: mol_type = unassigned DNA
agaggggtctggagttcctaggtgaaccccagcagcctaaccctgtcaagtctgtcgagcctctggctggtcacacgtgctgcggaatccactcagctttcctcaggtgcagtcaggtccatcctgcagagggaccttctgcggacctgttctttcacctccctaacctgaagattgtattcaaaccaccgtggatcgctcacgtaaaatggtcactgcgcctaacacctgggatcccgtaacccttatctatcttggcttcagagagttttttgactagttccaactttgctgaagcttgtcaaagggatgagtcatgtggtggtgaaaaatgaccctgaactggaccagcagcttgctaatctggacctgaactctgaaaaacagagtggaggagcaagtacagcgagcaaagggcgctatatacctcctcacttaaggaacagagaagcatctaaaggattccatgataaagacagttcaggttggagttgcagcaaagataaggatgcatatagcagttttgggtctcgagattctagaggaaagcctggttatttcagtgaacgtggaagtggatcaaggggaagatttgatgatcgtggacggagtgactatgatggtattggcaatcgtgaaagacctggctttggcagatttgaacggagtggacatagtcgttggtgtgacaagtcagttgaagatgattggtcaaaaccacttccaccaagtgaacgcttggagcaagaactgttttctggaggaaacacggggattaactttgagaaatatgatgatataccagtagaggcaaccggcagtaactgtcctccacatattgagaattttagcgatattgacatgggagaaattatcatggggaacattgaacttactcgctatactcgtcctactccagtgcaaaaacatgccattcctattattaagggaaaaagagacttaatggcttgtgcccaaacaggatctgggaaaactgcagcatttcttttacccatactgagtcagatatatacagatggtccaggagaagctttgaaggctgtgaaggaaaatggaaggtatgggcgccgcaaacaatatccaatatccttggttttagccccaacaagagaattggctgtacagatctatgaggaagccagaaaattttcctaccgatctagagttcgtccttgtgtagtttatggtggtgctgatattggtcagcagattcgggacttagaacgtggatgccacttgttagtagccactccaggacgtctagtggatatgatggaaagaggaaagattggattagacttctgcaagtacttagtgttggatgaagctgataggatgctggatatgggatttgaacctcagatacgtcgtatagttgaacaagatactatgccaccaaagggcgttcgtcacaccatgatgtttagtgctacttttcctaaggaaatacagatgcttgctcgtgactttttggatgaatatatctttttggctgtaggcagagtaggctctacctctgagaacatcacacagaaagtagtttgggtggaagacttagataaacggtcatttctactggacattttaggtgcaacagggagtgattcacttactttagtgtttgtggagaccaaaaagggagcagattccctggaggatttcttataccatgaaggatatgcttgtactagtattcatggagaccggtcacagagagatcgagaggaggcccttcaccagtttcgctcaggaaaaagcccaattctagtggctacagctgtggcagcacgaggactagacatttcaaatgtgagacatgttatcaattttgatttgccaagtgatattgaagaatatgtgcatcgtattggccgtacaggacgtgtaggaaacctgggccttgccacctcattctttaatgaaaaaaatatgaatattacaaaggatttgttggatcttcttgtagaagctaaacaagaagtgccttcttggttggaaaatatggcttatgaacaccactacaagggtggcagtcgtggacgatctaaaagtaatagattcagtggaggatttggtgccagagactatcgacaaagtagtggttccagcagttctggctttggtgctagtcgcggaagcagcagccgcagtggtggaggtggttacggcaacagcagaggatttggtggaggtggctatggaggcttctacaatagtgatggatatggaggaaattataactcccagggggttgactggtggggcaactgaatctgctttgcagcaaagtcacccttacaaagaagctaatatggaaaccacatgtaacttagccagactatattgtgtagcttcaagaacttgcagtacattaccagctgtgattctcctgataattcaagggagctcaaagtcacaagaagaaaaatgaaaggaaaaaacagcagccctattcagaaattggtttgaagatgtaattgctctagtttggattaaactcttcccctcctgctttagtgccaccccaaactgcatttataattttgtgactgaggatcgtttgtttgttaacgtactgtgactttaactttagacaacttactactttgatgtcctgttggctcagtaatgctcacgataccaattgttttgacaaaataaatttactaaacttggcctaaaatcaaa

SEQ ID NO: 7694 - DNA, 792 bp, Homo sapiens
  source 1..792: mol_type = unassigned DNA
gaaggatggctgccgcgtgcttctcttgaccctgtagaaataatggaaattggacgcccgcggaaagacacctggaagcttgctaatctggacctgaactctgaaaaacagagtggaggagcaagtacagcgagcaaagggcgctatatacctcctcacttaaggaacagagaagcatctaaaggattccatgataaagacagttcaggttggagttgcagcaaagataaggatgcatatagcagttttgggtctcgagattctagaggaaagcctggttatttcagtgaacgtggaagtggatcaaggggaagatttgatgatcgtggacggagtgactatgatggtattggcaatcgtgaaagacctggctttggcagatttgaacggagtggacatagtcgttggtgtgacaagtcagttgaagatgattggtcaaaaccacttccaccaagtgaacgcttggagcaagaactgttttctggaggaaacacggggattaactttgagaaatatgatgatataccagtagaggcaaccggcagtaactgtcctccacatattgagaattttagcgatattgacatgggagaaattatcatggggaacattgaacttactcgctatactcgtcctactccagtgcaaaaacatgccattcctattattaagggaaaaagagacttaatggcttgtgcccaaacaggatctgggaaaactgcagcatttcttttacccatactgagtcagatatatacagatggtccaggagaagctttgaaggctgtgaag

SEQ ID NO: 7695 - DNA, 1049 bp, Homo sapiens
  source 1..1049: mol_type = unassigned DNA
ggagttcctaggtgaaccccagcagcctaaccctgtcaagtctgtcgagcctctggctggtcacacgtgctgcggaatccactcagctttcctcaggtgcagtcaggtccatcctgcagagggaccttctgcggacctgttctttcacctccctaacctgaagattgtattcaaaccaccgtggatcgctcacgtaaaatggtcactgcgcctaacacctgggatcccgtaacccttatctatcttggcttcagagagttttttgactagttccaactttgctgaagcttgtcaaagctgtaggtccagtgtaagagttccgctattcggtctcacacctacagtggactacccgatttttcgcttctcttcagggatgagtcatgtggtggtgaaaaatgaccctgaactggaccagcagcttgctaatctggacctgaactctgaaaaacagagtggaggagcaagtacagcgagcaaagggcgctatatacctcctcacttaaggaacagagaagcatctaaaggattccatgataaagacagttcaggttggagttgcagcaaagataaggatgcatatagcagttttgggtctcgagattctagaggaaagcctggttatttcagtgaacgtggaagtggatcaaggggaagatttgatgatcgtggacggagtgactatgatggtattggcaatcgtgaaagacctggctttggcagatttgaacggagtggacatagtcgttggtgtgacaagtcagttgaagatgattggtcaaaaccacttccaccaagtgaacgcttggagcaagaactgttttctggaggaaacacggggattaactttgagaaatatgatgatataccagtagaggcaaccggcagtaactgtcctccacatattgagaattttagcgatattgacatgggagaaattatcatggggaacattgaacttactcgctatactcgtcctactccagtgcaaaaacatgccattcctattattaagggaaaaagagacttaatggcttgtgcccaaacag

SEQ ID NO: 7696 - DNA, 2330 bp, Homo sapiens
  source 1..2330: mol_type = unassigned DNA
gaaggaccggaaagggatggtggggagggtagggaaggatggctgccgcgtgcttctcttgaccctgtagaaataatggaaattggacgcccgcggaaagacacctggaagcttgctaatctggacctgaactctgaaaaacagagtggaggagcaagtacagcgagcaaagggcgctatatacctcctcacttaaggaacagagaagcatctaaaggattccatgataaagacagttcaggttggagttgcagcaaagataaggatgcatatagcagttttgggtctcgagattctagaggaaagcctggttatttcagtgaacgtggaagtggatcaaggggaagatttgatgatcgtggacggagtgactatgatggtattggcaatcgtgaaagacctggctttggcagatttgaacggagtggacatagtcgttggtgtgacaagtcagttgaagatgattggtcaaaaccacttccaccaagtgaacgcttggagcaagaactgttttctggaggaaacacggggattaactttgagaaatatgatgatataccagtagaggcaaccggcagtaactgtcctccacatattgagaattttagcgatattgacatgggagaaattatcatggggaacattgaacttactcgctatactcgtcctactccagtgcaaaaacatgccattcctattattaagggaaaaagagacttaatggcttgtgcccaaacaggatctgggaaaactgcagcatttcttttacccatactgagtcagatatatacagatggtccaggagaagctttgaaggctgtgaaggaaaatggaaggtatgggcgccgcaaacaatatccaatatccttggttttagccccaacaagagaattggctgtacagatctatgaggaagccagaaaattttcctaccgatctagagttcgtccttgtgtagtttatggtggtgctgatattggtcagcagattcgggacttagaacgtggatgccacttgttagtagccactccaggacgtctagtggatatgatggaaagaggaaagattggattagacttctgcaagtacttagtgttggatgaagctgataggatgctggatatgggatttgaacctcagatacgtcgtatagttgaacaagatactatgccaccaaagggcgttcgtcacaccatgatgtttagtgctacttttcctaaggaaatacagatgcttgctcgtgactttttggatgaatatatctttttggctgtaggcagagtaggctctacctctgagaacatcacacagaaagtagtttgggtggaagacttagataaacggtcatttctactggacattttaggtgcaacagggagtgattcacttactttagtgtttgtggagaccaaaaagggagcagattccctggaggatttcttataccatgaaggatatgcttgtactagtattcatggagaccggtcacagagagatcgagaggaggcccttcaccagtttcgctcaggaaaaagcccaattctagtggctacagctgtggcagcacgaggactagacatttcaaatgtgagacatgttatcaattttgatttgccaagtgatattgaagaatatgtgcatcgtattggccgtacaggacgtgtaggaaacctgggccttgccacctcattctttaatgaaaaaaatatgaatattacaaaggatttgttggatcttcttgtagaagctaaacaagaagtgccttcttggttggaaaatatggcttatgaacaccactacaagggtggcagtcgtggacgatctaaaagtaatagattcagtggaggatttggtgccagagactatcgacaaagtagtggttccagcagttctggctttggtgctagtcgcggaagcagcagccgcagtggtggaggtggttacggcaacagcagaggatttggtggaggtggctatggaggcttctacaatagtgatggatatggaggaaattataactcccagggggttgactggtggggcaactgaatctgctttgcagcaaagtcacccttacaaagaagctaatatggaaaccacatgtaacttagccagactatattgtgtagcttcaagaacttgcagtacattaccagctgtgattctcctgataattcaagggagctcaaagtcacaagaagaaaaatgaaaggaaaaaacagcagccctattcagaaattggtttgaagatgtaattgctctagtttggattaaactcttcccctcctgctttagtgccaccccaaactgcatttataattttgtgactg

SEQ ID NO: 7697 - DNA, 1529 bp, Homo sapiens
  source 1..1529: mol_type = unassigned DNA
agttatggcagagaacgatgtggacaatgagctcttggactatgaagatgatgaggtggagacagcagctgggggagatggggctgaggcccctgccaagaaggatgtcaagggctcctatgtctccatccacagctctggctttcgtgacttcctgctcaagccagagttgctccgggccattgtcgactgtggctttgagcatccgtcagaagtccagcatgagtgcatccctcaggccattctgggaatggatgtcctgtgccaggccaagtcgggcatgggaaagacagcagtgtttgtcttggccacactgcaacagctggagccagttactgggcaggtgtctgtactggtgatgtgtcacactcgggagttggcttttcagatcagcaaggaatatgagcgcttctctaaatacatgcccaatgtcaaggttgctgttttttttggtggtctgtctatcaagaaggatgaagaggtgctgaagaagaactgcccgcatatcgtcgtggggactccaggccgtatcctagccctggctcgaaataagagcctcaacctcaaacacattaaacactttattttggatgaatgtgataagatgcttgaacagctcgacatgcgtcgggatgtccaggaaatttttcgcatgaccccccacgagaagcaggtcatgatgttcagtgctaccttgagcaaagagatccgtccagtctgccgcaagttcatgcaagatccaatggagatcttcgtggatgatgagacgaagttgacgctgcatgggttgcagcagtactacgtgaaactgaaggacaacgagaagaaccggaagctctttgaccttctggatgtccttgagttcaaccaggtggtgatctttgtgaagtctgtgcagcggtgcattgccttggcccagctactagtggagcagaacttcccagccattgccatccaccgtgggatgccccaggaggagaggctttctcggtatcagcagtttaaagattttcaacgacgaattcttgtggctaccaacctatttggccgaggcatggacatcgagcgggtgaacattgcttttaattatgacatgcctgaggattctgacacctacctgcatcggtgctaccctctgtctccctccaggtggccagagcaggccggtttggcaccaagggcttggctatcacatttgtgtccgatgagaatgatgccaagatcctcaatgatgtgcaggatcgctttgaggtcaatattagtgagctgcctgatgagatagacatctcctcctacattgaacagacacggtagaagactcgcccattttggaatgtgaccgtctgtccttcaggagaggacaccagggtgggggtgaaggagacactactgcccccacccctgacagcccccaccccatggcttccatcttttgcatcaccaccactcctgaacccccatttctgatttgtcagaatttttttttaacaaaactaaaaatgaaacacatgtgtctgtggtatctataa

SEQ ID NO: 7698 - DNA, 2039 bp, Homo sapiens
  source 1..2039: mol_type = unassigned DNA
cagcatcggccataacaacagaaatggccagtcagtcccaaggtatccagcagcttctgcaagctgagaagcgggcagctgagaaggtggcagatgccagaaagaggaaggcccggcgactgaagcaggcaaaggaggaggcacagatggaggtggagcaataccgcagagagcgagagcacgaattccagagcaagcagcaggcgacaggcattttccaaaggcaagcctggagcgcacggatctgtataaccgcggaaggccctgtttccggtcccttgcgcctgcgctcttgcagccaagaaggcgggaggctggagtagagggaagcctgcaaccggaagtgaaggcagatttccctccttcgtcgctgttgctgccgccatacgcgctctccctgtttagctcttctgttagaaatagtatctttgttttcctttgctgttcctcaatcccctactcttcaccccttgttttcacctattttgcgagaacccatccagatcccccttcccttcttcccctgccggcccagttatggcagagaacgatgtggacaatgagctcttggactatgaagatgatgaggtggagacagcagctgggggagatggggctgaggcccctgccaagaaggatgtcaagggctcctatgtctccatccacagctctggctttcgtgacttcctgctcaagccagagttgctccgggccattgtcgactgtggctttgagcatccgtcagaagtccagcatgagtgcatccctcaggccattctgggaatggatgtcctgtgccaggccaagtcgggcatgggaaagacagcagtgtttgtcttggccacactgcaacagctggagccagttactgggcaggtgtctgtgctggtgatgtgtcacactcgggagttggcttttcagatcagcaaggaatatgagcgcttctctaaatacatgcccaatgtcaaggttgctgttttttttggtggtctgtctatcaagaaggatgaagaggtgctgaagaagaactgcccgcatatcgtcgtggggactccaggccgtatcctagccctggctcgaaataagagcctcaacctcaaacacattaaacactttattttggatgaatgtgataagatgcttgaacagctcgacatgcgtcgggatgtccaggaaatttttcgcatgaccccccacgagaagcaggtcatgatgttcagtgctaccttgagcaaagagatccgtccagtctgccgcaagttcatgcaagatccaatggagatcttcgtggatgatgagacgaagttgacgctgcatgggttgcagcagtactacgtgaaactgaaggacaacgagaagaaccggaagctctttgaccttctggatgtccttgagttcaaccaggtggtgatctttgtgaagtctgtgcagcggtgcattgccttggcccagctactagtggagcagaacttcccagccattgccatccaccgtgggatgccccaggaggagaggctttctcggtatcagcagtttaaagattttcaacgacgaattcttgtggctaccaacctatttggccgaggcatggacatcgagcgggtgaacattgcttttaattatgacatgcctgaggattctgacacctacctgcatcgggtggccagagcaggccggtttggcaccaagggcttggctatcacatttgtgtccgatgagaatgatgccaagatcctcaatgatgtgcaggatcgctttgaggtcaatattagtgagctgcctgatgagatagacatctcctcctacattgaacagacacggtagaagactcgcccattttggaatgtgaccgtctgtccttcaggagaggacaccagggtgggggtgaaggagacactactgcccccacccctgacagcccccaccccatggcttccatcttttgcatcaccaccactcctgaacccccatttctgatttgtcagaatttttttttaacaaaactaaaaatgaaacacatgtgtctgtggtatctataa

SEQ ID NO: 7699 - DNA, 2133 bp, Homo sapiens
  source 1..2133: mol_type = unassigned DNA
ctcagctagggcctgccggttcctagtgcgtgcccagcagtcctcaggtcaccttcactaccgggccaaggaccccgtgggaactcgcagccttcgccacactcgttcctcgcgcatccatggaggggtgcctacagagaagacctgcgtggcaaaaacctaaacgaagagatgaggggcatggagaggagtaggataagagaataaagataacagtgggggggagacgttagtttcctttatatcttttgttactggcggtagcagtgaagttagaaacggttttaaaacaaatttcagacaggcattttccaaaggcaagcctggagcgcacggatctgtataaccgcggaaggccctgtttccggtcccttgcgcctgcgctcttgcagccaagaaggcgggaggctggagtagagggaagcctgcaaccggaagtgaaggcagatttccctccttcgtcgctgttgctgccgccatacgcgctctccctgtttagctcttctgttagaaatagtatctttgttttcctttgctgttcctcaatcccctactcttcaccccttgttttcacctattttgcgagaacccatccagatcccccttcccttcttcccctgccggcccagttatggcagagaacgatgtggacaatgagctcttggactatgaagatgatgaggtggagacagcagctgggggagatggggctgaggcccctgccaagaaggatgtcaagggctcctatgtctccatccacagctctggctttcgtgacttcctgctcaagccagagttgctccgggccattgtcgactgtggctttgagcatccgtcagaagtccagcatgagtgcatccctcaggccattctgggaatggatgtcctgtgccaggccaagtcgggcatgggaaagacagcagtgtttgtcttggccacactgcaacagctggagccagttactgggcaggtgtctgtactggtgatgtgtcacactcgggagttggcttttcagatcagcaaggaatatgagcgcttctctaaatacatgcccaatgtcaaggttgctgttttttttggtggtctgtctatcaagaaggatgaagaggtgctgaagaagaactgcccgcatatcgtcgtggggactccaggccgtatcctagccctggctcgaaataagagcctcaacctcaaacacattaaacactttattttggatgaatgtgataagatgcttgaacagctcgacatgcgtcgggatgtccaggaaatttttcgcatgaccccccacgagaagcaggtcatgatgttcagtgctaccttgagcaaagagatccgtccagtctgccgcaagttcatgcaagatccaatggagatcttcgtggatgatgagacgaagttgacgctgcatgggttgcagcagtactacgtgaaactgaaggacaacgagaagaaccggaagctctttgaccttctggatgtccttgagttcaaccaggtggtgatctttgtgaagtctgtgcagcggtgcattgccttggcccagctactagtggagcagaacttcccagccattgccatccaccgtgggatgccccaggaggagaggctttctcggtatcagcagtttaaagattttcaacgacgaattcttgtggctaccaacctatttggccgaggcatggacatcgagcgggtgaacattgcttttaattatgacatgcctgaggattctgacacctacctgcatcgggtggccagagcaggccggtttggcaccaagggcttggctatcacatttgtgtccgatgagaatgatgccaagatcctcaatgatgtgcaggatcgctttgaggtcaatattagtgagctgcctgatgagatagacatctcctcctacattgaacagacacggtagaagactcgcccattttggaatgtgaccgtctgtccttcaggagaggacaccagggtgggggtgaaggagacactactgcccccacccctgacagcccccaccccatggcttccatcttttgcatcaccaccactcctgaacccccatttctgatttgtcagaatttttttttaacaaaactaaaaatgaaacacatgtgtctgtggtatctataa

SEQ ID NO: 7700 - DNA, 1529 bp, Homo sapiens
  source 1..1529: mol_type = unassigned DNA
agttatggcagagaacgatgtggacaatgagctcttggactatgaagatgatgaggtggagacagcagctgggggagatggggctgaggcccctgccaagaaggatgtcaagggctcctatgtctccatccacagctctggctttcgtgacttcctgctcaagccagagttgctccgggccattgtcgactgtggctttgagcatccgtcagaagtccagcatgagtgcatccctcaggccattctgggaatggatgtcctgtgccaggccaagtcgggcatgggaaagacagcagtgtttgtcttggccacactgcaacagctggagccagttactgggcaggtgtctgtgctggtgatgtgtcacactcgggagttggcttttcagatcagcaaggaatatgagcgcttctctaaatacatgcccaatgtcaaggttgctgttttttttggtggtctgtctatcaagaaggatgaagaggtgctgaagaagaactgcccgcatatcgtcgtggggactccaggccgtatcctagccctggctcgaaataagagcctcaacctcaaacacattaaacactttattttggatgaatgtgataagatgcttgaacagctcgacatgcgtcgggatgtccaggaaatttttcgcatgaccccccacgagaagcaggtcatgatgttcagtgctaccttgagcaaagagatccgtccagtctgccgcaagttcatgcaagatccaatggagatcttcgtggatgatgagacgaagttgacgctgcatgggttgcagcagtactacgtgaaactgaaggacaacgagaagaaccggaagctctttgaccttctggatgtccttgagttcaaccaggtggtgatctttgtgaagtctgtgcagcggtgcattgccttggcccagctactagtggagcagaacttcccagccattgccatccaccgtgggatgccccaggaggagaggctttctcggtatcagcagtttaaagattttcaacgacgaattcttgtggctaccaacctatttggccgaggcatggacatcgagcgggtgaacattgcttttaattatgacatgcctgaggattctgacacctacctgcatcggtgctaccctctgtctccctccaggtggccagagcaggccggtttggcaccaagggcttggctatcacatttgtgtccgatgagaatgatgccaagatcctcaatgatgtgcaggatcgctttgaggtcaatattagtgagctgcctgatgagatagacatctcctcctacattgaacagacacggtagaagactcgcccattttggaatgtgaccgtctgtccttcaggagaggacaccagggtgggggtgaaggagacactactgcccccacccctgacagcccccaccccatggcttccatcttttgcatcaccaccactcctgaacccccatttctgatttgtcagaatttttttttaacaaaactaaaaatgaaacacatgtgtctgtggtatctataa

SEQ ID NO: 7701 - DNA, 2003 bp, Homo sapiens
  source 1..2003: mol_type = unassigned DNA
ctcagctagggcctgccggttcctagtgcgtgcccagcagtcctcaggtcaccttcactaccgggccaaggaccccgtgggaactcgcagccttcgccacactcgttcctcgcgcatccacggaggggtgcctacagagaagacctgcgtggcaaaaacctaaacgaagagatgaggggcatggagaggagtaggataagagaataaagataacagtgggggggagacgttagtttcctttatatcttttgttactggcggtagcagtgaagttagaaacggttttaaaacaaatttcagacaggcattttccaaaggcaagcctggagcgcacggatctgtataaccgcggaaggccctgtttccggtcccttgcgcctgcgctcttgcagccaagaaggcgggaggctggagtagagggaagcctgcaaccggaagtgaaggcagatttccctccttcgtcgctgttgctgccgccatacgcgctctccctgtttagttatggcagagaacgatgtggacaatgagctcttggactatgaagatgatgaggtggagacagcagctgggggagatggggctgaggcccctgccaagaaggatgtcaagggctcctatgtctccatccacagctctggctttcgtgacttcctgctcaagccagagttgctccgggccattgtcgactgtggctttgagcatccgtcagaagtccagcatgagtgcatccctcaggccattctgggaatggatgtcctgtgccaggccaagtcgggcatgggaaagacagcagtgtttgtcttggccacactgcaacagctggagccagttactgggcaggtgtctgtgctggtgatgtgtcacactcgggagttggcttttcagatcagcaaggaatatgagcgcttctctaaatacatgcccaatgtcaaggttgctgttttttttggtggtctgtctatcaagaaggatgaagaggtgctgaagaagaactgcccgcatatcgtcgtggggactccaggccgtatcctagccctggctcgaaataagagcctcaacctcaaacacattaaacactttattttggatgaatgtgataagatgcttgaacagctcgacatgcgtcgggatgtccaggaaatttttcgcatgaccccccacgagaagcaggtcatgatgttcagtgctaccttgagcaaagagatccgtccagtctgccgcaagttcatgcaagatccaatggagatcttcgtggatgatgagacgaagttgacgctgcatgggttgcagcagtactacgtgaaactgaaggacaacgagaagaaccggaagctctttgaccttctggatgtccttgagttcaaccaggtggtgatctttgtgaagtctgtgcagcggtgcattgccttggcccagctactagtggagcagaacttcccagccattgccatccaccgtgggatgccccaggaggagaggctttctcggtatcagcagtttaaagattttcaacgacgaattcttgtggctaccaacctatttggccgaggcatggacatcgagcgggtgaacattgcttttaattatgacatgcctgaggattctgacacctacctgcatcgggtggccagagcaggccggtttggcaccaagggcttggctatcacatttgtgtccgatgagaatgatgccaagatcctcaatgatgtgcaggatcgctttgaggtcaatattagtgagctgcctgatgagatagacatctcctcctacattgaacagacacggtagaagactcgcccattttggaatgtgaccgtctgtccttcaggagaggacaccagggtgggggtgaaggagacactactgcccccacccctgacagcccccaccccatggcttccatcttttgcatcaccaccactcctgaacccccatttctgatttgtcagaatttttttttaacaaaactaaaaatgaaacacatgtgtctgtggtatctataa

SEQ ID NO: 7702 - DNA, 2133 bp, Homo sapiens
  source 1..2133: mol_type = unassigned DNA
ctcagctagggcctgccggttcctagtgcgtgcccagcagtcctcaggtcaccttcactaccgggccaaggaccccgtgggaactcgcagccttcgccacactcgttcctcgcgcatccacggaggggtgcctacagagaagacctgcgtggcaaaaacctaaacgaagagatgaggggcatggagaggagtaggataagagaataaagataacagtgggggggagacgttagtttcctttatatcttttgttactggcggtagcagtgaagttagaaacggttttaaaacaaatttcagacaggcattttccaaaggcaagcctggagcgcacggatctgtataaccgcggaaggccctgtttccggtcccttgcgcctgcgctcttgcagccaagaaggcgggaggctggagtagagggaagcctgcaaccggaagtgaaggcagatttccctccttcgtcgctgttgctgccgccatacgcgctctccctgtttagctcttctgttagaaatagtatctttgttttcctttgctgttcctcaatcccctactcttcaccccttgttttcacctattttgcgagaacccatccagatcccccttcccttcttcccctgccggcccagttatggcagagaacgatgtggacaatgagctcttggactatgaagatgatgaggtggagacagcagctgggggagatggggctgaggcccctgccaagaaggatgtcaagggctcctatgtctccatccacagctctggctttcgtgacttcctgctcaagccagagttgctccgggccattgtcgactgtggctttgagcatccgtcagaagtccagcatgagtgcatccctcaggccattctgggaatggatgtcctgtgccaggccaagtcgggcatgggaaagacagcagtgtttgtcttggccacactgcaacagctggagccagttactgggcaggtgtctgtgctggtgatgtgtcacactcgggagttggcttttcagatcagcaaggaatatgagcgcttctctaaatacatgcccaatgtcaaggttgctgttttttttggtggtctgtctatcaagaaggatgaagaggtgctgaagaagaactgcccgcatatcgtcgtggggactccaggccgtatcctagccctggctcgaaataagagcctcaacctcaaacacattaaacactttattttggatgaatgtgataagatgcttgaacagctcgacatgcgtcgggatgtccaggaaatttttcgcatgaccccccacgagaagcaggtcatgatgttcagtgctaccttgagcaaagagatccgtccagtctgccgcaagttcatgcaagatccaatggagatcttcgtggatgatgagacgaagttgacgctgcatgggttgcagcagtactacgtgaaactgaaggacaacgagaagaaccggaagctctttgaccttctggatgtccttgagttcaaccaggtggtgatctttgtgaagtctgtgcagcggtgcattgccttggcccagctactagtggagcagaacttcccagccattgccatccaccgtgggatgccccaggaggagaggctttctcggtatcagcagtttaaagattttcaacgacgaattcttgtggctaccaacctatttggccgaggcatggacatcgagcgggtgaacattgcttttaattatgacatgcctgaggattctgacacctacctgcatcgggtggccagagcaggccggtttggcaccaagggcttggctatcacatttgtgtccgatgagaatgatgccaagatcctcaatgatgtgcaggatcgctttgaggtcaatattagtgagctgcctgatgagatagacatctcctcctacattgaacagacacggtagaagactcgcccattttggaatgtgaccgtctgtccttcaggagaggacaccagggtgggggtgaaggagacactactgcccccacccctgacagcccccaccccatggcttccatcttttgcatcaccaccactcctgaacccccatttctgatttgtcagaatttttttttaacaaaactaaaaatgaaacacatgtgtctgtggtatctataa

SEQ ID NO: 7703 - DNA, 591 bp, Homo sapiens
  source 1..591: mol_type = unassigned DNA
cattgtgttcgttttgctcccttcttccaatgggttcttctcatattggaggcctcagcatcaatgagaggcggtgctcggcgtcccttggtcttgttatggcagagaacgatgtggacaatgagctcttggactatgaagatgatgaggtggagacagcagctgggggagatggggctgaggcccctgccaagaaggatgtcaagggctcctatgtctccatccacagctctggctttcgtgacttcctgctcaagccagagttgctccgggccattgtcgactgtggctttgagcatccgtcagaagtccagcatgagtgcatccctcaggccattctgggaatggatgtcctgtgccaggccaagtcgggcatgggaaagacagcagtgtttgtcttggccacactgcaacagctggagccagttactgggcaggtgtctgtgctggtgatgtgtcacactcgggagttggcttttcagatcagcaaggaatatgagcgcttctctaaatacatgcccaatgtcaaggttgctgttttttttggtggtctgtctatcaagaaggatgaagaggtgctgaagaagaact

SEQ ID NO: 7704 - DNA, 2039 bp, Homo sapiens
  source 1..2039: mol_type = unassigned DNA
cagcatcggccataacaacagaaatggccagtcagtcccaaggtatccagcagcttctgcaagctgagaagcgggcagctgagaaggtggcagatgccagaaagaggaaggcccggcgactgaagcaggcaaaggaggaggcacagatggaggtggagcaataccgcagagagcgagagcacgaattccagagcaagcagcaggcgacaggcattttccaaaggcaagcctggagcgcacggatctgtataaccgcggaaggccctgtttccggtcccttgcgcctgcgctcttgcagccaagaaggcgggaggctggagtagagggaagcctgcaaccggaagtgaaggcacatttccctccttcgtcgctgttgctgccgccatacgcgctctccctgtttagctcttctgttagaaatagtatctttgttttcctttgctgttcctcaatcccctactcttcaccccttgttttcacctattttgcgagaacccatccagatcccccttcccttcttcccctgccggcccagttatggcagagaacgatgtggacaatgagctcttggactatgaagatgatgaggtggagacagcagctgggggagatggggctgaggcccctgccaagaaggatgtcaagggctcctatgtctccatccacagctctggctttcgtgacttcctgctcaagccagagttgctccgggccattgtcgactgtggctttgagcatccgtcagaagtccagcatgagtgcatccctcaggccattctgggaatggatgtcctgtgccaggccaagtcgggcatgggaaagacagcagtgtttgtcttggccacactgcaacagctggagccagttactgggcaggtgtctgtgctggtgatgtgtcacactcgggagttggcttttcagatcagcaaggaatatgagcgcttctctaaatacatgcccaatgtcaaggttgctgttttttttggtggtctgtctatcaagaaggatgaagaggtgctgaagaagaactgcccgcatatcgtcgtggggactccaggccgtatcctagccctggctcgaaataagagcctcaacctcaaacacattaaacactttattttggatgaatgtgataagatgcttgaacagctcgacatgcgtcgggatgtccaggaaatttttcgcatgaccccccacgagaagcaggtcatgatgttcagtgctaccttgagcaaagagatccgtccagtctgccgcaagttcatgcaagatccaatggagatcttcgtggatgatgagacgaagttgacgctgcatgggttgcagcagtactacgtgaaactgaaggacaacgagaagaaccggaagctctttgaccttctggatgtccttgagttcaaccaggtggtgatctttgtgaagtctgtgcagcggtgcattgccttggcccagctactagtggagcagaacttcccagccattgccatccaccgtgggatgccccaggaggagaggctttctcggtatcagcagtttaaagattttcaacgacgaattcttgtggctaccaacctatttggccgaggcatggacatcgagcgggtgaacattgcttttaattatgacatgcctgaggattctgacacctacctgcatcgggtggccagagcaggccggtttggcaccaagggcttggctatcacatttgtgtccgatgagaatgatgccaagatcctcaatgatgtgcaggatcgctttgaggtcaatattagtgagctgcctgatgagatagacatctcctcctacattgaacagacacggtagaagactcgcccattttggaatgtgaccgtctgtccttcaggagaggacaccagggtgggggtgaaggagacactactgcccccacccctgacagcccccaccccatggcttccatcttttgcatcaccaccactcctgaacccccatttctgatttgtcagaatttttttttaacaaaactaaaaatgaaacacatgtgtctgtggtatctataa

SEQ ID NO: 7705 - DNA, 720 bp, Homo sapiens
  source 1..720: mol_type = unassigned DNA
cgctgttgctgccgccatacgcgctctccctgtttagggtggagacatgaattttgtttttttgtggccgagccatttgtcttgcaccgcccctcccccccatgctaattacacaaggcttgcttaaacagcggaagggaggatactgagaagtgggaggctgagagctatgggaggtggacggcggccatatgatgttttcttttcgaaagctcttctgttagaaatagtatctttgttttcctttgctgttcctcaatcccctactcttcaccccttgttttcacctattttgcgagaacccatccagatcccccttcccttcttcccctgccggcccagttatggcagagaacgatgtggacaatgagctcttggactatgaagatgatgaggtggagacagcagctgggggagatggggctgaggcccctgccaagaaggatgtcaagggctcctatgtctccatccacagctctggctttcgtgacttcctgctcaagccagagttgctccgggccattgtcgactgtggctttgagcatccgtcagaagtccagcatgagtgcatccctcaggccattctgggaatggatgtcctgtgccaggccaagtcgggcatgggaaagacagcagtgtttgtcttggccacactgcaacagctggagccagttactgggcaggtgtctgtgctggtgatgtgtcacactcgggagttgg

SEQ ID NO: 7706 - DNA, 2003 bp, Homo sapiens
  source 1..2003: mol_type = unassigned DNA
ctcagctagggcctgccggttcctagtgcgtgcccagcagtcctcaggtcaccttcactaccgggccaaggaccccgtgggaactcgcagccttcgccacactcgttcctcgcgcatccacggaggggtgcctacagagaagacctgcgtggcaaaaacctaaacgaagagatgaggggcatggagaggagtaggataagagaataaagataacagtggggggcagacgttagtttcctttatatcttttgttactggcggtagcagtgaagttagaaacggttttaaaacaaatttcagacaggcattttccaaaggcaagcctggagcgcacggatctgtataaccgcggaaggccctgtttccggtcccttgcgcctgcgctcttgcagccaagaaggcgggaggctggagtagagggaagcctgcaaccggaagtgaaggcagatttccctccttcgtcgctgttgctgccgccatacgcgctctccctgtttagttatggcagagaacgatgtggacaatgagctcttggactatgaagatgatgaggtggagacagcagctgggggagatggggctgaggcccctgccaagaaggatgtcaagggctcctatgtctccatccacagctctggctttcgtgacttcctgctcaagccagagttgctccgggccattgtcgactgtggctttgagcatccgtcagaagtccagcatgagtgcatccctcaggccattctgggaatggatgtcctgtgccaggccaagtcgggcatgggaaagacagcagtgtttgtcttggccacactgcaacagctggagccagttactgggcaggtgtctgtgctggtgatgtgtcacactcgggagttggcttttcagatcagcaaggaatatgagcgcttctctaaatacatgcccaatgtcaaggttgctgttttttttggtggtctgtctatcaagaaggatgaagaggtgctgaagaagaactgcccgcatatcgtcgtggggactccaggccgtatcctagccctggctcgaaataagagcctcaacctcaaacacattaaacactttattttggatgaatgtgataagatgcttgaacagctcgacatgcgtcgggatgtccaggaaatttttcgcatgaccccccacgagaagcaggtcatgatgttcagtgctaccttgagcaaagagatccgtccagtctgccgcaagttcatgcaagatccaatggagatcttcgtggatgatgagacgaagttgacgctgcatgggttgcagcagtactacgtgaaactgaaggacaacgagaagaaccggaagctctttgaccttctggatgtccttgagttcaaccaggtggtgatctttgtgaagtctgtgcagcggtgcattgccttggcccagctactagtggagcagaacttcccagccattgccatccaccgtgggatgccccaggaggagaggctttctcggtatcagcagtttaaagattttcaacgacgaattcttgtggctaccaacctatttggccgaggcatggacatcgagcgggtgaacattgcttttaattatgacatgcctgaggattctgacacctacctgcatcgggtggccagagcaggccggtttggcaccaagggcttggctatcacatttgtgtccgatgagaatgatgccaagatcctcaatgatgtgcaggatcgctttgaggtcaatattagtgagctgcctgatgagatagacatctcctcctacattgaacagacacggtagaagactcgcccattttggaatgtgaccgtctgtccttcaggagaggacaccagggtgggggtgaaggagacactactgcccccacccctgacagcccccaccccatggcttccatcttttgcatcaccaccactcctgaacccccatttctgatttgtcagaatttttttttaacaaaactaaaaatgaaacacatgtgtctgtggtatctataa

SEQ ID NO: 7707 - DNA, 561 bp, Homo sapiens
  source 1..561: mol_type = unassigned DNA
actcagaggagagggacataggaaagccaatggagatcttcgtggatgatgagacgaagttgacgctgcatgggttgcagcagtactacgtgaaactgaaggacaacgagaagaaccggaagctctttgaccttctggatgtccttgagttcaaccaggtggtgatctttgtgaagtctgtgcagcggtgcattgccttggcccagctactagtggagcagaacttcccagccattgccatccaccgtgggatgccccaggaggagaggctttctcggtatcagcagtttaaagattttcaacgacgaattcttgtggctaccaacctatttggccgaggcatggacatcgagcgggtgaacattgcttttaattatgacatgcctgaggattctgacacctacctgcatcgggtggccagagcaggccggtttggcaccaagggcttggctatcacatttgtgtccgatgagaatgatgccaagatcctcaatgatgtgcaggatcgctttgaggtcaatattagtgagctgcctgatgagatagacatctcctcctaca

SEQ ID NO: 7708 - DNA, 720 bp, Homo sapiens; identical to SEQ ID NO: 7705
  source 1..720: mol_type = unassigned DNA

SEQ ID NO: 7709 - DNA, 2133 bp, Homo sapiens
  source 1..2133: mol_type = unassigned DNA
ctcagctagggcctgccggttcctagtgcgtgcccagcagtcctcaggtcaccttcactaccgggccaaggaccccgtgggaactcgcagccttcgccacactcgttcctcgcgcatccacggaggggtgcctacagagaagacctgcgtggcaaaaacctaaacgaagagatgaggggcatggagaggagtaggataagagaataaagataacagtgggggggagacgttagtttcctttatatcttttgttactggaggtagcagtgaagttagaaacggttttaaaacaaatttcagacaggcattttccaaaggcaagcctggagcgcacggatctgtataaccgcggaaggccctgtttccggtcccttgcgcctgcgctcttgcagccaagaaggcgggaggctggagtagagggaagcctgcaaccggaagtgaaggcagatttccctccttcgtcgctgttgctgccgccatacgcgctctccctgtttagctcttctgttagaaatagtatctttgttttcctttgctgttcctcaatcccctactcttcaccccttgttttcacctattttgcgagaacccatccagatcccccttcccttcttcccctgccggcccagttatggcagagaacgatgtggacaatgagctcttggactatgaagatgatgaggtggagacagcagctgggggagatggggctgaggcccctgccaagaaggatgtcaagggctcctatgtctccatccacagctctggctttcgtgacttcctgctcaagccagagttgctccgggccattgtcgactgtggctttgagcatccgtcagaagtccagcatgagtgcatccctcaggccattctgggaatggatgtcctgtgccaggccaagtcgggcatgggaaagacagcagtgtttgtcttggccacactgcaacagctggagccagttactgggcaggtgtctgtgctggtgatgtgtcacactcgggagttggcttttcagatcagcaaggaatatgagcgcttctctaaatacatgcccaatgtcaaggttgctgttttttttggtggtctgtctatcaagaaggatgaagaggtgctgaagaagaactgcccgcatatcgtcgtggggactccaggccgtatcctagccctggctcgaaataagagcctcaacctcaaacacattaaacactttattttggatgaatgtgataagatgcttgaacagctcgacatgcgtcgggatgtccaggaaatttttcgcatgaccccccacgagaagcaggtcatgatgttcagtgctaccttgagcaaagagatccgtccagtctgccgcaagttcatgcaagatccaatggagatcttcgtggatgatgagacgaagttgacgctgcatgggttgcagcagtactacgtgaaactgaaggacaacgagaagaaccggaagctctttgaccttctggatgtccttgagttcaaccaggtggtgatctttgtgaagtctgtgcagcggtgcattgccttggcccagctactagtggagcagaacttcccagccattgccatccaccgtgggatgccccaggaggagaggctttctcggtatcagcagtttaaagattttcaacgacgaattcttgtggctaccaacctatttggccgaggcatggacatcgagcgggtgaacattgcttttaattatgacatgcctgaggattctgacacctacctgcatcgggtggccagagcaggccggtttggcaccaagggcttggctatcacatttgtgtccgatgagaatgatgccaagatcctcaatgatgtgcaggatcgctttgaggtcaatattagtgagctgcctgatgagatagacatctcctcctacattgaacagacacggtagaagactcgcccattttggaatgtgaccgtctgtccttcaggagaggacaccagggtgggggtgaaggagacactactgcccccacccctgacagcccccaccccatggcttccatcttttgcatcaccaccactcctgaacccccatttctgatttgtcagaatttttttttaacaaaactaaaaatgaaacacatgtgtctgtggtatctataa

SEQ ID NO: 7710 - DNA, 1005 bp, Homo sapiens
  source 1..1005: mol_type = unassigned DNA
ttggatttttctcaccttgacttgcccaacttaatttggagtgccttccaagtgtttacgatacgattggtgtcattgtatgtttctccaaaaggagtctcaccttcgtagcgtaacagtgatgtgagaccacttgttatggcagagaacgatgtggacaatgagctcttggactatgaagatgatgaggtggagacagcagctgggggagatggggctgaggcccctgccaagaaggatgtcaagggctcctatgtctccatccacagctctggctttcgtgacttcctgctcaagccagagttgctccgggccattgtcgactgtggctttgagcatccgtcagaagtccagcatgagtgcatccctcaggccattctgggaatggatgtcctgtgccaggccaagtcgggcatgggaaagacagcagtgtttgtcttggccacactgcaacagctggagccagttactgggcaggtgtctgtgctggtgatgtgtcacactcgggagttggcttttcagatcagcaaggaatatgagcgcttctctaaatacatgcccaatgtcaaggttgctgttttttttggtggtctgtctatcaagaaggatgaagaggtgctgaagaagaactgcccgcatatcgtcgtggggactccaggccgtatcctagccctggctcgaaataagagcctcaacctcaaacacattaaacactttattttggatgaatgtgataagatgcttgaacagctcgacatgcgtcgggatgtccaggaaatttttcgcatgaccccccacgagaagcaggtcatgatgttcagtgctaccttgagcaaagagatccgtccagtctgccgcaagttcatgcaagatccaatggagatcttcgtggatgatgagacgaagttgacgctgcatgggttgcagcagtactacgtgaaactgaaggacaacgagaagaaccggaagctctttgaccttctggatgtccttgagttcaaccag

SEQ ID NO: 7711 - DNA, 2039 bp, Homo sapiens; identical to SEQ ID NO: 7698
  source 1..2039: mol_type = unassigned DNA

SEQ ID NO: 7712 - DNA, 659 bp, Homo sapiens
  source 1..659: mol_type = unassigned DNA
cccttttcacaggcgatggtctggtcgctggggcctagttggttcgctatttccttagcttgcatccctttcgagagcaaagagctcctgggggaaggaagggaagctaaggggggacccaatccaagatggtgtcctcggcgccattgtgttcgttttgctcccttcttccaatgggttcttctcatattggaggcctcagcatcaatgagaggcggtgctcggcgtcccttggtcttgctcttctgttagaaatagtatctttgttttcctttgctgttcctcaatcccctactcttcaccccttgttttcacctattttgcgagaacccatccagatcccccttcccttcttcccctgccggcccagttatggcagagaacgatgtggacaatgagctcttggactatgaagatgatgaggtggagacagcagctgggggagatggggctgaggcccctgccaagaaggatgtcaagggctcctatgtctccatccacagctctggctttcgtgacttcctgctcaagccagagttgctccgggccattgtcgactgtggctttgagcatccgtcagaagtccagcatgagtgcatccctcaggccattctgggaatggatgtcctgtgccaggccaagtcgggcatgggaaagac

SEQ ID NO: 7713 - DNA, 720 bp, Homo sapiens; identical to SEQ ID NO: 7705
  source 1..720: mol_type = unassigned DNA

SEQ ID NO: 7714 - DNA, 932 bp, Homo sapiens
  source 1..932: mol_type = unassigned DNA
cttcgctacaatccgtttccatctgcgcttctccgcacccatcccgtcacatgggttcctgatacccttttcacaggcgatggtctggtcgctggggcctagttgctcttctgttagaaatagtatctttgttttcctttgctgttcctcaatcccctactcttcaccccttgttttcacctattttgcgagaacccatccagatcccccttcccttcttcccctgccggcccagttatggcagagaacgatgtggacaatgagctcttggactatgaagatgatgaggtggagacagcagctgggggagatggggctgaggcccctgccaagaaggatgtcaagggctcctatgtctccatccacagctctggctttcgtgacttcctgctcaagccagagttgctccgggccattgtcgactgtggctttgagcatccgtcagaagtccagcatgagtgcatccctcaggccattctgggaatggatgtcctgtgccaggccaagtcgggcatgggaaagacagcagtgtttgtcttggccacactgcaacagctggagccagttactgggcaggtgtctgtgctggtgatgtgtcacactcgggagttggcttttcagatcagcaaggaatatgagcgcttctctaaatacatgcccaatgtcaaggttgctgttttttttggtggtctgtctatcaagaaggatgaagaggtgctgaagaagaactgcccgcatatcgtcgtggggactccaggccgtatcctagccctggctcgaaataagagcctcaacctcaaacacattaaacactttattttggatgaatgtgataagatgcttgaacagctcgacatgcgtcgggatgtccaggaaatttttcgcatgaccccccacgagaagcaggtcatgatgttcagtgctaccttgag

SEQ ID NO: 7715 - DNA, 583 bp, Homo sapiens
  source 1..583: mol_type = unassigned DNA
acatttccctccttcgtcgctgttgctgccgccatacgcgctctccctgtttagctcttctgttagaaatagtatctttgttttcctttgctgttcctcaatcccctactcttcaccccttgttttcacctattttgcgagaacccatccagatcccccttcccttcttcccctgccggcccagttatggcagagaacgatgtggacaatgagctcttggactatgaagatgatgaggtggagacagcagctgggggagatggggctgaggcccctgccaagaaggatgtcaagggctcctatgtctccatccacagctctggctttcgtgacttcctgctcaagccagagttgctccgggccattgtcgactgtggctttgagcatccgtcagaagtccagcatgagtgcatccctcaggccattctgggaatggatgtcctgtgccaggccaagtcgggcatgggaaagacagcagtgtttgtcttggccacactgcaacagctggagccagttactgggcaggtgtgtttttgtgacagtcacttccctagaggggataatgaagagctacatttaccat

SEQ ID NO: 7716 - DNA, 1433 bp, Homo sapiens
  source 1..1433: mol_type = unassigned DNA
agatttccctccttcgtcgctgttgctgccgccatacgcgctctccctgtttagctcttctgttagaaatagtatctttgttttcctttgctgttcctcaatcccctactcttcaccccttgttttcacctattttgcgagaacccatccagatcccccttcccttcttcccctgccggcccagttatggcagagaacgatgtggacaatgagctcttggactatgaagatgatgaggtggagacagcagctgggggagatggggctgaggcccctgccaagaaggatgtcaagggctcctatgtctccatccacagctctggctttcgtgacttcctgctcaagccagagttgctccgggccattgtcgactgtggctttgagcatccgtcagaaggttgctgttttttttggtggtctgtctatcaagaaggatgaagaggtgctgaagaagaactgcccgcatatcgtcgtggggactccaggccgtatcctagccctggctcgaaataagagcctcaacctcaaacacattaaacactttattttggatgaatgtgataagatgcttgaacagctcgacatgcgtcgggatgtccaggaaatttttcgcatgaccccccacgagaagcaggtcatgatgttcagtgctaccttgagcaaagagatccgtccagtctgccgcaagttcatgcaagatccaatggagatcttcgtggatgatgagacgaagttgacgctgcatgggttgcagcagtactacgtgaaactgaaggacaacgagaagaaccggaagctctttgaccttctggatgtccttgagttcaaccaggtggtgatctttgtgaagtctgtgcagcggtgcattgccttggcccagctactagtggagcagaacttcccagccattgccatccaccgtgggatgccccaggaggagaggctttctcggtatcagcagtttaaagattttcaacgacgaattcttgtggctaccaacctatttggccgaggcatggacatcgagcgggtgaacattgcttttaattatgacatgcctgaggattctgacacctacctgcatcgggtggccagagcaggccggtttggcaccaagggcttggctatcacatttgtgtccgatgagaatgatgccaagatcctcaatgatgtgcaggatcgctttgaggtcaatattagtgagctgcctgatgagatagacatctcctcctacattgaacagacacggtagaagactcgcccattttggaatgtgaccgtctgtccttcaggagaggacaccagggtgggggtgaaggagacactactgcccccacccctgacagcccccaccccatggcttccatcttttgcatcaccaccactcctgaacccccatttctgatttgtcagaatttttttttaacaaaact

SEQ ID NO: 7717 - DNA, 914 bp, Homo sapiens
  source 1..914: mol_type = unassigned DNA
ttgctgccgccatacgcgctctccctgtttagctcttctgttagaaatagtatctttgttttcctttgctgttcctcaatcccctactcttcaccccttgttttcacctattttgcgagaacccatccagatcccccttcccttcttcccctgccggcccagttatggcagagaacgatgtggacaatgagctcttggactatgaagatgatgaggtggagacagcagctgggggagatggggctgaggcccctgccaagaaggatgtcaagggctcctatgtctccatccacagctctggctttcgtgacttcctgctcaagccagagttgctccgggccattgtcgactgtggctttgagcatccgtcagaaggttgctgttttttttggtggtctgtctatcaagaaggatgaagaggtgctgaagaagaactgcccgcatatcgtcgtggggactccaggccgtatcctagccctggctcgaaataagagcctcaacctcaaacacattaaacactttattttggatgaatgtgataagatgcttgaacagctcgacatgcgtcgggatgtccaggaaatttttcgcatgaccccccacgagaagcaggtcatgatgttcagtgctaccttgagcaaagagatccgtccagtctgccgcaagttcatgcaagatccaatggagatcttcgtggatgatgagacgaagttgacgctgcatgggttgcagcagtactacgtgaaactgaaggacaacgagaagaaccggaagctctttgaccttctggatgtccttgagttcaaccaggtggtgatctttgtgaagtctgtgcagcggtgcattgccttggcccagctactagtggagcagaacttcccagccattgccatccaccgtgggatgccccagga

SEQ ID NO: 7718 - DNA, 583 bp, Homo sapiens
  source 1..583: mol_type = unassigned DNA
ttcgtcgctgttgctgccgccatacgcgctctccctgtttagggtggagacatgaattttgtttttttgtggccgagccatttgtcttgcaccgcccctcccccccatgctaattacacaaggcttgcttaaacagcggaagggaggatactgagaagtgggaggctgagagctatgggaggtggacggcggccatatgatgttttcttttcgaaagttatggcagagaacgatgtggacaatgagctcttggactatgaagatgatgaggtggagacagcagctgggggagatggggctgaggcccctgccaagaaggatgtcaagggctcctatgtctccatccacagctctggctttcgtgacttcctgctcaagccagagttgctccgggccattgtcgactgtggctttgagcatccgtcagaagtccagcatgagtgcatccctcaggccattctgggaatggatgtcctgtgccaggccaagtcgggcatgggaaagacagcagtgtttgtcttggccacactgcaacagctggagccagttactgggcaggtgtctgtgctggtgatgtgtcaca

SEQ ID NO: 7719 - DNA, 2133 bp, Homo sapiens
  source 1..2133: mol_type = unassigned DNA
ctcagctagggcctgccggttcctagtgcgtgcccagcagtcctcaggtcaccttcactaccgggccaaggaccccgtgggaactcgcagccttcgccacactcgttcctcgcgcatccacggaggggtgcctacagagaagacctgcgtggcaaaaacctaaacgaagagatgaggggcatggagaggagtaggataagagaataaagataacagtgggggggagacgttagtttcctttatatcttttgttactggcggtagcagtgaagttagaaacggttttaaaacaaatttcagacaggcattttccaaaggcaagcctggagcgcacggatctgtataaccgcggaaggccctgtttccggtcccttgcgcctgcgctcttgcagccaagaaggcgggaggctggagtagagggaagcctgcaaccggaagtgaaggcacatttccctccttcgtcgctgttgctgccgccatacgcgctctccctgtttagctcttctgttagaaatagtatctttgttttcctttgctgttcctcaatcccctactcttcaccccttgttttcacctattttgcgagaacccatccagatcccccttcccttcttcccctgccggcccagttatggcagagaacgatgtggacaatgagctcttggactatgaagatgatgaggtggagacagcagctgggggagatggggctgaggcccctgccaagaaggatgtcaagggctcctatgtctccatccacagctctggctttcgtgacttcctgctcaagccagagttgctccgggccattgtcgactgtggctttgagcatccgtcagaagtccagcatgagtgcatccctcaggccattctgggaatggatgtcctgtgccaggccaagtcgggcatgggaaagacagcagtgtttgtcttggccacactgcaacagctggagccagttactgggcaggtgtctgtgctggtgatgtgtcacactcgggagttggcttttcagatcagcaaggaatatgagcgcttctctaaatacatgcccaatgtcaaggttgctgttttttttggtggtctgtctatcaagaaggatgaagaggtgctgaagaagaactgcccgcatatcgtcgtggggactccaggccgtatcctagccctggctcgaaataagagcctcaacctcaaacacattaaacactttattttggatgaatgtgataagatgcttgaacagctcgacatgcgtcgggatgtccaggaaatttttcgcatgaccccccacgagaagcaggtcatgatgttcagtgctaccttgagcaaagagatccgtccagtctgccgcaagttcatgcaagatccaatggagatcttcgtggatgatgagacgaagttgacgctgcatgggttgcagcagtactacgtgaaactgaaggacaacgagaagaaccggaagctctttgaccttctggatgtccttgagttcaaccaggtggtgatctttgtgaagtctgtgcagcggtgcattgccttggcccagctactagtggagcagaacttcccagccattgccatccaccgtgggatgccccaggaggagaggctttctcggtatcagcagtttaaagattttcaacgacgaattcttgtggctaccaacctatttggccgaggcatggacatcgagcgggtgaacattgcttttaattatgacatgcctgaggattctgacacctacctgcatcgggtggccagagcaggccggtttggcaccaagggcttggctatcacatttgtgtccgatgagaatgatgccaagatcctcaatgatgtgcaggatcgctttgaggtcaatattagtgagctgcctgatgagatagacatctcctcctacattgaacagacacggtagaagactcgcccattttggaatgtgaccgtctgtccttcaggagaggacaccagggtgggggtgaaggagacactactgcccccacccctgacagcccccaccccatggcttccatcttttgcatcaccaccactcctgaacccccatttctgatttgtcagaatttttttttaacaaaactaaaaatgaaacacatgtgtctgtggtatctataa

SEQ ID NO: 7720 - DNA, 633 bp, Homo sapiens
  source 1..633: mol_type = unassigned DNA
cgtcgctgttgctgccgccatacgcgctctccctgtttagttatggcagagaacgatgtggacaatgagctcttggactatgaagatgatgaggtggagacagcagctgggggagatggggctgaggcccctgccaagaaggatgtcaagggctcctatgtctccatccacagctctggctttcgtgacttcctgctcaagccagagttgctccgggccattgtcgactgtggctttgagcatccgtcagaagtccagcatgagtgcatccctcaggccattctgggaatggatgtcctgtgccaggccaagtcgggcatgggaaagacagcagtgtttgtcttggccacactgcaacagctggagccagttactgggcaggtgtgtttttgtgacagtcacttccctagaggggataatgaagagctacatttaccatatgtctccgtatacttcctgcctaaggtgtctgtgctggtgatgtgtcacactcgggagttggcttttcagatcagcaaggaatatgagcgcttctctaaatacatgcccaatgtcaaggttgctgttttttttggtggtctgtctatcaagaaggatgaagaggtgctgaagaagaactgcccgcatatcgtc

SEQ ID NO: 7721 - DNA, 566 bp, Homo sapiens
  source 1..566: mol_type = unassigned DNA
tggccacactgcaacagctggagccagttactgggcaggtgtctgtactggtgatgtgtcacactcgggagttggcttttcagatcagcaaggaatatgagcgcttctctaaatacatgcccaatgtcaaggttgctgttttttttggtggtctgtctatcaagaaggatgaagaggtgctgaagaagaactgcccgcatatcgtcgtggggactccaggccgtatcctagccctggctcgaaataagagcctcaacctcaaacacattaaacactttattttggatgaatgtgataagatgcttgaacagctcgacatgcgtcgggatgtccaggaaatttttcgcatgaccccccacgagaagcaggtcatgatgttcagtgctaccttgagcaaagagatccgtccagtctgccgcaagttcatgcaagatccaatggagatcttcgtggatgatgagacgaagttgacgctgcatgggttgcagcagtactacgtgaaactgaaggacaacgagaagaaccggaagctctttgaccttctggatgtccttgagttcaaccag

SEQ ID NO: 7722 - DNA, 2003 bp, Homo sapiens
  source 1..2003: mol_type = unassigned DNA
ctcagctagggcctgccggttcctagtgcgtgcccagcagtcctcaggtcaccttcactaccgggccaaggaccccgtgggaactcgcagccttcgccacactcgttcctcgcgcatccacggaggggtgcctacagagaagacctgcgtggcaaaaacctaaacgaagagatgaggggcatggagaggagtaggataagagaataaagataacagtgggggggagacgttagtttcctttatatcttttgttactggaggtagcagtgaagttagaaacggttttaaaacaaatttcagacaggcattttccaaaggcaagcctggagcgcacggatctgtataaccgcggaaggccctgtttccggtcccttgcgcctgcgctcttgcagccaagaaggcgggaggctggagtagagggaagcctgcaaccggaagtgaaggcagatttccctccttcgtcgctgttgctgccgccatacgcgctctccctgtttagttatggcagagaacgatgtggacaatgagctcttggactatgaagatgatgaggtggagacagcagctgggggagatggggctgaggcccctgccaagaaggatgtcaagggctcctatgtctccatccacagctctggctttcgtgacttcctgctcaagccagagttgctccgggccattgtcgactgtggctttgagcatccgtcagaagtccagcatgagtgcatccctcaggccattctgggaatggatgtcctgtgccaggccaagtcgggcatgggaaagacagcagtgtttgtcttggccacactgcaacagctggagccagttactgggcaggtgtctgtgctggtgatgtgtcacactcgggagttggcttttcagatcagcaaggaatatgagcgcttctctaaatacatgcccaatgtcaaggttgctgttttttttggtggtctgtctatcaagaaggatgaagaggtgctgaagaagaactgcccgcatatcgtcgtggggactccaggccgtatcctagccctggctcgaaataagagcctcaacctcaaacacattaaacactttattttggatgaatgtgataagatgcttgaacagctcgacatgcgtcgggatgtccaggaaatttttcgcatgaccccccacgagaagcaggtcatgatgttcagtgctaccttgagcaaagagatccgtccagtctgccgcaagttcatgcaagatccaatggagatcttcgtggatgatgagacgaagttgacgctgcatgggttgcagcagtactacgtgaaactgaaggacaacgagaagaaccggaagctctttgaccttctggatgtccttgagttcaaccaggtggtgatctttgtgaagtctgtgcagcggtgcattgccttggcccagctactagtggagcagaacttcccagccattgccatccaccgtgggatgccccaggaggagaggctttctcggtatcagcagtttaaagattttcaacgacgaattcttgtggctaccaacctatttggccgaggcatggacatcgagcgggtgaacattgcttttaattatgacatgcctgaggattctgacacctacctgcatcgggtggccagagcaggccggtttggcaccaagggcttggctatcacatttgtgtccgatgagaatgatgccaagatcctcaatgatgtgcaggatcgctttgaggtcaatattagtgagctgcctgatgagatagacatctcctcctacattgaacagacacggtagaagactcgcccattttggaatgtgaccgtctgtccttcaggagaggacaccagggtgggggtgaaggagacactactgcccccacccctgacagcccccaccccatggcttccatcttttgcatcaccaccactcctgaacccccatttctgatttgtcagaatttttttttaacaaaactaaaaatgaaacacatgtgtctgtggtatctataa

SEQ ID NO: 7723 - DNA, 928 bp, Homo sapiens
  source 1..928: mol_type = unassigned DNA
ccaagtgtttacgatacgattggtgtcattgtatgtttctccaaaaggagtctcaccttcgtagcgtaacagtgatgtgagaccacttgctcttctgttagaaatagtatctttgttttcctttgctgttcctcaatcccctactcttcaccccttgttttcacctattttgcgagaacccatccagatcccccttcccttcttcccctgccggcccagttatggcagagaacgatgtggacaatgagctcttggactatgaagatgatgaggtggagacagcagctgggggagatggggctgaggcccctgccaagaaggatgtcaagggctcctatgtctccatccacagctctggctttcgtgacttcctgctcaagccagagttgctccgggccattgtcgactgtggctttgagcatccgtcagaagtccagcatgagtgcatccctcaggccattctgggaatggatgtcctgtgccaggccaagtcgggcatgggaaagacagcagtgtttgtcttggccacactgcaacagctggagccagttactgggcaggtgtctgtgctggtgatgtgtcacactcgggagttggcttttcagatcagcaaggaatatgagcgcttctctaaatacatgcccaatgtcaaggttgctgttttttttggtggtctgtctatcaagaaggatgaagaggtgctgaagaagaactgcccgcatatcgtcgtggggactccaggccgtatcctagccctggctcgaaataagagcctcaacctcaaacacattaaacactttattttggatgaatgtgataagatgcttgaacagctcgacatgcgtcgggatgtccaggaaatttttcgcatgaccccccacgagaagcaggtcatgatgttcagtgctaccttgagcaaagagatccg

SEQ ID NO: 7724 - DNA, 591 bp, Homo sapiens
  source 1..591: mol_type = unassigned DNA
cattgtgttcgttttgctcccttcttccaatgggttcttctcatattggaggcctcagcatcaatgagaggcggcgctcggcgtcccttggtcttgttatggcagagaacgatgtggacaatgagctcttggactatgaagatgatgaggtggagacagcagctgggggagatggggctgaggcccctgccaagaaggatgtcaagggctcctatgtctccatccacagctctggctttcgtgacttcctgctcaagccagagttgctccgggccattgtcgactgtggctttgagcatccgtcagaagtccagcatgagtgcatccctcaggccattctgggaatggatgtcctgtgccaggccaagtcgggcatgggaaagacagcagtgtttgtcttggccacactgcaacagctggagccagttactgggcaggtgtctgtactggtgatgtgtcacactcgggagttggcttttcagatcagcaaggaatatgagcgcttctctaaatacatgcccaatgtcaaggttgctgttttttttggtggtctgtctatcaagaaggatgaagaggtgctgaagaagaact

SEQ ID NO: 7725 - DNA, 583 bp, Homo sapiens
  source 1..583: mol_type = unassigned DNA
agatttccctccttcgtcgctgttgctgccgccatacgcgctctccctgtttagctcttctgttagaaatagtatctttgttttcctttgctgttcctcaatcccctactcttcaccccttgttttcacctattttgcgagaacccatccagatcccccttcccttcttcccctgccggcccagttatggcagagaacgatgtggacaatgagctcttggactatgaagatgatgaggtggagacagcagctgggggagatggggctgaggcccctgccaagaaggatgtcaagggctcctatgtctccatccacagctctggctttcgtgacttcctgctcaagccagagttgctccgggccattgtcgactgtggctttgagcatccgtcagaagtccagcatgagtgcatccctcaggccattctgggaatggatgtcctgtgccaggccaagtcgggcatgggaaagacagcagtgtttgtcttggccacactgcaacagctggagccagttactgggcaggtgtgtttttgtgacagtcacttccctagaggggataatgaagagctacatttaccat

SEQ ID NO: 7726 - DNA, 2178 bp, Homo sapiens
  source 1..2178: mol_type = unassigned DNA
ctcagctagggcctgccggttcctagtgcgtgcccagcagtcctcaggtcaccttcactaccgggccaaggaccccgtgggaactcgcagccttcgccacactcgttcctcgcgcatccatggaggggtgcctacagagaagacctgcgtggcaaaaacctaaacgaagagatgaggggcatggagaggagtaggataagagaataaagataacagtgggggggagacgttagtttcctttatatcttttgttactggcggtagcagtgaagttagaaacggttttaaaacaaatttcagacaggcattttccaaaggcaagcctggagcgcacggatctgtataaccgcggaaggccctgtttccggtcccttgcgcctgcgctcttgcagccaagaaggcgggaggctggagtagagggaagcctgcaaccggaagtgaaggcagatttccctccttcgtcgctgttgctgccgccatacgcgctctccctgtttagctcttctgttagaaatagtatctttgttttcctttgctgttcctcaatcccctactcttcaccccttgttttcacctattttgcgagaacccatccagatcccccttcccttcttcccctgccggcccagttatggcagagaacgatgtggacaatgagctcttggactatgaagatgatgaggtggagacagcagctgggggagatggggctgaggcccctgccaagaaggatgtcaagggctcctatgtctccatccacagctctggctttcgtgacttcctgctcaagccagagttgctccgggccattgtcgactgtggctttgagcatccgtcagaagtccagcatgagtgcatccctcaggccattctgggaatggatgtcctgtgccaggccaagtcgggcatgggaaagacagcagtgtttgtcttggccacactgcaacagctggagccagttactgggcaggtatatttggggagagtgctggggaggggattttggtgtgtttttgtgtctgtactggtgatgtgtcacactcgggagttggcttttcagatcagcaaggaatatgagcgcttctctaaatacatgcccaatgtcaaggttgctgttttttttggtggtctgtctatcaagaaggatgaagaggtgctgaagaagaactgcccgcatatcgtcgtggggactccaggccgtatcctagccctggctcgaaataagagcctcaacctcaaacacattaaacactttattttggatgaatgtgataagatgcttgaacagctcgacatgcgtcgggatgtccaggaaatttttcgcatgaccccccacgagaagcaggtcatgatgttcagtgctaccttgagcaaagagatccgtccagtctgccgcaagttcatgcaagatccaatggagatcttcgtggatgatgagacgaagttgacgctgcatgggttgcagcagtactacgtgaaactgaaggacaacgagaagaaccggaagctctttgaccttctggatgtccttgagttcaaccaggtggtgatctttgtgaagtctgtgcagcggtgcattgccttggcccagctactagtggagcagaacttcccagccattgccatccaccgtgggatgccccaggaggagaggctttctcggtatcagcagtttaaagattttcaacgacgaattcttgtggctaccaacctatttggccgaggcatggacatcgagcgggtgaacattgcttttaattatgacatgcctgaggattctgacacctacctgcatcgggtggccagagcaggccggtttggcaccaagggcttggctatcacatttgtgtccgatgagaatgatgccaagatcctcaatgatgtgcaggatcgctttgaggtcaatattagtgagctgcctgatgagatagacatctcctcctacattgaacagacacggtagaagactcgcccattttggaatgtgaccgtctgtccttcaggagaggacaccagggtgggggtgaaggagacactactgcccccacccctgacagcccccaccccatggcttccatcttttgcatcaccaccactcctgaacccccatttctgatttgtcagaatttttttttaacaaaactaaaaatgaaacacatgtgtctgtggtatctataa

SEQ ID NO: 7727 - DNA, 1005 bp, Homo sapiens; identical to SEQ ID NO: 7710
  source 1..1005: mol_type = unassigned DNA

SEQ ID NO: 7728 - DNA, 561 bp, Homo sapiens; identical to SEQ ID NO: 7707
  source 1..561: mol_type = unassigned DNA

SEQ ID NO: 7729 - DNA, 583 bp, Homo sapiens; identical to SEQ ID NO: 7718
  source 1..583: mol_type = unassigned DNA

SEQ ID NO: 7730 - DNA, 583 bp, Homo sapiens
  source 1..583: mol_type = unassigned DNA
ttcgtcgctgttgctgccgccatacgcgctctccctgtttagggtggagacatgaattttgtttttttgtggccgagccatttgtcttgcaccgcccctcccccccatgctaattacacaaggcttgcttaaacagcggaagggaggatactgagaagtgggaggctgagagctatgggaggtggacggcggccatatgatgttttcttttcgaaagttatggcagagaacgatgtggacaatgagctcttggactatgaagatgatgaggtggagacagcagctgggggagatggggctgaggcccctgccaagaaggatgtcaagggctcctatgtctccatccacagctctggctttcgtgacttcctgctcaagccagagttgctccgggccattgtcgactgtggctttgagcatccgtcagaagtccagcatgagtgcatccctcaggccattctgggaatggatgtcctgtgccaggccaagtcgggcatgggaaagacagcagtgtttgtcttggccacactgcaacagctggagccagttactgggcaggtgtctgtactggtgatgtgtcaca

SEQ ID NO: 7731 - DNA, 583 bp, Homo sapiens; identical to SEQ ID NO: 7725
  source 1..583: mol_type = unassigned DNA

SEQ ID NO: 7732 - DNA, 928 bp, Homo sapiens
  source 1..928: mol_type = unassigned DNA
ccaagtgtttacgatacgattggtgtcattgtatgtttctccaaaaggagtctcaccttcgtagcgtaacagtgatgtgagaccacttgctcttctgttagaaatagtatctttgttttcctttgctgttcctcaatcccctactcttcaccccttgttttcacctattttgcgagaacccatccagatcccccttcccttcttcccctgccggcccagttatggcagagaacgatgtggacaatgagctcttggactatgaagatgatgaggtggagacagcagctgggggagatggggctgaggcccctgccaagaaggatgtcaagggctcctatgtctccatccacagctctggctttcgtgacttcctgctcaagccagagttgctccgggccattgtcgactgtggctttgagcatccgtcagaagtccagcatgagtgcatccctcaggccattctgggaatggatgtcctgtgccaggccaagtcgggcatgggaaagacagcagtgtttgtcttggccacactgcaacagctggagccagttactgggcaggtgtctgtactggtgatgtgtcacactcgggagttggcttttcagatcagcaaggaatatgagcgcttctctaaatacatgcccaatgtcaaggttgctgttttttttggtggtctgtctatcaagaaggatgaagaggtgctgaagaagaactgcccgcatatcgtcgtggggactccaggccgtatcctagccctggctcgaaataagagcctcaacctcaaacacattaaacactttattttggatgaatgtgataagatgcttgaacagctcgacatgcgtcgggatgtccaggaaatttttcgcatgaccccccacgagaagcaggtcatgatgttcagtgctaccttgagcaaagagatccg

SEQ ID NO: 7733 - DNA, 720 bp, Homo sapiens
  source 1..720: mol_type = unassigned DNA
cgctgttgctgccgccatacgcgctctccctgtttagggtggagacatgaattttgtttttttgtggccgagccatttgtcttgcaccgcccctcccccccatgctaattacacaaggcttgcttaaacagcggaagggaggatactgagaagtgggaggctgagagctatgggaggtggacggcggccatatgatgttttcttttcgaaagctcttctgttagaaatagtatctttgttttcctttgctgttcctcaatcccctactcttcaccccttgttttcacctattttgcgagaacccatccagatcccccttcccttcttcccctgccggcccagttatggcagagaacgatgtggacaatgagctcttggactatgaagatgatgaggtggagacagcagctgggggagatggggctgaggcccctgccaagaaggatgtcaagggctcctatgtctccatccacagctctggctttcgtgacttcctgctcaagccagagttgctccgggccattgtcgactgtggctttgagcatccgtcagaagtccagcatgagtgcatccctcaggccattctgggaatggatgtcctgtgccaggccaagtcgggcatgggaaagacagcagtgtttgtcttggccacactgcaacagctggagccagttactgggcaggtgtctgtactggtgatgtgtcacactcgggagttgg

SEQ ID NO: 7734 - DNA, 1201 bp, Homo sapiens
  source 1..1201: mol_type = unassigned DNA
tggccacactgcaacagctggagccagttactgggcaggtgtctgtactggtgatgtgtcacactcgggagttggcttttcagatcagcaaggaatatgagcgcttctctaaatacatgcccaatgtcaaggttgctgttttttttggtggtctgtctatcaagaaggatgaagaggtgctgaagaagaactgcccgcatatcgtcgtggggactccaggccgtatcctagccctggctcgaaataagagcctcaacctcaaacacattaaacactttattttggatgaatgtgataagatgcttgaacagctcgacatgcgtcgggatgtccaggaaatttttcgcatgaccccccacgagaagcaggtcatgatgttcagtgctaccttgagcaaagagatccgtccagtctgccgcaagttcatgcaagatccaatggagatcttcgtggatgatgagacgaagttgacgctgcatgggttgcagcagtactacgtgaaactgaaggacaacgagaagaaccggaagctctttgaccttctggatgtccttgagttcaaccaggtggtgatctttgtgaagtctgtgcagcggtgcattgccttggcccagctactagtggagcagaacttcccagccattgccatccaccgtgggatgccccaggaggagaggctttctcggtatcagcagtttaaagattttcaacgacgaattcttgtggctaccaacctatttggccgaggcatggacatcgagcgggtgaacattgcttttaattatgacatgcctgaggattctgacacctacctgcatcgggtggccagagcaggccggtttggcaccaagggcttggctatcacatttgtgtccgatgagaatgatgccaagatcctcaatgatgtgcaggatcgctttgaggtcaatattagtgagctgcctgatgagatagacatctcctcctacattgaacagacacggtagaagactcgcccattttggaatgtgaccgtctgtccttcaggagaggacaccagggtgggggtgaaggagacactactgcccccacccctgacagcccccaccccatggcttccatcttttgcatcaccaccactcctgaacccccatttctgatttgtcagaatttttttttaacaaaactaaaaatgaaacacatgtgtctgtggtatctataa

SEQ ID NO: 7735 - DNA, 928 bp, Homo sapiens; identical to SEQ ID NO: 7723
  source 1..928: mol_type = unassigned DNA

SEQ ID NO: 7736 - DNA, 561 bp, Homo sapiens; identical to SEQ ID NO: 7707
  source 1..561: mol_type = unassigned DNA

SEQ ID NO: 7737 - DNA, 720 bp, Homo sapiens; identical to SEQ ID NO: 7705
  source 1..720: mol_type = unassigned DNA

SEQ ID NO: 7738 - DNA, 659 bp, Homo sapiens; identical to SEQ ID NO: 7712
  source 1..659: mol_type = unassigned DNA

SEQ ID NO: 7739 - DNA, 720 bp, Homo sapiens; identical to SEQ ID NO: 7705
  source 1..720: mol_type = unassigned DNA

SEQ ID NO: 7740 - DNA, 1201 bp, Homo sapiens; identical to SEQ ID NO: 7734
  source 1..1201: mol_type = unassigned DNA

SEQ ID NO: 7741 - DNA, 1005 bp, Homo sapiens
  source 1..1005: mol_type = unassigned DNA
ttggatttttctcaccttgacttgcccaacttaatttggagtgccttccaagtgtttacgatacgattggtgtcattgtatgtttctccaaaaggagtctcaccttcgtagcgtaacagtgatgtgagaccacttgttatggcagagaacgatgtggacaatgagctcttggactatgaagatgatgaggtggagacagcagctgggggagatggggctgaggcccctgccaagaaggatgtcaagggctcctatgtctccatccacagctctggctttcgtgacttcctgctcaagccagagttgctccgggccattgtcgactgtggctttgagcatccgtcagaagtccagcatgagtgcatccctcaggccattctgggaatggatgtcctgtgccaggccaagtcgggcatgggaaagacagcagtgtttgtcttggccacactgcaacagctggagccagttactgggcaggtgtctgtactggtgatgtgtcacactcgggagttggcttttcagatcagcaaggaatatgagcgcttctctaaatacatgcccaatgtcaaggttgctgttttttttggtggtctgtctatcaagaaggatgaagaggtgctgaagaagaactgcccgcatatcgtcgtggggactccaggccgtatcctagccctggctcgaaataagagcctcaacctcaaacacattaaacactttattttggatgaatgtgataagatgcttgaacagctcgacatgcgtcgggatgtccaggaaatttttcgcatgaccccccacgagaagcaggtcatgatgttcagtgctaccttgagcaaagagatccgtccagtctgccgcaagttcatgcaagatccaatggagatcttcgtggatgatgagacgaagttgacgctgcatgggttgcagcagtactacgtgaaactgaaggacaacgagaagaaccggaagctctttgaccttctggatgtccttgagttcaaccag

SEQ ID NO: 7742 - DNA, 914 bp, Homo sapiens; identical to SEQ ID NO: 7717
  source 1..914: mol_type = unassigned DNA

SEQ ID NO: 7743 - DNA, 914 bp, Homo sapiens; identical to SEQ ID NO: 7717
  source 1..914: mol_type = unassigned DNA

SEQ ID NO: 7744 - DNA, 394 bp, Homo sapiens
  source 1..394: mol_type = unassigned DNA
tggccacactgcaacagctggagccagttactgggcaggtgtctgtactggtgatgtgtcacactcgggagttggcttttcagatcagcaaggaatatgagcgcttctctaaatacatgcccaatgtcaaggttgctgttttttttggtggtctgtctatcaagaaggatgaagaggtgctgaagaagaactgcccgcatatcgtcgtggggactccaggccgtatcctagccctggctcgaaataagagcctcaacctcaaacacattaaacactttattttggatgaatgtgataagatgcttgaacagctcgacatgcgtcgggatgtccaggaaatttttcgcatgaccccccacgagaagcaggtcatgatgttcagtgctaccttgag

SEQ ID NO: 7745 - DNA, 406 bp, Homo sapiens
  source 1..406: mol_type = unassigned DNA
tggccacactgcaacagctggagccagttactgggcaggtgtctgtactggtgatgtgtcacactcgggagttggcttttcagatcagcaaggaatatgagcgcttctctaaatacatgcccaatgtcaaggttgctgttttttttggtggtctgtctatcaagaaggatgaagaggtgctgaagaagaactgcccgcatatcgtcgtggggactccaggccgtatcctagccctggctcgaaataagagcctcaacctcaaacacattaaacactttattttggatgaatgtgataagatgcttgaacagctcgacatgcgtcgggatgtccaggaaatttttcgcatgaccccccacgagaagcaggtcatgatgttcagtgctaccttgagcaaagagatccg

SEQ ID NO: 7746 - DNA, 817 bp, Homo sapiens
  source 1..817: mol_type = unassigned DNA
accggaagtgaaggcagatttccctccttcgtcgctgttgctgccgccatacgcgctctccctgtttagatcccccttcccttcttcccctgccggcccagttatggcagagaacgatgtggacaatgagctcttggactatgaagatgatgaggtggagacagcagctgggggagatggggctgaggcccctgccaagaaggatgtcaagggctcctatgtctccatccacagctctggctttcgtgacttcctgctcaagccagagttgctccgggccattgtcgactgtggctttgagcatccgtcagaagtccagcatgagtgcatccctcaggccattctgggaatggatgtcctgtgccaggccaagtcgggcatgggaaagacagcagtgtttgtcttggccacactgcaacagctggagccagttactgggcaggtgtctgtactggtgatgtgtcacactcgggagttggcttttcagatcagcaaggaatatgagcgcttctctaaatacatgcccaatgtcaaggttgctgttttttttggtggtctgtctatcaagaaggatgaagaggtgctgaagaagaactgcccgcatatcgtcgtggggactccaggccgtatcctagccctggctcgaaataagagcctcaacctcaaacacattaaacactttattttggatgaatgtgataagatgcttgaacagctcgacatgcgtcgggatgtccaggaaatttttcgcatgaccccccacgagaagcaggtcatgatgttcagtgctaccttgagcaaagagatccgtccagtc

SEQ ID NO: 7747 - DNA, 561 bp, Homo sapiens; identical to SEQ ID NO: 7707
  source 1..561: mol_type = unassigned DNA

SEQ ID NO: 7748 - DNA, 633 bp, Homo sapiens
  source 1..633: mol_type = unassigned DNA
cgtcgctgttgctgccgccatacgcgctctccctgtttagttatggcagagaacgatgtggacaatgagctcttggactatgaagatgatgaggtggagacagcagctgggggagatggggctgaggcccctgccaagaaggatgtcaagggctcctatgtctccatccacagctctggctttcgtgacttcctgctcaagccagagttgctccgggccattgtcgactgtggctttgagcatccgtcagaagtccagcatgagtgcatccctcaggccattctgggaatggatgtcctgtgccaggccaagtcgggcatgggaaagacagcagtgtttgtcttggccacactgcaacagctggagccagttactgggcaggtgtgtttttgtgacagtcacttccctagaggggataatgaagagctacatttaccatatgtctccgtctacttcctgcctaaggtgtctgtactggtgatgtgtcacactcgggagttggcttttcagatcagcaaggaatatgagcgcttctctaaatacatgcccaatgtcaaggttgctgttttttttggtggtctgtctatcaagaaggatgaagaggtgctgaagaagaactgcccgcatatcgtc

SEQ ID NO: 7749 - DNA, 633 bp, Homo sapiens; identical to SEQ ID NO: 7748
  source 1..633: mol_type = unassigned DNA

SEQ ID NO: 7750 - DNA, 583 bp, Homo sapiens; identical to SEQ ID NO: 7718
  source 1..583: mol_type = unassigned DNA

SEQ ID NO: 7751 - DNA, 1529 bp, Homo sapiens; identical to SEQ ID NO: 7700
  source 1..1529: mol_type = unassigned DNA

SEQ ID NO: 7752 - DNA, 2133 bp, Homo sapiens; identical to SEQ ID NO: 7699
  source 1..2133: mol_type = unassigned DNA

SEQ ID NO: 7753 - DNA, 2003 bp, Homo sapiens
  source 1..2003: mol_type = unassigned DNA
ctcagctagggcctgccggttcctagtgcgtgcccagcagtcctcaggtcaccttcactaccgggccaaggaccccgtgggaactcgcagccttcgccacactcgttcctcgcgcatccatggaggggtgcctacagagaagacctgcgtggcaaaaacctaaacgaagagatgaggggcatggagaggagtaggataagagaataaagataacagtgggggggagacgttagtttcctttatatcttttgttactggcggtagcagtgaagttagaaacggttttaaaacaaatttcagacaggcattttccaaaggcaagcctggagcgcacggatctgtataaccgcggaaggccctgtttccggtcccttgcgcctgcgctcttgcagccaagaaggcgggaggctggagtagagggaagcctgcaaccggaagtgaaggcagatttccctccttcgtcgctgttgctgccgccatacgcgctctccctgtttagttatggcagagaacgatgtggacaatgagctcttggactatgaagatgatgaggtggagacagcagctgggggagatggggctgaggcccctgccaagaaggatgtcaagggctcctatgtctccatccacagctctggctttcgtgacttcctgctcaagccagagttgctccgggccattgtcgactgtggctttgagcatccgtcagaagtccagcatgagtgcatccctcaggccattctgggaatggatgtcctgtgccaggccaagtcgggcatgggaaagacagcagtgtttgtcttggccacactgcaacagctggagccagttactgggcaggtgtctgtactggtgatgtgtcacactcgggagttggcttttcagatcagcaaggaatatgagcgcttctctaaatacatgcccaatgtcaaggttgctgttttttttggtggtctgtctatcaagaaggatgaagaggtgctgaagaagaactgcccgcatatcgtcgtggggactccaggccgtatcctagccctggctcgaaataagagcctcaacctcaaacacattaaacactttattttggatgaatgtgataagatgcttgaacagctcgacatgcgtcgggatgtccaggaaatttttcgcatgaccccccacgagaagcaggtcatgatgttcagtgctaccttgagcaaagagatccgtccagtctgccgcaagttcatgcaagatccaatggagatcttcgtggatgatgagacgaagttgacgctgcatgggttgcagcagtactacgtgaaactgaaggacaacgagaagaaccggaagctctttgaccttctggatgtccttgagttcaaccaggtggtgatctttgtgaagtctgtgcagcggtgcattgccttggcccagctactagtggagcagaacttcccagccattgccatccaccgtgggatgccccaggaggagaggctttctcggtatcagcagtttaaagattttcaacgacgaattcttgtggctaccaacctatttggccgaggcatggacatcgagcgggtgaacattgcttttaattatgacatgcctgaggattctgacacctacctgcatcgggtggccagagcaggccggtttggcaccaagggcttggctatcacatttgtgtccgatgagaatgatgccaagatcctcaatgatgtgcaggatcgctttgaggtcaatattagtgagctgcctgatgagatagacatctcctcctacattgaacagacacggtagaagactcgcccattttggaatgtgaccgtctgtccttcaggagaggacaccagggtgggggtgaaggagacactactgcccccacccctgacagcccccaccccatggcttccatcttttgcatcaccaccactcctgaacccccatttctgatttgtcagaatttttttttaacaaaactaaaaatgaaacacatgtgtctgtggtatctataa

SEQ ID NO: 7754 - DNA, 914 bp, Homo sapiens; identical to SEQ ID NO: 7717
  source 1..914: mol_type = unassigned DNA

SEQ ID NO: 7755 - DNA, 932 bp, Homo sapiens; identical to SEQ ID NO: 7714
  source 1..932: mol_type = unassigned DNA

SEQ ID NO: 7756 - DNA, 633 bp, Homo sapiens; identical to SEQ ID NO: 7720
  source 1..633: mol_type = unassigned DNA

SEQ ID NO: 7757 - DNA, 633 bp, Homo sapiens; identical to SEQ ID NO: 7720
  source 1..633: mol_type = unassigned DNA

SEQ ID NO: 7758 - DNA, 539 bp, Homo sapiens
  source 1..539: mol_type = unassigned DNA
gttgctgttttttttggtggtctgtctatcaagaaggatgaagaggtgctgaagaagaactgcccgcatatcgtcgtggggactccaggccgtatcctagccctggctcgaaataagagcctcaacctcaaacacattaaacactttattttggatgaatgtgataagatgcttgaacagctcgacatgcgtcgggatgtccaggaaatttttcgcatgaccccccacgagaagcaggtcatgatgttcagtgctaccttgagcaaagagatccgtccagtctgccgcaagttcatgcaagatccaatggagatcttcgtggatgatgagacgaagttgacgctgcatgggttgcagcagtactacgtgaaactgaaggacaacgagaagaaccggaagctctttgaccttctggatgtccttgagttcaaccaggtggtgatctttgtgaagtctgtgcagcggtgcattgccttggcccagctactagtggagcagaacttcccagccattgccatccaccgtgggatgccccagga

SEQ ID NO: 7759 - DNA, 633 bp, Homo sapiens; identical to SEQ ID NO: 7720
  source 1..633: mol_type = unassigned DNA

SEQ ID NO: 7760 - DNA, 561 bp, Homo sapiens; identical to SEQ ID NO: 7707
  source 1..561: mol_type = unassigned DNA

SEQ ID NO: 7761 - DNA, 192 bp, Homo sapiens
  source 1..192: mol_type = unassigned DNA
tggccacactgcaacagctggagccagttactgggcaggtgtctgtactggtgatgtgtcacactcgggagttggcttttcagatcagcaaggaatatgagcgcttctctaaatacatgcccaatgtcaaggttgctgttttttttggtggtctgtctatcaagaaggatgaagaggtgctgaagaagaact

SEQ ID NO: 7762 - DNA, 75 bp, Homo sapiens
  source 1..75: mol_type = unassigned DNA
tggccacactgcaacagctggagccagttactgggcaggtgtctgtactggtgatgtgtcacactcgggagttgg

SEQ ID NO: 7763 - DNA, 63 bp, Homo sapiens
  source 1..63: mol_type = unassigned DNA
tggccacactgcaacagctggagccagttactgggcaggtgtctgtactggtgatgtgtcaca

SEQ ID NO: 7764 - DNA, 1005 bp, Homo sapiens; identical to SEQ ID NO: 7710
  source 1..1005: mol_type = unassigned DNA

SEQ ID NO: 7765 - DNA, 928 bp, Homo sapiens; identical to SEQ ID NO: 7723
  source 1..928: mol_type = unassigned DNA

SEQ ID NO: 7766 - DNA, 928 bp, Homo sapiens; identical to SEQ ID NO: 7732
  source 1..928: mol_type = unassigned DNA

SEQ ID NO: 7767 - DNA, 1224 bp, Homo sapiens
  source 1..1224: mol_type = unassigned DNA
tggccacactgcaacagctggagccagttactgggcaggtgtctgtactggtgatgtgtcacactcgggagttggcttttcagatcagcaaggaatatgagcgcttctctaaatacatgcccaatgtcaaggttgctgttttttttggtggtctgtctatcaagaaggatgaagaggtgctgaagaagaactgcccgcatatcgtcgtggggactccaggccgtatcctagccctggctcgaaataagagcctcaacctcaaacacattaaacactttattttggatgaatgtgataagatgcttgaacagctcgacatgcgtcgggatgtccaggaaatttttcgcatgaccccccacgagaagcaggtcatgatgttcagtgctaccttgagcaaagagatccgtccagtctgccgcaagttcatgcaagatccaatggagatcttcgtggatgatgagacgaagttgacgctgcatgggttgcagcagtactacgtgaaactgaaggacaacgagaagaaccggaagctctttgaccttctggatgtccttgagttcaaccaggtggtgatctttgtgaagtctgtgcagcggtgcattgccttggcccagctactagtggagcagaacttcccagccattgccatccaccgtgggatgccccaggaggagaggctttctcggtatcagcagtttaaagattttcaacgacgaattcttgtggctaccaacctatttggccgaggcatggacatcgagcgggtgaacattgcttttaattatgacatgcctgaggattctgacacctacctgcatcggtgctaccctctgtctccctccaggtggccagagcaggccggtttggcaccaagggcttggctatcacatttgtgtccgatgagaatgatgccaagatcctcaatgatgtgcaggatcgctttgaggtcaatattagtgagctgcctgatgagatagacatctcctcctacattgaacagacacggtagaagactcgcccattttggaatgtgaccgtctgtccttcaggagaggacaccagggtgggggtgaaggagacactactgcccccacccctgacagcccccaccccatggcttccatcttttgcatcaccaccactcctgaacccccatttctgatttgtcagaatttttttttaacaaaactaaaaatgaaacacatgtgtctgtggtatctataa

SEQ ID NO: 7768 - DNA, 817 bp, Homo sapiens
  source 1..817: mol_type = unassigned DNA
accggaagtgaaggcagatttccctccttcgtcgctgttgctgccgccatacgcgctctccctgtttagatcccccttcccttcttcccctgccggcccagttatggcagagaacgatgtggacaatgagctcttggactatgaagatgatgaggtggagacagcagctgggggagatggggctgaggcccctgccaagaaggatgtcaagggctcctatgtctccatccacagctctggctttcgtgacttcctgctcaagccagagttgctccgggccattgtcgactgtggctttgagcatccgtcagaagtccagcatgagtgcatccctcaggccattctgggaatggatgtcctgtgccaggccaagtcgggcatgggaaagacagcagtgtttgtcttggccacactgcaacagctggagccagttactgggcaggtgtctgtgctggtgatgtgtcacactcgggagttggcttttcagatcagcaaggaatatgagcgcttctctaaatacatgcccaatgtcaaggttgctgttttttttggtggtctgtctatcaagaaggatgaagaggtgctgaagaagaactgcccgcatatcgtcgtggggactccaggccgtatcctagccctggctcgaaataagagcctcaacctcaaacacattaaacactttattttggatgaatgtgataagatgcttgaacagctcgacatgcgtcgggatgtccaggaaatttttcgcatgaccccccacgagaagcaggtcatgatgttcagtgctaccttgagcaaagagatccgtccagtc

SEQ ID NO: 7769 - DNA, 817 bp, Homo sapiens; identical to SEQ ID NO: 7768
  source 1..817: mol_type = unassigned DNA

SEQ ID NO: 7770 - DNA, 1005 bp, Homo sapiens
  source 1..1005: mol_type = unassigned DNA
ttggatttttctcaccttgacttggccaacttaatttggagtgccttccaagtgtttacgatacgattggtgtcattgtatgtttctccaaaaggagtctcaccttcgtagcgtaacagtgatgtgagaccacttgttatggcagagaacgatgtggacaatgagctcttggactatgaagatgatgaggtggagacagcagctgggggagatggggctgaggcccctgccaagaaggatgtcaagggctcctatgtctccatccacagctctggctttcgtgacttcctgctcaagccagagttgctccgggccattgtcgactgtggctttgagcatccgtcagaagtccagcatgagtgcatccctcaggccattctgggaatggatgtcctgtgccaggccaagtcgggcatgggaaagacagcagtgtttgtcttggccacactgcaacagctggagccagttactgggcaggtgtctgtgctggtgatgtgtcacactcgggagttggcttttcagatcagcaaggaatatgagcgcttctctaaatacatgcccaatgtcaaggttgctgttttttttggtggtctgtctatcaagaaggatgaagaggtgctgaagaagaactgcccgcatatcgtcgtggggactccaggccgtatcctagccctggctcgaaataagagcctcaacctcaaacacattaaacactttattttggatgaatgtgataagatgcttgaacagctcgacatgcgtcgggatgtccaggaaatttttcgcatgaccccccacgagaagcaggtcatgatgttcagtgctaccttgagcaaagagatccgtccagtctgccgcaagttcatgcaagatccaatggagatcttcgtggatgatgagacgaagttgacgctgcatgggttgcagcagtactacgtgaaactgaaggacaacgagaagaaccggaagctctttgaccttctggatgtccttgagttcaaccag

SEQ ID NO: 7771 - DNA, 1529 bp, Homo sapiens; identical to SEQ ID NO: 7700
  source 1..1529: mol_type = unassigned DNA

SEQ ID NO: 7772 - DNA, 583 bp, Homo sapiens; identical to SEQ ID NO: 7718
  source 1..583: mol_type = unassigned DNA

SEQ ID NO: 7773 - DNA, 591 bp, Homo sapiens; identical to SEQ ID NO: 7703
  source 1..591: mol_type = unassigned DNA

SEQ ID NO: 7774 - DNA, 583 bp, Homo sapiens; identical to SEQ ID NO: 7725
  source 1..583: mol_type = unassigned DNA

SEQ ID NO: 7775 - DNA, 1005 bp, Homo sapiens; identical to SEQ ID NO: 7741
  source 1..1005: mol_type = unassigned DNA

SEQ ID NO: 7776 - DNA, 2003 bp, Homo sapiens
  source 1..2003: mol_type = unassigned DNA
ctcagctagggcctgccggttcctagtgcgtgcccagcagtcctcaggtcaccttcactaccgggccaaggaccccgtgggaactcgcagccttcgccacactcgttcctcgcgcatccacggaggggtgcctacagagaagacctgcgtggcaaaaacctaaacgaagagatgaggggcatggagaggagtaggataagagaataaagataacagtgggggggagacgttagtttcctttatatattttgttactggcggtagcagtgaagttagaaacggttttaaaacaaatttcagacaggcattttccaaaggcaagcctggagcgcacggatctgtataaccgcggaaggccctgtttccggtcccttgcgcctgcgctcttgcagccaagaaggcgggaggctggagtagagggaagcctgcaaccggaagtgaaggcagatttccctccttcgtcgctgttgctgccgccatacgcgctctccctgtttagttatggcagagaacgatgtggacaatgagctcttggactatgaagatgatgaggtggagacagcagctgggggagatggggctgaggcccctgccaagaaggatgtcaagggctcctatgtctccatccacagctctggctttcgtgacttcctgctcaagccagagttgctccgggccattgtcgactgtggctttgagcatccgtcagaagtccagcatgagtgcatccctcaggccattctgggaatggatgtcctgtgccaggccaagtcgggcatgggaaagacagcagtgtttgtcttggccacactgcaacagctggagccagttactgggcaggtgtctgtgctggtgatgtgtcacactcgggagttggcttttcagatcagcaaggaatatgagcgcttctctaaatacatgcccaatgtcaaggttgctgttttttttggtggtctgtctatcaagaaggatgaagaggtgctgaagaagaactgcccgcatatcgtcgtggggactccaggccgtatcctagccctggctcgaaataagagcctcaacctcaaacacattaaacactttattttggatgaatgtgataagatgcttgaacagctcgacatgcgtcgggatgtccaggaaatttttcgcatgaccccccacgagaagcaggtcatgatgttcagtgctaccttgagcaaagagatccgtccagtctgccgcaagttcatgcaagatccaatggagatcttcgtggatgatgagacgaagttgacgctgcatgggttgcagcagtactacgtgaaactgaaggacaacgagaagaaccggaagctctttgaccttctggatgtccttgagttcaaccaggtggtgatctttgtgaagtctgtgcagcggtgcattgccttggcccagctactagtggagcagaacttcccagccattgccatccaccgtgggatgccccaggaggagaggctttctcggtatcagcagtttaaagattttcaacgacgaattcttgtggctaccaacctatttggccgaggcatggacatcgagcgggtgaacattgcttttaattatgacatgcctgaggattctgacacctacctgcatcgggtggccagagcaggccggtttggcaccaagggcttggctatcacatttgtgtccgatgagaatgatgccaagatcctcaatgatgtgcaggatcgctttgaggtcaatattagtgagctgcctgatgagatagacatctcctcctacattgaacagacacggtagaagactcgcccattttggaatgtgaccgtctgtccttcaggagaggacaccagggtgggggtgaaggagacactactgcccccacccctgacagcccccaccccatggcttccatcttttgcatcaccaccactcctgaacccccatttctgatttgtcagaatttttttttaacaaaactaaaaatgaaacacatgtgtctgtggtatctataa

SEQ ID NO: 7777 - DNA, 591 bp, Homo sapiens; identical to SEQ ID NO: 7703
  source 1..591: mol_type = unassigned DNA

SEQ ID NO: 7778 - DNA, 659 bp, Homo sapiens; identical to SEQ ID NO: 7712
  source 1..659: mol_type = unassigned DNA

SEQ ID NO: 7779 - DNA, 591 bp, Homo sapiens; identical to SEQ ID NO: 7703
  source 1..591: mol_type = unassigned DNA

SEQ ID NO: 7780 - DNA, 633 bp, Homo sapiens; identical to SEQ ID NO: 7720
  source 1..633: mol_type = unassigned DNA

SEQ ID NO: 7781 - DNA, 659 bp, Homo sapiens; identical to SEQ ID NO: 7712
  source 1..659: mol_type = unassigned DNA

SEQ ID NO: 7782 - DNA, 932 bp, Homo sapiens
  source 1..932: mol_type = unassigned DNA
cttcgctacaatccgtttccatctgcgcttctccgcacccatcccgtcacatgggttcctgatacccttttcacaggcgatggtctggtcgctggggcctagttgctcttctgttagaaatagtatctttgttttcctttgctgttcctcaatcccctactcttcaccccttgttttcacctattttgcgagaacccatccagatcccccttcccttcttcccctgccggcccagttatggcagagaacgatgtggacaatgagctcttggactatgaagatgatgaggtggagacagcagctgggggagatggggctgaggcccctgccaagaaggatgtcaagggctcctatgtctccatccacagctctggctttcgtgacttcctgctcaagccagagttgctccgggccattgtcgactgtggctttgagcatccgtcagaagtccagcatgagtgcatccctcaggccattctgggaatggatgtcctgtgccaggccaagtcgggcatgggaaagacagcagtgtttgtcttggccacactgcaacagctggagccagttactgggcaggtgtctgtactggtgatgtgtcacactcgggagttggcttttcagatcagcaaggaatatgagcgcttctctaaatacatgcccaatgtcaaggttgctgttttttttggtggtctgtctatcaagaaggatgaagaggtgctgaagaagaactgcccgcatatcgtcgtggggactccaggccgtatcctagccctggctcgaaataagagcctcaacctcaaacacattaaacactttattttggatgaatgtgataagatgcttgaacagctcgacatgcgtcgggatgtccaggaaatttttcgcatgaccccccacgagaagcaggtcatgatgttcagtgctaccttgag

SEQ ID NO: 7783 - DNA, 932 bp, Homo sapiens; identical to SEQ ID NO: 7714
  source 1..932: mol_type = unassigned DNA

SEQ ID NO: 7784 - DNA, 817 bp, Homo sapiens; identical to SEQ ID NO: 7746
  source 1..817: mol_type = unassigned DNA

SEQ ID NO: 7785 - DNA, 2039 bp, Homo sapiens; identical to SEQ ID NO: 7698
  source 1..2039: mol_type = unassigned DNA

SEQ ID NO: 7786 - DNA, 561 bp, Homo sapiens; identical to SEQ ID NO: 7707
  source 1..561: mol_type = unassigned DNA

SEQ ID NO: 7787 - DNA, 591 bp, Homo sapiens; identical to SEQ ID NO: 7703
  source 1..591: mol_type = unassigned DNA

SEQ ID NO: 7788 - DNA, 817 bp, Homo sapiens; identical to SEQ ID NO: 7768
  source 1..817: mol_type = unassigned DNA

SEQ ID NO: 7789 - DNA, 914 bp, Homo sapiens; identical to SEQ ID NO: 7717
  source 1..914: mol_type = unassigned DNA

SEQ ID NO: 7790 - DNA, 1529 bp, Homo sapiens; identical to SEQ ID NO: 7700
  source 1..1529: mol_type = unassigned DNA

SEQ ID NO: 7791 - DNA, 928 bp, Homo sapiens; identical to SEQ ID NO: 7723
  source 1..928: mol_type = unassigned DNA

SEQ ID NO: 7792 - DNA, 914 bp, Homo sapiens; identical to SEQ ID NO: 7717
  source 1..914: mol_type = unassigned DNA

SEQ ID NO: 7793 - DNA, 2133 bp, Homo sapiens
  source 1..2133: mol_type = unassigned DNA
ctcagctagggcctgccggttcctagtgcgtgcccagcagtcctcaggtcaccttcactaccgggccaaggaccccgtgggaactcgcagccttcgccacactcgttcctcgcgcatccacggaggggtgcctacagagaagacctgcgtggcaaaaacctaaacgaagagatgaggggcatggagaggagtaggataagagaataaagataacagtggggggcagacgttagtttcctttatatcttttgttactggcggtagcagtgaagttagaaacggttttaaaacaaatttcagacaggcattttccaaaggcaagcctggagcgcacggatctgtataaccgcggaaggccctgtttccggtcccttgcgcctgcgctcttgcagccaagaaggcgggaggctggagtagagggaagcctgcaaccggaagtgaaggcagatttccctccttcgtcgctgttgctgccgccatacgcgctctccctgtttagctcttctgttagaaatagtatctttgttttcctttgctgttcctcaatcccctactcttcaccccttgttttcacctattttgcgagaacccatccagatcccccttcccttcttcccctgccggcccagttatggcagagaacgatgtggacaatgagctcttggactatgaagatgatgaggtggagacagcagctgggggagatggggctgaggcccctgccaagaaggatgtcaagggctcctatgtctccatccacagctctggctttcgtgacttcctgctcaagccagagttgctccgggccattgtcgactgtggctttgagcatccgtcagaagtccagcatgagtgcatccctcaggccattctgggaatggatgtcctgtgccaggccaagtcgggcatgggaaagacagcagtgtttgtcttggccacactgcaacagctggagccagttactgggcaggtgtctgtgctggtgatgtgtcacactcgggagttggcttttcagatcagcaaggaatatgagcgcttctctaaatacatgcccaatgtcaaggttgctgttttttttggtggtctgtctatcaagaaggatgaagaggtgctgaagaagaactgcccgcatatcgtcgtggggactccaggccgtatcctagccctggctcgaaataagagcctcaacctcaaacacattaaacactttattttggatgaatgtgataagatgcttgaacagctcgacatgcgtcgggatgtccaggaaatttttcgcatgaccccccacgagaagcaggtcatgatgttcagtgctaccttgagcaaagagatccgtccagtctgccgcaagttcatgcaagatccaatggagatcttcgtggatgatgagacgaagttgacgctgcatgggttgcagcagtactacgtgaaactgaaggacaacgagaagaaccggaagctctttgaccttctggatgtccttgagttcaaccaggtggtgatctttgtgaagtctgtgcagcggtgcattgccttggcccagctactagtggagcagaacttcccagccattgccatccaccgtgggatgccccaggaggagaggctttctcggtatcagcagtttaaagattttcaacgacgaattcttgtggctaccaacctatttggccgaggcatggacatcgagcgggtgaacattgcttttaattatgacatgcctgaggattctgacacctacctgcatcgggtggccagagcaggccggtttggcaccaagggcttggctatcacatttgtgtccgatgagaatgatgccaagatcctcaatgatgtgcaggatcgctttgaggtcaatattagtgagctgcctgatgagatagacatctcctcctacattgaacagacacggtagaagactcgcccattttggaatgtgaccgtctgtccttcaggagaggacaccagggtgggggtgaaggagacactactgcccccacccctgacagcccccaccccatggcttccatcttttgcatcaccaccactcctgaacccccatttctgatttgtcagaatttttttttaacaaaactaaaaatgaaacacatgtgtctgtggtatctataa

SEQ ID NO: 7794 - DNA, 583 bp, Homo sapiens; identical to SEQ ID NO: 7718
  source 1..583: mol_type = unassigned DNA

SEQ ID NO: 7795 - DNA, 1201 bp, Homo sapiens; identical to SEQ ID NO: 7734
  source 1..1201: mol_type = unassigned DNA

SEQ ID NO: 7796 - DNA, 583 bp, Homo sapiens; identical to SEQ ID NO: 7725
  source 1..583: mol_type = unassigned DNA

SEQ ID NO: 7797 - DNA, 867 bp, Homo sapiens
  source 1..867: mol_type = unassigned DNA
agatttccctccttcgtcgctgttgctgccgccatacgcgctctccctgtttagctcttctgttagaaatagtatctttgttttcctttgctgttcctcaatcccctactcttcaccccttgttttcacctattttgcgagaacccatccagatcccccttcccttcttcccctgccggcccagttatggcagagaacgatgtggacaatgagctcttggactatgaagatgatgaggtggagacagcagctgggggagatggggctgaggcccctgccaagaaggatgtcaagggctcctatgtctccatccacagctctggctttcgtgacttcctgctcaagccagagttgctccgggccattgtcgactgtggctttgagcatccgtcagaagtccagcatgagtgcatccctcaggccattctgggaatggatgtcctgtgccaggccaagtcgggcatgggaaagacagcagtgtttgtcttggccacactgcaacagctggagccagttactgggcagagccatgagcacatgacctctgttacccttgacaacctgacagctgtgggggatgttctgtcgcaagcgtggggttcatgatttagatcacataattgaagtcatttattatcggcccaggtgtctgtactggtgatgtgtcacactcgggagttggcttttcagatcagcaaggaatatgagcgcttctctaaatacatgcccaatgtcaaggttgctgttttttttggtggtctgtctatcaagaaggatgaagaggtgctgaagaagaactgcccgcatatcgtcgtggggactccaggccgtatcctagccctggctcgaaataagagcctcaacctc

SEQ ID NO: 7798 - DNA, 817 bp, Homo sapiens; identical to SEQ ID NO: 7768
  source 1..817: mol_type = unassigned DNA

SEQ ID NO: 7799 - DNA, 591 bp, Homo sapiens; identical to SEQ ID NO: 7724
  source 1..591: mol_type = unassigned DNA

SEQ ID NO: 7800 - DNA, 928 bp, Homo sapiens; identical to SEQ ID NO: 7723
  source 1..928: mol_type = unassigned DNA

SEQ ID NO: 7801 - DNA, 1529 bp, Homo sapiens; identical to SEQ ID NO: 7697
  source 1..1529: mol_type = unassigned DNA

SEQ ID NO: 7802 - DNA, 932 bp, Homo sapiens; identical to SEQ ID NO: 7714
  source 1..932: mol_type = unassigned DNA

SEQ ID NO: 7803 - DNA, 96 bp, Homo sapiens
  source 1..96: mol_type = unassigned DNA
tggccacactgcaacagctggagccagttactgggcaggtgtgtttttgtgacagtcacttccctagaggggataatgaagagctacatttaccat

SEQ ID NO: 7804 - DNA, 583 bp, Homo sapiens; identical to SEQ ID NO: 7725
  source 1..583: mol_type = unassigned DNA

SEQ ID NO: 7805 - DNA, 583 bp, Homo sapiens; identical to SEQ ID NO: 7725
  source 1..583: mol_type = unassigned DNA

SEQ ID NO: 7806 - DNA, 914 bp, Homo sapiens; identical to SEQ ID NO: 7717
  source 1..914: mol_type = unassigned DNA

SEQ ID NO: 7807 - DNA, 932 bp, Homo sapiens; identical to SEQ ID NO: 7714
  source 1..932: mol_type = unassigned DNA

SEQ ID NO: 7808 - DNA, 1337 bp, Homo sapiens
  source 1..1337: mol_type = unassigned DNA
ttcgtcgctgttgctgccgccatacgcgctctccctgtttagctcttctgttagaaatagtatctttgttttcctttgctgttcctcaatcccctactcttcaccccttgttttcacctattttgcgagaacccatccagatcccccttcccttcttcccctgccggcccagttatggcagagaacgatgtggacaatgagctcttggactatgaagatgatgaggtggagacagcagctgggggagatggggctgaggcccctgccaagaaggatgtcaagggctcctatgtctccatccacagctctggctttcgtgacttcctgctcaagccagagttgctccgggccattgtcgactgtggctttgagcatccgtcagaaggtgtctgtactggtgatgtgtcacactcgggagttggcttttcagatcagcaaggaatatgagcgcttctctaaatacatgcccaatgtcaaggttgctgttttttttggtggtctgtctatcaagaaggatgaagaggtgctgaagaagaactgcccgcatatcgtcgtggggactccaggccgtatcctagccctggctcgaaataagagcctcaacctcaaacacattaaacactttattttggatgaatgtgataagatgcttgaacagctcgacatgcgtcgggatgtccaggaaatttttcgcatgaccccccacgagaagcaggtcatgatgttcagtgctaccttgagcaaagagatccgtccagtctgccgcaagttcatgcaagatgtaaatacccttctaccttctctccctccactccccgcccgctgcctcctccccttcctcgccctcttcctcagactcccttgtcattcaagtgccaagaaggcggcttgtgcccaactgggagtaatgactccttgaagagacatacagaagcagagacagctagtgttagggcctgcgcgggtgccagggaaactccggaagacttggtcgggttaatgtgagagcgggtagtgttcgactttttcataaatcacaacatttttgaacctcttctccctttgggggagggcaggatttttctgccctaccacccacccatccatcgtctcttacatgcaccctacagccacgcaccctcaaggtggcatcgagcgtacagctggagccttctgctcaccaaaactcctacttcccggtggcaggagagcaagagagggacagacagatggcagggcatgtccaaaagaagagcatcagcacaaatgaatcctccccttccccacctccaggggtgggggcctttggcacctcaatccccgataccctactcctt

SEQ ID NO: 7809 - DNA, 2133 bp, Homo sapiens
  source 1..2133: mol_type = unassigned DNA
ctcagctagggcctgccggttcctagtgcgtgcccagcagtcctcaggtcaccttcactaccgggccaaggaccccgtgggaactcgcagccttcgccacactcgttcctcgcgcatccacggaggggtgcctacagagaagacctgcgtggcaaaaacctaaacgaagagatgaggggcatggagaggagtaggataagagaataaagataacagtgggggggagacgttagtttcctttatatattttgttactggcggtagcagtgaagttagaaacggttttaaaacaaatttcagacaggcattttccaaaggcaagcctggagcgcacggatctgtataaccgcggaaggccctgtttccggtcccttgcgcctgcgctcttgcagccaagaaggcgggaggctggagtagagggaagcctgcaaccggaagtgaaggcagatttccctccttcgtcgctgttgctgccgccatacgcgctctccctgtttagctcttctgttagaaatagtatctttgttttcctttgctgttcctcaatcccctactcttcaccccttgttttcacctattttgcgagaacccatccagatcccccttcccttcttcccctgccggcccagttatggcagagaacgatgtggacaatgagctcttggactatgaagatgatgaggtggagacagcagctgggggagatggggctgaggcccctgccaagaaggatgtcaagggctcctatgtctccatccacagctctggctttcgtgacttcctgctcaagccagagttgctccgggccattgtcgactgtggctttgagcatccgtcagaagtccagcatgagtgcatccctcaggccattctgggaatggatgtcctgtgccaggccaagtcgggcatgggaaagacagcagtgtttgtcttggccacactgcaacagctggagccagttactgggcaggtgtctgtgctggtgatgtgtcacactcgggagttggcttttcagatcagcaaggaatatgagcgcttctctaaatacatgcccaatgtcaaggttgctgttttttttggtggtctgtctatcaagaaggatgaagaggtgctgaagaagaactgcccgcatatcgtcgtggggactccaggccgtatcctagccctggctcgaaataagagcctcaacctcaaacacattaaacactttattttggatgaatgtgataagatgcttgaacagctcgacatgcgtcgggatgtccaggaaatttttcgcatgaccccccacgagaagcaggtcatgatgttcagtgctaccttgagcaaagagatccgtccagtctgccgcaagttcatgcaagatccaatggagatcttcgtggatgatgagacgaagttgacgctgcatgggttgcagcagtactacgtgaaactgaaggacaacgagaagaaccggaagctctttgaccttctggatgtccttgagttcaaccaggtggtgatctttgtgaagtctgtgcagcggtgcattgccttggcccagctactagtggagcagaacttcccagccattgccatccaccgtgggatgccccaggaggagaggctttctcggtatcagcagtttaaagattttcaacgacgaattcttgtggctaccaacctatttggccgaggcatggacatcgagcgggtgaacattgcttttaattatgacatgcctgaggattctgacacctacctgcatcgggtggccagagcaggccggtttggcaccaagggcttggctatcacatttgtgtccgatgagaatgatgccaagatcctcaatgatgtgcaggatcgctttgaggtcaatattagtgagctgcctgatgagatagacatctcctcctacattgaacagacacggtagaagactcgcccattttggaatgtgaccgtctgtccttcaggagaggacaccagggtgggggtgaaggagacactactgcccccacccctgacagcccccaccccatggcttccatcttttgcatcaccaccactcctgaacccccatttctgatttgtcagaatttttttttaacaaaactaaaaatgaaacacatgtgtctgtggtatctataa

SEQ ID NO: 7810 - DNA, 1529 bp, Homo sapiens; identical to SEQ ID NO: 7700
  source 1..1529: mol_type = unassigned DNA

SEQ ID NO: 7811 - DNA, 659 bp, Homo sapiens
  source 1..659: mol_type = unassigned DNA
cccttttcacaggcgatggtctggtcgctggggcctagttggttcgctatttccttagcttgcatccctttcgagagcaaagagctcctgggggaaggaagggaagctaaggggggacccaatccaagatggtgtcctcggcgccattgtgttcgttttgctcccttcttccaatgggttcttctcatattggaggcctcagcatcaatgagaggcggcgctcggcgtcccttggtcttgctcttctgttagaaatagtatctttgttttcctttgctgttcctcaatcccctactcttcaccccttgttttcacctattttgcgagaacccatccagatcccccttcccttcttcccctgccggcccagttatggcagagaacgatgtggacaatgagctcttggactatgaagatgatgaggtggagacagcagctgggggagatggggctgaggcccctgccaagaaggatgtcaagggctcctatgtctccatccacagctctggctttcgtgacttcctgctcaagccagagttgctccgggccattgtcgactgtggctttgagcatccgtcagaagtccagcatgagtgcatccctcaggccattctgggaatggatgtcctgtgccaggccaagtcgggcatgggaaagac

SEQ ID NO: 7812 - DNA, 583 bp, Homo sapiens; identical to SEQ ID NO: 7730
  source 1..583: mol_type = unassigned DNA

SEQ ID NO: 7813 - DNA, 561 bp, Homo sapiens; identical to SEQ ID NO: 7707
  source 1..561: mol_type = unassigned DNA

SEQ ID NO: 7814 - DNA, 817 bp, Homo sapiens
  source 1..817: mol_type = unassigned DNA
accggaagtgaaggcacatttccctccttcgtcgctgttgctgccgccatacgcgctctccctgtttagatcccccttcccttcttcccctgccggcccagttatggcagagaacgatgtggacaatgagctcttggactatgaagatgatgaggtggagacagcagctgggggagatggggctgaggcccctgccaagaaggatgtcaagggctcctatgtctccatccacagctctggctttcgtgacttcctgctcaagccagagttgctccgggccattgtcgactgtggctttgagcatccgtcagaagtccagcatgagtgcatccctcaggccattctgggaatggatgtcctgtgccaggccaagtcgggcatgggaaagacagcagtgtttgtcttggccacactgcaacagctggagccagttactgggcaggtgtctgtgctggtgatgtgtcacactcgggagttggcttttcagatcagcaaggaatatgagcgcttctctaaatacatgcccaatgtcaaggttgctgttttttttggtggtctgtctatcaagaaggatgaagaggtgctgaagaagaactgcccgcatatcgtcgtggggactccaggccgtatcctagccctggctcgaaataagagcctcaacctcaaacacattaaacactttattttggatgaatgtgataagatgcttgaacagctcgacatgcgtcgggatgtccaggaaatttttcgcatgaccccccacgagaagcaggtcatgatgttcagtgctaccttgagcaaagagatccgtccagtc

SEQ ID NO: 7815 - DNA, 413 bp, Homo sapiens
  source 1..413: mol_type = unassigned DNA
tggccacactgcaacagctggagccagttactgggcaggtgtctgtactggtgatgtgtcacactcgggagttggcttttcagatcagcaaggaatatgagcgcttctctaaatacatgcccaatgtcaaggttgctgttttttttggtggtctgtctatcaagaaggatgaagaggtgctgaagaagaactgcccgcatatcgtcgtggggactccaggccgtatcctagccctggctcgaaataagagcctcaacctcaaacacattaaacactttattttggatgaatgtgataagatgcttgaacagctcgacatgcgtcgggatgtccaggaaatttttcgcatgaccccccacgagaagcaggtcatgatgttcagtgctaccttgagcaaagagatccgtccagtc

SEQ ID NO: 7816 - DNA, 1005 bp, Homo sapiens; identical to SEQ ID NO: 7710
  source 1..1005: mol_type = unassigned DNA

SEQ ID NO: 7817 - DNA, 2003 bp, Homo sapiens
  source 1..2003: mol_type = unassigned DNA
ctcagctagggcctgccggttcctagtgcgtgcccagcagtcctcaggtcaccttcactaccgggccaaggaccccgtgggaactcgcagccttcgccacactcgttcctcgcgcatccacggaggggtgcctacagagaagacctgcgtggcaaaaacctaaacgaagagatgaggggcatggagaggagtaggataagagaataaagataacagtgggggggagacgttagtttcctttatatcttttgttactggcggtagcagtgaagttagaaacggttttaaaacaaatttcagacaggcattttccaaaggcaagcctggagcgcacggatctgtataaccgcggaaggccctgtttccggtcccttgcgcctgcgctcttgcagccaagaaggcgggaggctggagtagagggaagcctgcaaccggaagtgaaggcacatttccctccttcgtcgctgttgctgccgccatacgcgctctccctgtttagttatggcagagaacgatgtggacaatgagctcttggactatgaagatgatgaggtggagacagcagctgggggagatggggctgaggcccctgccaagaaggatgtcaagggctcctatgtctccatccacagctctggctttcgtgacttcctgctcaagccagagttgctccgggccattgtcgactgtggctttgagcatccgtcagaagtccagcatgagtgcatccctcaggccattctgggaatggatgtcctgtgccaggccaagtcgggcatgggaaagacagcagtgtttgtcttggccacactgcaacagctggagccagttactgggcaggtgtctgtgctggtgatgtgtcacactcgggagttggcttttcagatcagcaaggaatatgagcgcttctctaaatacatgcccaatgtcaaggttgctgttttttttggtggtctgtctatcaagaaggatgaagaggtgctgaagaagaactgcccgcatatcgtcgtggggactccaggccgtatcctagccctggctcgaaataagagcctcaacctcaaacacattaaacactttattttggatgaatgtgataagatgcttgaacagctcgacatgcgtcgggatgtccaggaaatttttcgcatgaccccccacgagaagcaggtcatgatgttcagtgctaccttgagcaaagagatccgtccagtctgccgcaagttcatgcaagatccaatggagatcttcgtggatgatgagacgaagttgacgctgcatgggttgcagcagtactacgtgaaactgaaggacaacgagaagaaccggaagctctttgaccttctggatgtccttgagttcaaccaggtggtgatctttgtgaagtctgtgcagcggtgcattgccttggcccagctactagtggagcagaacttcccagccattgccatccaccgtgggatgccccaggaggagaggctttctcggtatcagcagtttaaagattttcaacgacgaattcttgtggctaccaacctatttggccgaggcatggacatcgagcgggtgaacattgcttttaattatgacatgcctgaggattctgacacctacctgcatcgggtggccagagcaggccggtttggcaccaagggcttggctatcacatttgtgtccgatgagaatgatgccaagatcctcaatgatgtgcaggatcgctttgaggtcaatattagtgagctgcctgatgagatagacatctcctcctacattgaacagacacggtagaagactcgcccattttggaatgtgaccgtctgtccttcaggagaggacaccagggtgggggtgaaggagacactactgcccccacccctgacagcccccaccccatggcttccatcttttgcatcaccaccactcctgaacccccatttctgatttgtcagaatttttttttaacaaaactaaaaatgaaacacatgtgtctgtggtatctataa

SEQ ID NO: 7818 - DNA, 932 bp, Homo sapiens; identical to SEQ ID NO: 7782
  source 1..932: mol_type = unassigned DNA

SEQ ID NO: 7819 - DNA, 2039 bp, Homo sapiens; identical to SEQ ID NO: 7698
  source 1..2039: mol_type = unassigned DNA

SEQ ID NO: 7820 - DNA, 720 bp, Homo sapiens; identical to SEQ ID NO: 7733
  source 1..720: mol_type = unassigned DNA

SEQ ID NO: 7821 - DNA, 290 bp, Homo sapiens
  source 1..290: mol_type = unassigned DNA
tggccacactgcaacagctggagccagttactgggcaggtgtgtttttgtgacagtcacttccctagaggggataatgaagagctacatttaccatatgtctccgtctacttcctgcctaaggtgtctgtactggtgatgtgtcacactcgggagttggcttttcagatcagcaaggaatatgagcgcttctctaaatacatgcccaatgtcaaggttgctgttttttttggtggtctgtctatcaagaaggatgaagaggtgctgaagaagaactgcccgcatatcgtc

SEQ ID NO: 7822 - DNA, 659 bp, Homo sapiens; identical to SEQ ID NO: 7712
  source 1..659: mol_type = unassigned DNA

SEQ ID NO: 7823 - DNA, 659 bp, Homo sapiens; identical to SEQ ID NO: 7811
  source 1..659: mol_type = unassigned DNA

SEQ ID NO: 7824 - DNA, 2003 bp, Homo sapiens; identical to SEQ ID NO: 7753
  source 1..2003: mol_type = unassigned DNA

SEQ ID NO: 7825 - DNA, 1337 bp, Homo sapiens
  source 1..1337: mol_type = unassigned DNA
ttcgtcgctgttgctgccgccatacgcgctctccctgtttagctcttctgttagaaatagtatctttgttttcctttgctgttcctcaatcccctactcttcaccccttgttttcacctattttgcgagaacccatccagatcccccttcccttcttcccctgccggcccagttatggcagagaacgatgtggacaatgagctcttggactatgaagatgatgaggtggagacagcagctgggggagatggggctgaggcccctgccaagaaggatgtcaagggctcctatgtctccatccacagctctggctttcgtgacttcctgctcaagccagagttgctccgggccattgtcgactgtggctttgagcatccgtcagaaggtgtctgtgctggtgatgtgtcacactcgggagttggcttttcagatcagcaaggaatatgagcgcttctctaaatacatgcccaatgtcaaggttgctgttttttttggtggtctgtctatcaagaaggatgaagaggtgctgaagaagaactgcccgcatatcgtcgtggggactccaggccgtatcctagccctggctcgaaataagagcctcaacctcaaacacattaaacactttattttggatgaatgtgataagatgcttgaacagctcgacatgcgtcgggatgtccaggaaatttttcgcatgaccccccacgagaagcaggtcatgatgttcagtgctaccttgagcaaagagatccgtccagtctgccgcaagttcatgcaagatgtaaatacccttctaccttctctccctccactccccgcccgctgcctcctccccttcctcgccctcttcctcagactcccttgtcattcaagtgccaagaaggcggcttgtgcccaactgggagtaatgactccttgaagagacatacagaagcagagacagctagtgttagggcctgcgcgggtgccagggaaactccggaagacttggtcgggttaatgtgagagcgggtagtgttcgactttttcataaatcacaacatttttgaacctcttctcccttcgggggagggcaggatttttctgccctaccacccacccatccatcgtctcttacatgcaccctacagccacgcaccctcaaggtggcatcgagcatacagctggagccttctgctcaccaaaactcctacttcccggtggcaggagagcaagagagggacagacagatggcagggcatgtccaaaagaagagcatcagcacaaatgaatcctccccttccccacctccaggggtgggggcctttggcacctcaatccccgataccctactcctt

SEQ ID NO: 7826 - DNA, 1603 bp, Homo sapiens
  source 1..1603: mol_type = unassigned DNA
ctcagctagggcctgccggttcctagtgcgtgcccagcagtcctcaggtcaccttcactaccgggccaaggaccccgtgggaactcgcagccttcgccacactcgttcctcgcgcatccacggaggggtgcctacagagaagacctgcgtggcaaaaacctaaacgaagagatgaggggcatggagaggagtaggataagagaataaagataacagtgggggggagacgttagtttcctttatatattttgttactggcggtagcagtgaagttagaaacggttttaaaacaaatttcagacaggcattttccaaaggcaagcctggagcgcacggatctgtataaccgcggaaggccctgtttccggtcccttgcgcctgcgctcttgcagccaagaaggcgggaggctggagtagagggaagcctgcaaccggaagtgaaggcagatttccctccttcgtcgctgttgctgccgccatacgcgctctccctgtttagctcttctgttagaaatagtatctttgttttcctttgctgttcctcaatcccctactcttcaccccttgttttcacctattttgcgagaacccatccagatcccccttcccttcttcccctgccggcccagttatggcagagaacgatgtggacaatgagctcttggactatgaagatgatgaggtggagacagcagctgggggagatggggctgaggcccctgccaagaaggatgtcaagggctcctatgtctccatccacagctctggctttcgtgacttcctgctcaagccagagttgctccgggccattgtcgactgtggctttgagcatccgtcagaagtccagcatgagtgcatccctcaggccattctgggaatggatgtcctgtgccaggccaagtcgggcatgggaaagacagcagtgtttgtcttggccacactgcaacagctggagccagttactgggcaggtgtctgtgctggtgatgtgtcacactcgggagttggcttttcagatcagcaaggaatatgagcgcttctctaaatacatgcccaatgtcaaggttgctgttttttttggtggtctgtctatcaagaaggatgaagaggtgctgaagaagaactgcccgcatatcgtcgtggggactccaggccgtatcctagccctggctcgaaataagagcctcaacctcaaacacattaaacactttattttggatgaatgtgataagatgcttgaacagctcgacatgcgtcgggatgtccaggaaatttttcgcatgaccccccacgagaagcaggtcatgatgttcagtgctaccttgagcaaagagatccgtccagtctgccgcaagttcatgcaagatccaatggagatcttcgtggatgatgagacgaagttgacgctgcatgggttgcagcagtactacgtgaaactgaaggacaacgagaagaaccggaagctctttgaccttctggatgtccttgagttcaaccaggaaatcacatgtaagtctgtgcagcgattttcaacgacgaattcttgtggctaccaacctatttggccgaggcatggacatcgagcgggtgaacattgcttttaa

SEQ ID NO: 7827 - DNA, 1603 bp, Homo sapiens
  source 1..1603: mol_type = unassigned DNA
ctcagctagggcctgccggttcctagtgcgtgcccagcagtcctcaggtcaccttcactaccgggccaaggaccccgtgggaactcgcagccttcgccacactcgttcctcgcgcatccacggaggggtgcctacagagaagacctgcgtggcaaaaacctaaacgaagagatgaggggcatggagaggagtaggataagagaataaagataacagtggggggcagacgttagtttcctttatatcttttgttactggcggtagcagtgaagttagaaacggttttaaaacaaatttcagacaggcattttccaaaggcaagcctggagcgcacggatctgtataaccgcggaaggccctgtttccggtcccttgcgcctgcgctcttgcagccaagaaggcgggaggctggagtagagggaagcctgcaaccggaagtgaaggcagatttccctccttcgtcgctgttgctgccgccatacgcgctctccctgtttagctcttctgttagaaatagtatctttgttttcctttgctgttcctcaatcccctactcttcaccccttgttttcacctattttgcgagaacccatccagatcccccttcccttcttcccctgccggcccagttatggcagagaacgatgtggacaatgagctcttggactatgaagatgatgaggtggagacagcagctgggggagatggggctgaggcccctgccaagaaggatgtcaagggctcctatgtctccatccacagctctggctttcgtgacttcctgctcaagccagagttgctccgggccattgtcgactgtggctttgagcatccgtcagaagtccagcatgagtgcatccctcaggccattctgggaatggatgtcctgtgccaggccaagtcgggcatgggaaagacagcagtgtttgtcttggccacactgcaacagctggagccagttactgggcaggtgtctgtgctggtgatgtgtcacactcgggagttggcttttcagatcagcaaggaatatgagcgcttctctaaatacatgcccaatgtcaaggttgctgttttttttggtggtctgtctatcaagaaggatgaagaggtgctgaagaagaactgcccgcatatcgtcgtggggactccaggccgtatcctagccctggctcgaaataagagcctcaacctcaaacacattaaacactttattttggatgaatgtgataagatgcttgaacagctcgacatgcgtcgggatgtccaggaaatttttcgcatgaccccccacgagaagcaggtcatgatgttcagtgctaccttgagcaaagagatccgtccagtctgccgcaagttcatgcaagatccaatggagatcttcgtggatgatgagacgaagttgacgctgcatgggttgcagcagtactacgtgaaactgaaggacaacgagaagaaccggaagctctttgaccttctggatgtccttgagttcaaccaggaaatcacatgtaagtctgtgcagcgattttcaacgacgaattcttgtggctaccaacctatttggccgaggcatggacatcgagcgggtgaacattgcttttaa

SEQ ID NO: 7828 - DNA, 1571 bp, Homo sapiens
  source 1..1571: mol_type = unassigned DNA
cgccatacgcgctctccctgtttagttatggcagagaacgatgtggacaatgagctcttggactatgaagatgatgaggtggagacagcagctgggggagatggggctgaggcccctgccaagaaggatgtcaagggctcctatgtctccatccacagctctggctttcgtgacttcctgctcaagccagagttgctccgggccattgtcgactgtggctttgagcatccgtcagaagtccagcatgagtgcatccctcaggccattctgggaatggatgtcctgtgccaggccaagtcgggcatgggaaagacagcagtgtttgtcttggccacactgcaacagctggagccagttactgggcaggtatatttggggagagtgctggggaggggattttggtgtgtttttgtgtctgtgctggtgatgtgtcacactcgggagttggcttttcagatcagcaaggaatatgagcgcttctctaaatacatgcccaatgtcaaggttgctgttttttttggtggtctgtctatcaagaaggatgaagaggtgctgaagaagaactgcccgcatatcgtcgtggggactccaggccgtatcctagccctggctcgaaataagagcctcaacctcaaacacattaaacactttattttggatgaatgtgataagatgcttgaacagctcgacatgcgtcgggatgtccaggaaatttttcgcatgaccccccacgagaagcaggtcatgatgttcagtgctaccttgagcaaagagatccgtccagtctgccgcaagttcatgcaagatccaatggagatcttcgtggatgatgagacgaagttgacgctgcatgggttgcagcagtactacgtgaaactgaaggacaacgagaagaaccggaagctctttgaccttctggatgtccttgagttcaaccaggtggtgatctttgtgaagtctgtgcagcggtgcattgccttggcccagctactagtggagcagaacttcccagccattgccatccaccgtgggatgccccaggaggagaggctttctcggtatcagcagtttaaagattttcaacgacgaattcttgtggctaccaacctatttggccgaggcatggacatcgagcgggtgaacattgcttttaattatgacatgcctgaggattctgacacctacctgcatcgggtggccagagcaggccggtttggcaccaagggcttggctatcacatttgtgtccgatgagaatgatgccaagatcctcaatgatgtgcaggatcgctttgaggtcaatattagtgagctgcctgatgagatagacatctcctcctacattgaacagacacggtagaagactcgcccattttggaatgtgaccgtctgtccttcaggagaggacaccagggtgggggtgaaggagacactactgcccccacccctgacagcccccaccccatggcttccatcttttgcatcaccaccactcctgaacccccatttctgatttgtcagaatttttttttaacaaaactaaaaatgaaacacatgtgtctgtggtatcta

SEQ ID NO: 7829 - DNA, 1337 bp, Homo sapiens; identical to SEQ ID NO: 7808
  source 1..1337: mol_type = unassigned DNA

SEQ ID NO: 7830 - DNA, 1552 bp, Homo sapiens
  source 1..1552: mol_type = unassigned DNA
cgctgttgctgccgccatacgcgctctccctgtttagttatggcagagaacgatgtggacaatgagctcttggactatgaagatgatgaggtggagacagcagctgggggagatggggctgaggcccctgccaagaaggatgtcaagggctcctatgtctccatccacagctctggctttcgtgacttcctgctcaagccagagttgctccgggccattgtcgactgtggctttgagcatccgtcagaagtccagcatgagtgcatccctcaggccattctgggaatggatgtcctgtgccaggccaagtcgggcatgggaaagacagcagtgtttgtcttggccacactgcaacagctggagccagttactgggcaggtatatttggggagagtgctggggaggggattttggtgtgtttttgtgtctgtgctggtgatgtgtcacactcgggagttggcttttcagatcagcaaggaatatgagcgcttctctaaatacatgcccaatgtcaaggttgctgttttttttggtggtctgtctatcaagaaggatgaagaggtgctgaagaagaactgcccgcatatcgtcgtggggactccaggccgtatcctagccctggctcgaaataagagcctcaacctcaaacacattaaacactttattttggatgaatgtgataagatgcttgaacagctcgacatgcgtcgggatgtccaggaaatttttcgcatgaccccccacgagaagcaggtcatgatgttcagtgctaccttgagcaaagagatccgtccagtctgccgcaagttcatgcaagatccaatggagatcttcgtggatgatgagacgaagttgacgctgcatgggttgcagcagtactacgtgaaactgaaggacaacgagaagaaccggaagctctttgaccttctggatgtccttgagttcaaccaggtggtgatctttgtgaagtctgtgcagcggtgcattgccttggcccagctactagtggagcagaacttcccagccattgccatccaccgtgggatgccccaggaggagaggctttctcggtatcagcagtttaaagattttcaacgacgaattcttgtggctaccaacctatttggccgaggcatggacatcgagcgggtgaacattgcttttaattatgacatgcctgaggattctgacacctacctgcatcgggtggccagagcaggccggtttggcaccaagggcttggctatcacatttgtgtccgatgagaatgatgccaagatcctcaatgatgtgcaggatcgctttgaggtcaatattagtgagctgcctgatgagatagacatctcctcctacattgaacagacacggtagaagactcgcccattttggaatgtgaccgtctgtccttcaggagaggacaccagggtgggggtgaaggagacactactgcccccacccctgacagcccccaccccatggcttccatcttttgcatcaccaccactcctgaacccccatttctgatttgtcagaatttttttttaacaaaact

SEQ ID NO: 7831 - DNA, 867 bp, Homo sapiens; identical to SEQ ID NO: 7797
  source 1..867: mol_type = unassigned DNA

SEQ ID NO: 7832 - DNA, 1337 bp, Homo sapiens; identical to SEQ ID NO: 7825
  source 1..1337: mol_type = unassigned DNA

SEQ ID NO: 7833 - DNA, 1337 bp, Homo sapiens; identical to SEQ ID NO: 7825
  source 1..1337: mol_type = unassigned DNA

SEQ ID NO: 7834 - DNA, 867 bp, Homo sapiens
  source 1..867: mol_type = unassigned DNA
agatttccctccttcgtcgctgttgctgccgccatacgcgctctccctgtttagctcttctgttagaaatagtatctttgttttcctttgctgttcctcaatcccctactcttcaccccttgttttcacctattttgcgagaacccatccagatcccccttcccttcttcccctgccggcccagttatggcagagaacgatgtggacaatgagctcttggactatgaagatgatgaggtggagacagcagctgggggagatggggctgaggcccctgccaagaaggatgtcaagggctcctatgtctccatccacagctctggctttcgtgacttcctgctcaagccagagttgctccgggccattgtcgactgtggctttgagcatccgtcagaagtccagcatgagtgcatccctcaggccattctgggaatggatgtcctgtgccaggccaagtcgggcatgggaaagacagcagtgtttgtcttggccacactgcaacagctggagccagttactgggcagagccatgagcacatgacctctgttacccttgacaacctgacagctgtgggggatgttctgtcgcaagcgtggggttcatgatttagatcacagaattgaagtcatttattatcggcccaggtgtctgtgctggtgatgtgtcacactcgggagttggcttttcagatcagcaaggaatatgagcgcttctctaaatacatgcccaatgtcaaggttgctgttttttttggtggtctgtctatcaagaaggatgaagaggtgctgaagaagaactgcccgcatatcgtcgtggggactccaggccgtatcctagccctggctcgaaataagagcctcaacctc

SEQ ID NO: 7835 - DNA, 1011 bp, Homo sapiens
  source 1..1011: mol_type = unassigned DNA
cgctgttgctgccgccatacgcgctctccctgtttagttatggcagagaacgatgtggacaatgagctcttggactatgaagatgatgaggtggagacagcagctgggggagatggggctgaggcccctgccaagaaggatgtcaagggctcctatgtctccatccacagctctggctttcgtgacttcctgctcaagccagagttgctccgggccattgtcgactgtggctttgagcatccgtcagaagtccagcatgagtgcatccctcaggccattctgggaatggatgtcctgtgccaggccaagtcgggcatgggaaagacagcagtgtttgtcttggccacactgcaacagctggagccagttactgggcaggtgtctgtgctggtgatgtgtcacactcgggagttggcttttcagatcagcaaggaatatgagcgcttctctaaatacatgcccaatgtcaaggttgctgttttttttggtggtctgtctatcaagaaggatgaagaggtgctgaagaagaactgcccgcatatcgtcgtggggactccaggccgtatcctagccctggctcgaaataagagcctcaacctcaaacacattaaacactttattttggatgaatgtgataagatgcttgaacagctcgacatgcgtcgggatgtccaggaaatttttcgcatgaccccccacgagaagcaggtcatgatgttcagtgctaccttgagcaaagagatccgtccagtctgccgcaagttcatgcaagatccaatggagatcttcgtggatgatgagacgaagttgacgctgcatgggttgcagcagtactacgtgaaactgaaggacaacgagaagaaccggaagctctttgaccttctggatgtccttgagttcaaccaggaaatcacatgtaagtctgtgcagcgattttcaacgacgaattcttgtggctaccaacctatttggccgaggcatggacatcgagcgggtgaacattgcttttaa

SEQ ID NO: 7836 - DNA, 1552 bp, Homo sapiens; identical to SEQ ID NO: 7830
  source 1..1552: mol_type = unassigned DNA

SEQ ID NO: 7837 - DNA, 1337 bp, Homo sapiens; identical to SEQ ID NO: 7825
  source 1..1337: mol_type = unassigned DNA

SEQ ID NO: 7838 - DNA, 1433 bp, Homo sapiens; identical to SEQ ID NO: 7716
  source 1..1433: mol_type = unassigned DNA

SEQ ID NO: 7839 - DNA, 2178 bp, Homo sapiens
  source 1..2178: mol_type = unassigned DNA
ctcagctagggcctgccggttcctagtgcgtgcccagcagtcctcaggtcaccttcactaccgggccaaggaccccgtgggaactcgcagccttcgccacactcgttcctcgcgcatccacggaggggtgcctacagagaagacctgcgtggcaaaaacctaaacgaagagatgaggggcatggagaggagtaggataagagaataaagataacagtggggggcagacgttagtttcctttatatcttttgttactggcggtagcagtgaagttagaaacggttttaaaacaaatttcagacaggcattttccaaaggcaagcctggagcgcacggatctgtataaccgcggaaggccctgtttccggtcccttgcgcctgcgctcttgcagccaagaaggcgggaggctggagtagagggaagcctgcaaccggaagtgaaggcagatttccctccttcgtcgctgttgctgccgccatacgcgctctccctgtttagctcttctgttagaaatagtatctttgttttcctttgctgttcctcaatcccctactcttcaccccttgttttcacctattttgcgagaacccatccagatcccccttcccttcttcccctgccggcccagttatggcagagaacgatgtggacaatgagctcttggactatgaagatgatgaggtggagacagcagctgggggagatggggctgaggcccctgccaagaaggatgtcaagggctcctatgtctccatccacagctctggctttcgtgacttcctgctcaagccagagttgctccgggccattgtcgactgtggctttgagcatccgtcagaagtccagcatgagtgcatccctcaggccattctgggaatggatgtcctgtgccaggccaagtcgggcatgggaaagacagcagtgtttgtcttggccacactgcaacagctggagccagttactgggcaggtatatttggggagagtgctggggaggggattttggtgtgtttttgtgtctgtgctggtgatgtgtcacactcgggagttggcttttcagatcagcaaggaatatgagcgcttctctaaatacatgcccaatgtcaaggttgctgttttttttggtggtctgtctatcaagaaggatgaagaggtgctgaagaagaactgcccgcatatcgtcgtggggactccaggccgtatcctagccctggctcgaaataagagcctcaacctcaaacacattaaacactttattttggatgaatgtgataagatgcttgaacagctcgacatgcgtcgggatgtccaggaaatttttcgcatgaccccccacgagaagcaggtcatgatgttcagtgctaccttgagcaaagagatccgtccagtctgccgcaagttcatgcaagatccaatggagatcttcgtggatgatgagacgaagttgacgctgcatgggttgcagcagtactacgtgaaactgaaggacaacgagaagaaccggaagctctttgaccttctggatgtccttgagttcaaccaggtggtgatctttgtgaagtctgtgcagcggtgcattgccttggcccagctactagtggagcagaacttcccagccattgccatccaccgtgggatgccccaggaggagaggctttctcggtatcagcagtttaaagattttcaacgacgaattcttgtggctaccaacctatttggccgaggcatggacatcgagcgggtgaacattgcttttaattatgacatgcctgaggattctgacacctacctgcatcgggtggccagagcaggccggtttggcaccaagggcttggctatcacatttgtgtccgatgagaatgatgccaagatcctcaatgatgtgcaggatcgctttgaggtcaatattagtgagctgcctgatgagatagacatctcctcctacattgaacagacacggtagaagactcgcccattttggaatgtgaccgtctgtccttcaggagaggacaccagggtgggggtgaaggagacactactgcccccacccctgacagcccccaccccatggcttccatcttttgcatcaccaccactcctgaacccccatttctgatttgtcagaatttttttttaacaaaactaaaaatgaaacacatgtgtctgtggtatctataa

SEQ ID NO: 7840 - DNA, 1433 bp, Homo sapiens; identical to SEQ ID NO: 7716
  source 1..1433: mol_type = unassigned DNA

SEQ ID NO: 7841 - DNA, 1337 bp, Homo sapiens; identical to SEQ ID NO: 7825
  source 1..1337: mol_type = unassigned DNA

SEQ ID NO: 7842 - DNA, 867 bp, Homo sapiens; identical to SEQ ID NO: 7834
  source 1..867: mol_type = unassigned DNA

SEQ ID NO: 7843 - DNA, 1433 bp, Homo sapiens; identical to SEQ ID NO: 7716
  source 1..1433: mol_type = unassigned DNA

SEQ ID NO: 7844 - DNA, 1603 bp, Homo sapiens
  source 1..1603: mol_type = unassigned DNA
ctcagctagggcctgccggttcctagtgcgtgcccagcagtcctcaggtcaccttcactaccgggccaaggaccccgtgggaactcgcagccttcgccacactcgttcctcgcgcatccatggaggggtgcctacagagaagacctgcgtggcaaaaacctaaacgaagagatgaggggcatggagaggagtaggataagagaataaagataacagtgggggggagacgttagtttcctttatatcttttgttactggcggtagcagtgaagttagaaacggttttaaaacaaatttcagacaggcattttccaaaggcaagcctggagcgcacggatctgtataaccgcggaaggccctgtttccggtcccttgcgcctgcgctcttgcagccaagaaggcgggaggctggagtagagggaagcctgcaaccggaagtgaaggcagatttccctccttcgtcgctgttgctgccgccatacgcgctctccctgtttagctcttctgttagaaatagtatctttgttttcctttgctgttcctcaatcccctactcttcaccccttgttttcacctattttgcgagaacccatccagatcccccttcccttcttcccctgccggcccagttatggcagagaacgatgtggacaatgagctcttggactatgaagatgatgaggtggagacagcagctgggggagatggggctgaggcccctgccaagaaggatgtcaagggctcctatgtctccatccacagctctggctttcgtgacttcctgctcaagccagagttgctccgggccattgtcgactgtggctttgagcatccgtcagaagtccagcatgagtgcatccctcaggccattctgggaatggatgtcctgtgccaggccaagtcgggcatgggaaagacagcagtgtttgtcttggccacactgcaacagctggagccagttactgggcaggtgtctgtactggtgatgtgtcacactcgggagttggcttttcagatcagcaaggaatatgagcgcttctctaaatacatgcccaatgtcaaggttgctgttttttttggtggtctgtctatcaagaaggatgaagaggtgctgaagaagaactgcccgcatatcgtcgtggggactccaggccgtatcctagccctggctcgaaataagagcctcaacctcaaacacattaaacactttattttggatgaatgtgataagatgcttgaacagctcgacatgcgtcgggatgtccaggaaatttttcgcatgaccccccacgagaagcaggtcatgatgttcagtgctaccttgagcaaagagatccgtccagtctgccgcaagttcatgcaagatccaatggagatcttcgtggatgatgagacgaagttgacgctgcatgggttgcagcagtactacgtgaaactgaaggacaacgagaagaaccggaagctctttgaccttctggatgtccttgagttcaaccaggaaatcacatgtaagtctgtgcagcgattttcaacgacgaattcttgtggctaccaacctatttggccgaggcatggacatcgagcgggtgaacattgcttttaa

SEQ ID NO: 7845 - DNA, 1433 bp, Homo sapiens; identical to SEQ ID NO: 7716
  source 1..1433: mol_type = unassigned DNA

SEQ ID NO: 7846 - DNA, 867 bp, Homo sapiens
  source 1..867: mol_type = unassigned DNA
agatttccctccttcgtcgctgttgctgccgccatacgcgctctccctgtttagctcttctgttagaaatagtatctttgttttcctttgctgttcctcaatcccctactcttcaccccttgttttcacctattttgcgagaacccatccagatcccccttcccttcttcccctgccggcccagttatggcagagaacgatgtggacaatgagctcttggactatgaagatgatgaggtggagacagcagctgggggagatggggctgaggcccctgccaagaaggatgtcaagggctcctatgtctccatccacagctctggctttcgtgacttcctgctcaagccagagttgctccgggccattgtcgactgtggctttgagcatccgtcagaagtccagcatgagtgcatccctcaggccattctgggaatggatgtcctgtgccaggccaagtcgggcatgggaaagacagcagtgtttgtcttggccacactgcaacagctggagccagttactgggcagagccatgagcacatgacctctgttacccttgacaatctgacagctgtgggggatgttctgtcgcaagcgtggggttcatgatttagatcacagaattgaagtcatttattatcggcccaggtgtctgtgctggtgatgtgtcacactcgggagttggcttttcagatcagcaaggaatatgagcgcttctctaaatacatgcccaatgtcaaggttgctgttttttttggtggtctgtctatcaagaaggatgaagaggtgctgaagaagaactgcccgcatatcgtcgtggggactccaggccgtatcctagccctggctcgaaataagagcctcaacctc

SEQ ID NO: 7847 - DNA, 2178 bp, Homo sapiens; identical to SEQ ID NO: 7726
  source 1..2178: mol_type = unassigned DNA

SEQ ID NO: 7848 - DNA, 999 bp, Homo sapiens
  source 1..999: mol_type = unassigned DNA
cgccatacgcgctctccctgtttagttatggcagagaacgatgtggacaatgagctcttggactatgaagatgatgaggtggagacagcagctgggggagatggggctgaggcccctgccaagaaggatgtcaagggctcctatgtctccatccacagctctggctttcgtgacttcctgctcaagccagagttgctccgggccattgtcgactgtggctttgagcatccgtcagaagtccagcatgagtgcatccctcaggccattctgggaatggatgtcctgtgccaggccaagtcgggcatgggaaagacagcagtgtttgtcttggccacactgcaacagctggagccagttactgggcaggtgtctgtgctggtgatgtgtcacactcgggagttggcttttcagatcagcaaggaatatgagcgcttctctaaatacatgcccaatgtcaaggttgctgttttttttggtggtctgtctatcaagaaggatgaagaggtgctgaagaagaactgcccgcatatcgtcgtggggactccaggccgtatcctagccctggctcgaaataagagcctcaacctcaaacacattaaacactttattttggatgaatgtgataagatgcttgaacagctcgacatgcgtcgggatgtccaggaaatttttcgcatgaccccccacgagaagcaggtcatgatgttcagtgctaccttgagcaaagagatccgtccagtctgccgcaagttcatgcaagatccaatggagatcttcgtggatgatgagacgaagttgacgctgcatgggttgcagcagtactacgtgaaactgaaggacaacgagaagaaccggaagctctttgaccttctggatgtccttgagttcaaccaggaaatcacatgtaagtctgtgcagcgattttcaacgacgaattcttgtggctaccaacctatttggccgaggcatggacatcgagcgggtgaacattgcttttaa

SEQ ID NO: 7849 - DNA, 1011 bp, Homo sapiens; identical to SEQ ID NO: 7835
  source 1..1011: mol_type = unassigned DNA

SEQ ID NO: 7850 - DNA, 1433 bp, Homo sapiens
  source 1..1433: mol_type = unassigned DNA
acatttccctccttcgtcgctgttgctgccgccatacgcgctctccctgtttagctcttctgttagaaatagtatctttgttttcctttgctgttcctcaatcccctactcttcaccccttgttttcacctattttgcgagaacccatccagatcccccttcccttcttcccctgccggcccagttatggcagagaacgatgtggacaatgagctcttggactatgaagatgatgaggtggagacagcagctgggggagatggggctgaggcccctgccaagaaggatgtcaagggctcctatgtctccatccacagctctggctttcgtgacttcctgctcaagccagagttgctccgggccattgtcgactgtggctttgagcatccgtcagaaggttgctgttttttttggtggtctgtctatcaagaaggatgaagaggtgctgaagaagaactgcccgcatatcgtcgtggggactccaggccgtatcctagccctggctcgaaataagagcctcaacctcaaacacattaaacactttattttggatgaatgtgataagatgcttgaacagctcgacatgcgtcgggatgtccaggaaatttttcgcatgaccccccacgagaagcaggtcatgatgttcagtgctaccttgagcaaagagatccgtccagtctgccgcaagttcatgcaagatccaatggagatcttcgtggatgatgagacgaagttgacgctgcatgggttgcagcagtactacgtgaaactgaaggacaacgagaagaaccggaagctctttgaccttctggatgtccttgagttcaaccaggtggtgatctttgtgaagtctgtgcagcggtgcattgccttggcccagctactagtggagcagaacttcccagccattgccatccaccgtgggatgccccaggaggagaggctttctcggtatcagcagtttaaagattttcaacgacgaattcttgtggctaccaacctatttggccgaggcatggacatcgagcgggtgaacattgcttttaattatgacatgcctgaggattctgacacctacctgcatcgggtggccagagcaggccggtttggcaccaagggcttggctatcacatttgtgtccgatgagaatgatgccaagatcctcaatgatgtgcaggatcgctttgaggtcaatattagtgagctgcctgatgagatagacatctcctcctacattgaacagacacggtagaagactcgcccattttggaatgtgaccgtctgtccttcaggagaggacaccagggtgggggtgaaggagacactactgcccccacccctgacagcccccaccccatggcttccatcttttgcatcaccaccactcctgaacccccatttctgatttgtcagaatttttttttaacaaaact

SEQ ID NO: 7851 - DNA, 867 bp, Homo sapiens; identical to SEQ ID NO: 7834
  source 1..867: mol_type = unassigned DNA

SEQ ID NO: 7852 - DNA, 1433 bp, Homo sapiens; identical to SEQ ID NO: 7716
  source 1..1433: mol_type = unassigned DNA

SEQ ID NO: 7853 - DNA, 867 bp, Homo sapiens
  source 1..867: mol_type = unassigned DNA
acatttccctccttcgtcgctgttgctgccgccatacgcgctctccctgtttagctcttctgttagaaatagtatctttgttttcctttgctgttcctcaatcccctactcttcaccccttgttttcacctattttgcgagaacccatccagatcccccttcccttcttcccctgccggcccagttatggcagagaacgatgtggacaatgagctcttggactatgaagatgatgaggtggagacagcagctgggggagatggggctgaggcccctgccaagaaggatgtcaagggctcctatgtctccatccacagctctggctttcgtgacttcctgctcaagccagagttgctccgggccattgtcgactgtggctttgagcatccgtcagaagtccagcatgagtgcatccctcaggccattctgggaatggatgtcctgtgccaggccaagtcgggcatgggaaagacagcagtgtttgtcttggccacactgcaacagctggagccagttactgggcagagccatgagcacatgacctctgttacccttgacaacctgacagctgtgggggatgttctgtcgcaagcgtggggttcatgatttagatcacagaattgaagtcatttattatcggcccaggtgtctgtgctggtgatgtgtcacactcgggagttggcttttcagatcagcaaggaatatgagcgcttctctaaatacatgcccaatgtcaaggttgctgttttttttggtggtctgtctatcaagaaggatgaagaggtgctgaagaagaactgcccgcatatcgtcgtggggactccaggccgtatcctagccctggctcgaaataagagcctcaacctc

SEQ ID NO: 7854 - DNA, 2178 bp, Homo sapiens
  source 1..2178: mol_type = unassigned DNA
ctcagctagggcctgccggttcctagtgcgtgcccagcagtcctcaggtcaccttcactaccgggccaaggaccccgtgggaactcgcagccttcgccacactcgttcctcgcgcatccacggaggggtgcctacagagaagacctgcgtggcaaaaacctaaacgaagagatgaggggcatggagaggagtaggataagagaataaagataacagtgggggggagacgttagtttcctttatatattttgttactggcggtagcagtgaagttagaaacggttttaaaacaaatttcagacaggcattttccaaaggcaagcctggagcgcacggatctgtataaccgcggaaggccctgtttccggtcccttgcgcctgcgctcttgcagccaagaaggcgggaggctggagtagagggaagcctgcaaccggaagtgaaggcagatttccctccttcgtcgctgttgctgccgccatacgcgctctccctgtttagctcttctgttagaaatagtatctttgttttcctttgctgttcctcaatcccctactcttcaccccttgttttcacctattttgcgagaacccatccagatcccccttcccttcttcccctgccggcccagttatggcagagaacgatgtggacaatgagctcttggactatgaagatgatgaggtggagacagcagctgggggagatggggctgaggcccctgccaagaaggatgtcaagggctcctatgtctccatccacagctctggctttcgtgacttcctgctcaagccagagttgctccgggccattgtcgactgtggctttgagcatccgtcagaagtccagcatgagtgcatccctcaggccattctgggaatggatgtcctgtgccaggccaagtcgggcatgggaaagacagcagtgtttgtcttggccacactgcaacagctggagccagttactgggcaggtatatttggggagagtgctggggaggggattttggtgtgtttttgtgtctgtgctggtgatgtgtcacactcgggagttggcttttcagatcagcaaggaatatgagcgcttctctaaatacatgcccaatgtcaaggttgctgttttttttggtggtctgtctatcaagaaggatgaagaggtgctgaagaagaactgcccgcatatcgtcgtggggactccaggccgtatcctagccctggctcgaaataagagcctcaacctcaaacacattaaacactttattttggatgaatgtgataagatgcttgaacagctcgacatgcgtcgggatgtccaggaaatttttcgcatgaccccccacgagaagcaggtcatgatgttcagtgctaccttgagcaaagagatccgtccagtctgccgcaagttcatgcaagatccaatggagatcttcgtggatgatgagacgaagttgacgctgcatgggttgcagcagtactacgtgaaactgaaggacaacgagaagaaccggaagctctttgaccttctggatgtccttgagttcaaccaggtggtgatctttgtgaagtctgtgcagcggtgcattgccttggcccagctactagtggagcagaacttcccagccattgccatccaccgtgggatgccccaggaggagaggctttctcggtatcagcagtttaaagattttcaacgacgaattcttgtggctaccaacctatttggccgaggcatggacatcgagcgggtgaacattgcttttaattatgacatgcctgaggattctgacacctacctgcatcgggtggccagagcaggccggtttggcaccaagggcttggctatcacatttgtgtccgatgagaatgatgccaagatcctcaatgatgtgcaggatcgctttgaggtcaatattagtgagctgcctgatgagatagacatctcctcctacattgaacagacacggtagaagactcgcccattttggaatgtgaccgtctgtccttcaggagaggacaccagggtgggggtgaaggagacactactgcccccacccctgacagcccccaccccatggcttccatcttttgcatcaccaccactcctgaacccccatttctgatttgtcagaatttttttttaacaaaactaaaaatgaaacacatgtgtctgtggtatctataa

SEQ ID NO: 7855 - DNA, 747 bp, Homo sapiens
  source 1..747: mol_type = unassigned DNA
atggagatcttcgtggatgatgagacgaagttgacgctgcatgggttgcagcagtactacgtgaaactgaaggacaacgagaagaaccggaagctctttgaccttctggatgtccttgagttcaaccaggtggtgatctttgtgaagtctgtgcagcggtgcattgccttggcccagctactagtggagcagaacttcccagccattgccatccaccgtgggatgccccaggaggagaggtggctttctcggtatcagcagtttaaagattttcaacgacgaattcttgtggctaccaacctatttggccgaggcatggacatcgagcgggtgaacattgcttttaattatgacatgcctgaggattctgacacctacctgcatcgggtggccagagcaggccggtttggcaccaagggcttggctatcacatttgtgtccgatgagaatgatgccaagatcctcaatgatgtgcaggatcgctttgaggtcaatattagtgagctgcctgatgagatagacatctcctcctacattgaacagacacggtagaagactcgcccattttggaatgtgaccgtctgtccttcaggagaggacaccagggtgggggtgaaggagacactactgcccccacccctgacagcccccaccccatggcttccatcttttgcatcaccaccactcctgaacccccatttctgatttgtcagaatttttttttaacaaaactaaaaatgaaacaca

SEQ ID NO: 7856 - DNA, 2778 bp, Homo sapiens
  source 1..2778: mol_type = unassigned DNA
acctgacgcagtgggcgtcttgcacgtgcagccgtttaagtcgcgtgggcgcctgcgagggcttgggagagcaagccgcggagagaacttgaagccaccatgggagatgaagattgggaagcagaaatcaaccctcatatgtcttcctatgttcccatatttgagaaggataggtattctggagaaaatggagacaattttaacaggactccagcttcatcatcagaaatggatgatggaccttctcgaagagatcatttcatgaaaagtggatttgcctctgggcggaattttggaaacagagatgctggtgagtgtaataagcgagataatacatccacaatgggtggttttggagttggaaagagttttggaaacagaggtttttcaaacagcaggtttgaagatggtgatagctctggtttctggagagagtctagtaatgactgcgaagataatccaacacggaacagagggttttccaagagaggcgataatgacttagacccagacgaatgtatgcagcgcactggtggcctttttggttctagaagaccagtattaagtggcacaggtaatggtgatacttctcaaagcagaagtggcagtggaagtgaacgaggtggttacaaaggtttaaatgaagaagtaataacaggctctggaaagaattcttggaagtcagaagcagaaggaggagaaagtagtgatactcaaggaccaaaagtgacctacataccccctcctccacctgaggatgaggactccatctttgcacattatcagacaggcataaacttcgacaaatacgacactattcttgtggaagtgtctggacatgatgcaccaccagcaattctgacttttgaagaagctaatctctgtcagacactgaataacaacattgctaaagctggttatactaagcttactcctgtgcaaaaatacagtattcctatcatacttgcaggacgagatttgatggcttgcgctcaaacagggtctgggaagactgcggcttttctcctaccaattttggctcatatgatgcatgatggaataactgccagtcgttttaaagagttgcaggaaccagagtgtattattgtagcaccaactcgagaattggtcaaccagatttatttggaagccagaaaattttcttttgggacttgtgtaagagctgttgttatatatgggggaacccagctgggacattcaattcgacaaatagtacaaggctgtaatatattatgtgctactcctggaagactgatggatatcataggcaaagaaaagattggtctcaaacagatcaaatacttagttttggatgaagctgatcgcatgttggatatgggttttggtccagaaatgaagaagttaatttcttgcccaggaatgccatcaaaggaacagcgccaaacccttatgttcagtgcaacttttccagaggaaattcaaaggttggctgcagagtttttaaagtcaaattatctgtttgttgctgttggacaagtgggtggagcatgtagagatgttcagcagaccgttctccaagttggccagttctcaaaaagagaaaagctcgttgaaattctgcgaaacataggggatgaaagaactatggtctttgttgaaactaagaaaaaagcagattttattgcaacttttctttgtcaagaaaaaatatcaactacaagtattcatggtgatcgggaacagagagagcgggagcaagctcttggagattttcgctttggaaagtgcccagttcttgttgctacttcagtagctgccagagggctggatattgaaaatgtgcaacatgttatcaattttgatcttccttctaccattgatgaatatgttcatcgaattgggcgtactggtcgttgtgggaatactggcagagcaatttccttttttgatcttgaatcggataaccatttagcacagcctctagtaaaagtattgacagatgctcaacaggatgttcctgcatggttggaagaaattgcctttagtacatacattcctggcttcagtggtagtacaagaggaaacgtgtttgcatcagttgataccagaaagggcaagagcactttgaacacagctgggttttcttcttcacaagctcccaatccagtagatgatgagtcatgggattaaagccaaaacatccttcaagtctgtggttttgatgcagagaagaaaatagttttgatttttgagtttttaacagaagtataaaacttaacattctcatagctcctgtccttgtattctcactcctacacttaaaaaaaaaatccttactgactagttatgtgagatgctaaaacttacaacattgcagttactgatacaaatggtgttaactgggaatattaaagcattctaaatgtctttcttatttctggtatattctttagggggcttagacatgtttaatgtttaaatgccaagtcttactatagtgtttattgatcttataaaacaagcaaataggatatgatacacttttggttaaaaattactgggtctcatttttacttgagtctttaaaacagtagtgtgtcactataatgtgataatctttaagagaaagtagaatacttaagcctttcaaagtgattttgatttttagatcatcagatgtatgatgaaaatggttaaatgtttgtgatgggagctctgtactcaatggcataacaatgtttatttttataatatacaatctttccttgaaataaaggatgaaacacttttccctta

SEQ ID NO: 7857 - DNA, 2324 bp, Homo sapiens
  source 1..2324: mol_type = unassigned DNA
aacttgaagccaccatgggagatgaagattgggaagcagaaatcaaccctcatatgtcttcctatgttcccatatttgagaaggataggtattctggagaaaatggagacaattttaacaggactccagcttcatcatcagaaatggatgatggaccttctcgaagagatcatttcatgaaaagtggatttgcctctgggcggaattttggaaacagagatgctggtgagtgtaataagcgagataatacatccacaatgggtggttttggagttggaaagagttttggaaacagaggtttttcaaacagcaggtttgaagatggtgatagctctggtttctggagagagtctagtaatgactgcgaagataatccaacacggaacagagggttttccaagagaggcgataatgacttagacccagacgaatgtatgcagcgcactggtggcctttttggttctagaagaccagtattaagtggcacaggtaatggtgatacttctcaaagcagaagtggcagtggaagtgaacgaggtggttacaaaggtttaaatgaagaagtaataacaggctctggaaagaattcttggaagtcagaagcagaaggaggagaaagtagtgatactcaaggaccaaaagtgacctacataccccctcctccacctgaggatgaggactccatctttgcacattatcagacaggcataaacttcgacaaatacgacactattcttgtggaagtgtctggacatgatgcaccaccagcaattctgacttttgaagaagctaatctctgtcagacactgaataacaacattgctaaagctggttatactaagcttactcctgtgcaaaaatacagtattcctatcatacttgcaggacgagatttgatggcttgcgctcaaacagggtctgggaagactgcggcttttctcctaccaattttggctcatatgatgcatgatggaataactgccagtcgttttaaagagttgcaggaaccagagtgtattattgtagcaccaactcgagaattggtcaaccagatttatttggaagccagaaaattttcttttgggacttgtgtaagagctgttgttatatatgggggaacccagctgggacattcaattcgacaaatagtacaaggctgtaatatattatgtgctactcctggaagactgatggatatcataggcaaagaaaagattggtctcaaacagatcaaatacttagttttggatgaagctgatcgcatgttggatatgggttttggtccagaaatgaagaagttaatttcttgcccaggaatgccatcaaaggaacagcgccaaacccttatgttcagtgcaacttttccagaggaaattcaaaggttggctgcagagtttttaaagtcaaattatctgtttgttgctgttggacaagtgggtggagcatgtagagatgttcagcagaccgttctccaagttggccagttctcaaaaagagaaaagctcgttgaaattctgcgaaacataggggatgaaagaactatggtctttgttgaaactaagaaaaaagcagattttattgcaacttttctttgtcaagaaaaaatatcaactacaagtattcatggtgatcgggaacagagagagcgggagcaagctcttggagattttcgctttggaaagtgcccagttcttgttgctacttcagtagctgccagagggctggatattgaaaatgtgcaacatgttatcaattttgatcttccttctaccattgatgaatatgttcatcgaattgggcgtactggtcgttgtgggaatactggcagagcaatttccttttttgatcttgaatcggataaccatttagcacagcctctagtaaaagtattgacagatgctcaacaggatgttcctgcatggttggaagaaattgcctttagtacatacattcctggcttcagtggtagtacaagaggaaacgtgtttgcatcagttgataccagaaagggcaagagcactttgaacacagctgggttttcttcttcacaagctcccaatccagtagatgatgagtcatgggattaaagccaaaacatccttcaagtctgtggttttgatgcagagaagaaaatagttttgatttttgagtttttaacagaagtataaaacttaacattctcatagctcctgtccttgtattctcactcctacacttaaaaaaaaaatccttactgactagttatgtgagatgctaaaacttacaacattgcagttactgatacaaatggtgttaactgggaatattaaagcattctaaatgtc

SEQ ID NO: 7858 - DNA, 2884 bp, Homo sapiens
  source 1..2884: mol_type = unassigned DNA
gcagtgggcgtcttgcacgtgcagccgtttaagtcgcgtgggcgcctgcgagggcttgggagagcaagccgcggagagaacttgaagccaccatgggagatgaagattgggaagcagaaatcaaccctcatatgtcttcctatgttcccatatttgagaaggataggtattctggagaaaatggagacaattttaacaggactccagcttcatcatcagaaatggatgatggaccttctcgaagagatcatttcatgaaaagtggatttgcctctgggcggaattttggaaacagagatgctggtgagtgtaataagcgagataatacatccacaatgggtggttttggagttggaaagagttttggaaacagaggtttttcaaacagcaggtttgaagatggtgatagctctggtttctggagagagtctagtaatgactgcgaagataatccaacacggaacagagggttttccaagagaggcggctatcgagatggaaataattcagaagcttcagggccatacagaagaggtggaagaggtagtttccgaggttgccgtggaggatttggtctaggaagtccaaataatgacttagacccagacgaatgtatgcagcgcactggtggcctttttggttctagaagaccagtattaagtggcacaggtaatggtgatacttctcaaagcagaagtggcagtggaagtgaacgaggtggttacaaaggtttaaatgaagaagtaataacaggctctggaaagaattcttggaagtcagaagcagaaggaggagaaagtagtgatactcaaggaccaaaagtgacctacataccccctcctccacctgaggatgaggactccatctttgcacattatcagacaggcataaacttcgacaaatacgacactattcttgtggaagtgtctggacatgatgcaccaccagcaattctgacttttgaagaagctaatctctgtcagacactgaataacaacattgctaaagctggttatactaagcttactcctgtgcaaaaatacagtattcctatcatacttgcaggacgagatttgatggcttgcgctcaaacagggtctgggaagactgcggcttttctcctaccaattttggctcatatgatgcatgatggaataactgccagtcgttttaaagagttgcaggaaccagagtgtattattgtagcaccaactcgagaattggtcaaccagatttatttggaagccagaaaattttcttttgggacttgtgtaagagctgttgttatatatgggggaacccagctgggacattcaattcgacaaatagtacaaggctgtaatatattatgtgctactcctggaagactgatggatatcataggcaaagaaaagattggtctcaaacagatcaaatacttagttttggatgaagctgatcgcatgttggatatgggttttggtccagaaatgaagaagttaatttcttgcccaggaatgccatcaaaggaacagcgccaaacccttatgttcagtgcaacttttccagaggaaattcaaaggttggctgcagagtttttaaagtcaaattatctgtttgttgctgttggacaagtgggtggagcatgtagagatgttcagcagaccgttctccaagttggccagttctcaaaaagagaaaagctcgttgaaattctgcgaaacataggggatgaaagaactatggtctttgttgaaactaagaaaaaagcagattttattgcaacttttctttgtcaagaaaaaatatcaactacaagtattcatggtgatcgggaacagagagagcgggagcaagctcttggagattttcgctttggaaagtgcccagttcttgttgctacttcagtagctgccagagggctggatattgaaaatgtgcaacatgttatcaattttgatcttccttctaccattgatgaatatgttcatcgaattgggcgtactggtcgttgtgggaatactggcagagcaatttccttttttgatcttgaatcggataaccatttagcacagcctctagtaaaagtattgacagatgctcaacaggatgttcctgcatggttggaagaaattgcctttagtacatacattcctggcttcagtggtagtacaagaggaaacgtgtttgcatcagttgataccagaaagggcaagagcactttgaacacagctgggttttcttcttcacaagctcccaatccagtagatgatgagtcatgggattaaagccaaaacatccttcaagtctgtggttttgatgcagagaagaaaatagttttgatttttgagtttttaacagaagtataaaacttaacattctcatagctcctgtccttgtattctcactcctacacttaaaaaaaaaatccttactgactagttatgtgagatgctaaaacttacaacattgcagttactgatacaaatggtgttaactgggaatattaaagcattctaaatgtctttcttatttctggtatattctttagggggcttagacatgtttaatgtttaaatgccaagtcttactatagtgtttattgatcttataaaacaagcaaataggatatgatacacttttggttaaaaattactgggtctcatttttacttgagtctttaaaacagtagtgtgtcactataatgtgataatctttaagagaaagtagaatacttaagcctttcaaagtgattttgatttttagatcatcagatgtatgatgaaaatggttaaatgtttgtgatgggagctctgtactcaatggcataacaatgtttatttttataatatacaatctttccttgaaataaaggatgaaacacttttcccttaagttttccatc

SEQ ID NO: 7859 - DNA, 567 bp, Homo sapiens
  source 1..567: mol_type = unassigned DNA
agtgggccgcttttctacgggaactggcctgaactcggccgtacgggctccccagtaaccgacctttggccaaagtgtggatggagtaggaggagttttgaagccgtccttcgaagcctttctgcctcggggtctcagagtcccacgggtgcccaaagtctgggcttgaggcctgcagaggaggcgaaggggccttattcctggcttcttcactgcgttttctctgaacagacatgaacttgaagccaccatgggagatgaagattgggaagcagaaatcaaccctcatatgtcttcctatgttcccatatttgagaaggataggtattctggagaaaatggagacaattttaacaggactccagcttcatcatcagaaatggatgatggaccttctcgaagagatcatttcatgaaaagtggatttgcctctgggcggaattttggaaacagagatgctggtgagtgtaataagcgagataatacatccacaatgggtggttttggagttggaaagagttttggaaacagaggtttttcaaacagcaggtttgaagatggtgatag

SEQ ID NO: 7860 - DNA, 2451 bp, Homo sapiens
  source 1..2451: mol_type = unassigned DNA
acctgacgcagtgggcgtcttgcacgtgcagccgtttaagtcgcgtgggcgcctgcgagggcttgggagagcaagccgcggagagaacttgaagccaccatgggagatgaagattgggaagcagaaatcaaccctcatatgtcttcctatgttcccatatttgagaaggataggtattctggagaaaatggagacaattttaacaggactccagcttcatcatcagaaatggatgatggaccttctcgaagagatcatttcatgaaaagtggatttgcctctgggcggaattttggaaacagagatgctggtgagtgtaataagcgagataatacatccacaatgggtggttttggagttggaaagagttttggaaacagaggtttttcaaacagcaggtttgaagatggtgatagctctggtttctggagaggctatcgagatggaaataattcagaagcttcagggccatacagaagaggtggaagaggtagtttccgaggttgccgtggaggatttggtctaggaagtccaaataatgacttagacccagacgaatgtatgcagcgcactggtggcctttttggttctagaagaccagtattaagtggcacaggtaatggtgatacttctcaaagcagaagtggcagtggaagtgaacgaggtggttacaaaggtttaaatgaagaagtaataacaggctctggaaagaattcttggaagtcagaagcagaaggaggagaaagtagtgatactcaaggaccaaaagtgacctacataccccctcctccacctgaggatgaggactccatctttgcacattatcagacaggcataaacttcgacaaatacgacactattcttgtggaagtgtctggacatgatgcaccaccagcaattctgacttttgaagaagctaatctctgtcagacactgaataacaacattgctaaagctggttatactaagcttactcctgtgcaaaaatacagtattcctatcatacttgcaggacgagatttgatggcttgcgctcaaacagggtctgggaagactgcggcttttctcctaccaattttggctcatatgatgcatgatggaataactgccagtcgttttaaagagttgcaggaaccagagtgtattattgtagcaccaactcgagaattggtcaaccagatttatttggaagccagaaaattttcttttgggacttgtgtaagagctgttgttatatatgggggaacccagctgggacattcaattcgacaaatagtacaaggctgtaatatattatgtgctactcctggaagactgatggatatcataggcaaagaaaagattggtctcaaacagatcaaatacttagttttggatgaagctgatcgcatgttggatatgggttttggtccagaaatgaagaagttaatttcttgcccaggaatgccatcaaaggaacagcgccaaacccttatgttcagtgcaacttttccagaggaaattcaaaggttggctgcagagtttttaaagtcaaattatctgtttgttgctgttggacaagtgggtggagcatgtagagatgttcagcagaccgttctccaagttggccagttctcaaaaagagaaaagctcgttgaaattctgcgaaacataggggatgaaagaactatggtctttgttgaaactaagaaaaaagcagattttattgcaacttttctttgtcaagaaaaaatatcaactacaagtattcatggtgatcgggaacagagagagcgggagcaagctcttggagattttcgctttggaaagtgcccagttcttgttgctacttcagtagctgccagagggctggatattgaaaatgtgcaacatgttatcaattttgatcttccttctaccattgatgaatatgttcatcgaattgggcgtactggtcgttgtgggaatactggcagagcaatttccttttttgatcttgaatcggataaccatttagcacagcctctagtaaaagtattgacagatgctcaacaggatgttcctgcatggttggaagaaattgcctttagtacatacattcctggcttcagtggtagtacaagaggaaacgtgtttgcatcagttgataccagaaagggcaagagcactttgaacacagctgggttttcttcttcacaagctcccaatccagtagatgatgagtcatgggattaaagccaaaacatccttcaagtctgtggttttgatgcagagaagaaaatagttttgatttttgagtttttaacagaagtataaaacttaacattctcatagctcctgtccttgtattctcactcctacacttaaaaaaaaaatccttactgactagttatgtgagatgctaaaacttacaacattgcagttactgatacaaatggtgttaactgggaatattaaagcattctaaatgtc

SEQ ID NO: 7861 - DNA, 566 bp, Homo sapiens
  source 1..566: mol_type = unassigned DNA
ttttctacgggaactggcctgaactcggccgtacgggctccccagtaaccgacctttggccaaagtgtggatggaaacttgaagccaccatgggagatgaagattgggaagcagaaatcaaccctcatatgtcttcctatgttcccatatttgagaaggataggtattctggagaaaatggagacaattttaacaggactccagcttcatcatcagaaatggatgatggaccttctcgaagagatcatttcatgaaaagtggatttgcctctgggcggaattttggaaacagagatgctggtgagtgtaataagcgagataatacatccacaatgggtggttttggagttggaaagagttttggaaacagaggtttttcaaacagcaggtttgaagatggtgatagctctggtttctggagagagtctagtaatgactgcgaagataatccaacacggaacagagggttttccaagagaggcggctatcgagatggaaataattcagaagcttcagggccatacagaagaggtggaagaggtagtttccgaggttgccgtggagga

SEQ ID NO: 7862 - DNA, 1984 bp, Homo sapiens
  source 1..1984: mol_type = unassigned DNA
agaataaacatttctgggaatggggtctaggaatttatttttaaccaactctccagagtctagtaatgactgcgaagataatccaacacggaacagagggttttccaagagaggcgataatgacttagacccagacgaatgtatgcagcgcactggtggcctttttggttctagaagaccagtattaagtggcacaggtaatggtgatacttctcaaagcagaagtggcagtggaagtgaacgagattcttggaagtcagaagcagaaggaggagaaagtagtgatactcaaggaccaaaagtgacctacataccccctcctccacctgaggatgaggactccatctttgcacattatcagacaggcataaacttcgacaaatacgacactattcttgtggaagtgtctggacatgatgcaccaccagcaattctgacttttgaagaagctaatctctgtcagacactgaataacaacattgctaaagctggttatactaagcttactcctgtgcaaaaatacagtattcctatcatacttgcaggacgagatttgatggcttgcgctcaaacagggtctgggaagactgcggcttttctcctaccaattttggctcatatgatgcatgatggaataactgccagtcgttttaaagagttgcaggaaccagagtgtattattgtagcaccaactcgagaattggtcaaccagatttatttggaagccagaaaattttcttttgggacttgtgtaagagctgttgttatatatgggggaacccagctgggacattcaattcgacaaatagtacaaggctgtaatatattatgtgctactcctggaagactgatggatatcataggcaaagaaaagattggtctcaaacagatcaaatacttagttttggatgaagctgatcgcatgttggatatgggttttggtccagaaatgaagaagttaatttcttgcccaggaatgccatcaaaggaacagcgccaaacccttatgttcagtgcaacttttccagaggaaattcaaaggttggctgcagagtttttaaagtcaaattatctgtttgttgctgttggacaagtgggtggagcatgtagagatgttcagcagaccgttctccaagttggccagttctcaaaaagagaaaagctcgttgaaattctgcgaaacataggggatgaaagaactatggtctttgttgaaactaagaaaaaagcagattttattgcaacttttctttgtcaagaaaaaatatcaactacaagtattcatggtgatcgggaacagagagagcgggagcaagctcttggagattttcgctttggaaagtgcccagttcttgttgctacttcagtagctgccagagggctggatattgaaaatgtgcaacatgttatcaattttgatcttccttctaccattgatgaatatgttcatcgaattgggcgtactggtcgttgtgggaatactggcagagcaatttccttttttgatcttgaatcggataaccatttagcacagcctctagtaaaagtattgacagatgctcaacaggatgttcctgcatggttggaagaaattgcctttagtacatacattcctggcttcagtggtagtacaagaggaaacgtgtttgcatcagttgataccagaaagggcaagagcactttgaacacagctgggttttcttcttcacaagctcccaatccagtagatgatgagtcatgggattaaagccaaaacatccttcaagtctgtggttttgatgcagagaagaaaatagttttgatttttgagtttttaacagaagtataaaacttaacattctcatagctcctgtccttgtattctcactcctacacttaaaaaaaaaatccttactgactagttatgtgagatgctaaaacttacaacattgcagttactgatacaaatggtgttaactgggaatattaaagcattctaaatgtc

SEQ ID NO: 7863 - DNA, 2607 bp, Homo sapiens
  source 1..2607: mol_type = unassigned DNA
acacaggcgcagtcagggaggcagggtgtgtcgagcggtttatcccgcaaccccggcgtccccggcagggatgaaagcgcagggcccacgcgaactcggcccgcagctcccggccctagaggacgcactgtccgccggcaggggcgtgcccaagacgccatgctctgggagaggttgggcacctggcaggccgccccgactccggatcagctgtctccgctgcgtacgtcttcctcttccaatgggcttggattgagccttctagcgcatattccaagtcctccaatgtcccacaatgccttgcagccggtttcgccctcggtcctggcaactgtcgcgtaaccacccatgaaagcgtccatgcctcgccgtgcgatagtatctccggaacaaatttgtccctctgcgcgatccggaactccgaggtcgttcctacgcgccgtcgttcgcctcttcacatcggattgggtctcacgcaaggatgaggcggggtttcgccgtggcgcgcatgcgtgcagcaaagaatggaggagtcggaacccgaacggaagcgggctcgcaccgacgaggtgcctgccggaggaagccgctccgaggcggaagatgaggacgacgaggactacgtgccctatgtgccgttacggcagcgccggcagctactgctccagaagctgctgcagcgaagacgcaagggagctgcggaggaagagcagcaggacagcggtagtgaaccccggggagatgaggacgacatcccgctaggccctcagtccaacgtcagcctcctggatcagcaccagcaccttaaagagaaggctgaagcgcgcaaagagtctgccaaggagaagcagctgaaggaagaagagaagatcctggagagtgttgccgagggccgagcattgatgtcagtgaaggagatggctaagggcattacgtatgatgaccccatcaaaaccagctggactccaccccgttatgttctgagcatgtctgaagagcgacatgagcgcgtgcggaagaaataccacatcctggtggagggagacggtatcccaccacccatcaagagcttcaaggaaatgaagtttcctgcagccatcctgagaggcctgaagaagaaaggcattcaccacccaacacccattcagatccagggcatccccaccattctatctggccgtgacatgataggcatcgctttcacgggttcaggcaagacactggtgttcacgttgcccgtcatcatgttctgcctggaacaagagaagaggttacccttctcaaagcgcgaggggccctatggactcatcatctgcccctcgcgggagctggcccggcagacccatggcatcctggagtactactgccgcctgctgcaggaggacagctcaccactcctgcgctgcgccctctgcattgggggcatgtccgtgaaagagcagatggagaccatccgacacggtgtacacatgatggtggccaccccggggcgcctcatggatttgctgcagaagaagatggtcagcctagacatctgtcgctacctggccctggacgaggctgaccgcatgatcgacatgggcttcgagggtgacatccgtaccatcttctcctacttcaagggccagcgacagaccctgctcttcagtgccaccatgccgaagaagattcagaactttgctaagagtgcccttgtaaagcctgtgaccatcaatgtggggcgcgctggggctgccagcctggatgtcatccaggaggtagaatatgtgaaggaggaggccaagatggtgtacctgctcgagtgcctgcagaagacacccccgcctgtactcatctttgcagagaagaaggcagacgtggacgccatccacgagtacctgctgctcaagggggttgaggccgtagccatccatgggggcaaagaccaggaggaacggactaaggccatcgaggcattccgggagggcaagaaggatgtcctagtagccacagacgttgcctccaagggcctggacttccctgccatccagcacgtcatcaattatgacatgccagaggagattgagaactatgtacaccggattggccgcaccgggcgctcgggaaacacaggcatcgccactaccttcatcaacaaagcgtgtgatgagtcagtgctgatggacctcaaagcgctgctgctagaagccaagcagaaggtgccgcccgtgctgcaggtgctgcattgcggggatgagtccatgctggacattggaggagagcgcggctgtgccttctgcgggggcctgggtcatcggatcactgactgccccaaactcgaggctatgcagaccaagcaggtcagcaacatcggtcgcaaggactacctggcccacagctccatggacttctgagccgacagtcttcccttctctccaagaggcctcagtccccaagactgccaccagtctacacatacagcagccccctggacagaatcagcatttcagctcagctggcctgggatgggccaggctggtcctggctgcctgttccctgtgctcttcagaattactgtttttgtttccttttaccccagctgccattaaagcccaaacctctagccca

SEQ ID NO: 7864 - DNA, 2658 bp, Homo sapiens
  source 1..2658: mol_type = unassigned DNA
ggtggtcctggcactaagcgaggatttggctttggaggttttgccatcagtgctgggaaaaaggaggaacccaaactcccacagcagtcccacagtgcctttggggcaaccagctcttcttctggatttggaaagtcagctccaccacagcttccttctttctacaaaattggatctaagcgggccaactttgatgaagaaaatgcctattttgaagatgaggaagaagattctagcaacgttgatttaccttacattcctgctgaaaactcaccaactcgccagcaattccattccaagccagtagattctgacagcgatgatgatcccttggaggcattcatggctgaagtggaggatcaggcagctagagacatgaagaggcttgaagaaaaggacaaggaaagaaaaaacgtaaagggtattcgagatgacattgaagaggaagatgaccaagaagcttattttcgatacatggcagaaaacccaactgctggtgtggttcaggaggaagaggaagacaatctagaatatgatagtgacggaaatccaattgcacctaccaaaaaaatcattgatcctcttccccccattgatcattcagagattgactatccaccatttgaaaaaaacttttacaatgagcatgaagagataaccaacctcactccacagcagttaatagatctccggcataagctcaatcttcgggtctctggtgctgcacctcctagaccaggaagtagctttgctcattttgggtttgacgaacaacttatgcaccagattcggaaatctgaatacacacagcccactccaatacagtgccagggtgtgcctgtggcattaagtggtagagacatgattggtattgccaaaacaggtagtgggaaaactgcagccttcatttggcccatgttgattcatataatggaccagaaggagttggaaccaggtgatggaccaattgcagtgattgtgtgtcctaccagggagctttgccagcagatccatgcagaatgtaagcggtttggaaaagcatataatcttcgatcagtggccgtatatggaggagggagtatgtgggagcaggccaaggcccttcaggagggggcagagattgttgtgtgtaccccaggtcgactgatagatcatgtgaaaaagaaagctaccaatcttcaaagagtctcttaccttgtgtttgatgaagcagatcgaatgtttgacatgggatttgagtaccaagttcgatccatagcaagtcatgttcgtcctgacaggcagactctcttatttagtgcaacttttcggaagaagattgaaaagttggccagagacatcctgatcgaccctattcgagtggtgcagggagatattggagaggcaaatgaagatgtgacacagattgtggagattctccattctggacctagtaaatggaactggcttacccggcgtctggtagaatttacctcttcagggagtgtcctcctctttgttactaaaaaagccaatgctgaagagctagcgaataaccttaaacaggagggtcataatcttgggctgctccatggggatatggatcagagtgagagaaacaaggtcatttcagactttaagaaaaaggacatcccagtcctggtggccacagatgttgcagcccgtggtctggacattccttcaattaagactgtcattaactatgatgtggcacgagacattgataccctactcactcccaaggacagcaattttgctggtgacctggtccggaacttggaaggagccaatcaacacgtttctaaggaactcctagatctggcaatgcagaatgcctggtttcggaaatctcgattcaaaggagggaaaggaaaaaagctgaacattggtggaggaggcctaggctacagggagcggcctggcctgggctctgagaacatggatcgaggaaataacaatgtaatgagcaattatgaggcctacaagccttccacaggagctatgggagatcgactaacggcaatgaaagcagctttccagtcacagtacaagagtcactttgttgcagccagtttaagtaatcagaaggctggaagttctgctgctggggcaagtgggtggactagtgcagggagcttgaattctgttccaactaactcagcacaacagggccataacagtcctgacagccccgtcaccagtgccgccaagggcatcccaggctttggcaatactggcaacatcagtggtgcccctgtgacctacccgtctgccggagcccaaggagtcaacaacacagcttcagggaataacagccgagaagggactgggggcagcaacgggaaaagagagagatatactgagaaccggggcagcagccgtcacagtcacggagagactggcaatcggcatagcgatagtccacgtcacggagatggtggtcgccatggagatggataccgccatccagaaagcagcagccgtcatactgatggccatcggcacggggagaacagacatggaggaagcgcaggccggcatggggagaaccggggtgcaaatgatggtcggaatggggaaagcaggaaagaagcttttaatcgtgagagcaagatggagcccccgcctaaacgcaagaaaagtcgatgggacagttag

SEQ ID NO: 7865 - DNA, 3921 bp, Homo sapiens
  source 1..3921: mol_type = unassigned DNA
tggcggtggtggcggtggcggcggcggtggtggtggtggcggcggcggcggcgaagggggcggagaggaaggagcgcggcgggaccgggccgggacagcgcgtactttgggctccgggattcgctccgcgcccgcggttgtagcagctgccgctgcagccatagcagcaggtcagtcattggcaccatgaactggaataaaggtggtcctggcactaagcgaggatttggctttggaggttttgccatcagtgctgggaaaaaggaggaacccaaactcccacagcagtcccacagtgcctttggggcaaccagctcttcttctggatttggaaagtcagctccaccacagcttccttctttctacaaaattggatctaagcgggccaactttgatgaagaaaatgcctattttgaagatgaggaagaagattctagcaacgttgatttaccttacattcctgctgaaaactcaccaactcgccagcaattccattccaagccagtagattctgacagcgatgatgatcccttggaggcattcatggctgaagtggaggatcaggcagctagagacatgaagaggcttgaagaaaaggacaaggaaagaaaaaacgtaaagggtattcgagatgacattgaagaggaagatgaccaagaagcttattttcgatacatggcagaaaacccaactgctggtgtggttcaggaggaagaggaagacaatctagaatatgatagtgacggaaatccaattgcacctaccaaaaaaatcattgatcctcttccccccattgatcattcagagattgactatccaccatttgaaaaaaacttttacaatgagcatgaagagataaccaacctcactccacagcagttaatagatctccggcataagctcaatcttcgggtctctggtgctgcacctcctagaccaggaagtagctttgctcattttgggtttgacgaacaacttatgcaccagattcggaaatctgaatacacacagcccactccaatacagtgccagggtgtgcctgtggcattaagtggtagagacatgattggtattgccaaaacaggtagtgggaaaactgcagccttcatttggcccatgttgattcatataatggaccagaaggagttggaaccaggtgatggaccaattgcagtgattgtgtgtcctaccagggagctttgccagcagatccatgcagaatgtaagcggtttggaaaagcatataatcttcgatcagtggccgtatatggaggagggagtatgtgggagcaggccaaggcccttcaggagggggcagagattgttgtgtgtaccccaggtcgactgatagatcatgtgaaaaagaaagctaccaatcttcaaagagtctcttaccttgtgtttgatgaagcagatcgaatgtttgacatgggatttgagtaccaagttcgatccatagcaagtcatgttcgtcctgacaggcagactctcttatttagtgcaacttttcggaagaagattgaaaagttggccagagacatcctgatcgaccctattcgagtggtgcagggagatattggagaggcaaatgaagatgtgacacagattgtggagattctccattctggacctagtaaatggaactggcttacccggcgtctggtagaatttacctcttcagggagtgtcctcctctttgttactaaaaaagccaatgctgaagagctagcgaataaccttaaacaggagggtcataatcttgggctgctccatggggatatggatcagagtgagagaaacaaggtcatttcagactttaagaaaaaggacatcccagtcctggtggccacagatgttgcagcccgtggtctggacattccttcaattaagactgtcattaactatgatgtggcacgagacattgatacccacacgcataggattggccgcacaggaagagcgggtgagaaaggtgtggcctataccctactcactcccaaggacagcaattttgctggtgacctggtccggaacttggaaggagccaatcaacacgtttctaaggaactcctagatctggcaatgcagaatgcctggtttcggaaatctcgattcaaaggagggaaaggaaaaaagctgaacattggtggaggaggcctaggctacagggagcggcctggcctgggctctgagaacatggatcgaggaaataacaatgtaatgagcaattatgaggcctacaagccttccacaggagctatgggagatcgactaacggcaatgaaagcagctttccagtcacagtacaagagtcactttgttgcagccagtttaagtaatcagaaggctggaagttctgctgctggggcaagtgggtggactagtgcagggagcttgaattctgttccaactaactcagcacaacagggccataacagtcctgacagccccgtcaccagtgccgccaagggcatcccaggctttggcaatactggcaacatcagtggtgcccctgtgacctacccgtctgccggagcccaaggagtcaacaacacagcttcagggaataacagccgagaagggactgggggcagcaacgggaaaagagagagatatactgagaaccggggcagcagccgtcacagtcacggagagactggcaatcggcatagcgatagtccacgtcacggagatggtggtcgccatggagatggataccgccatccagaaagcagcagccgtcatactgatggccatcggcacggggagaacagacatggaggaagcgcaggccggcatggggagaaccggggtgcaaatgatggtcggaatggggaaagcaggaaagaagcttttaatcgtgagagcaagatggagcccaagatggaacccaaagtggacagcagcaagatggacaaggtggacagcaagacagataagacagctgacggctttgctgtcccagagccgcctaaacgcaagaaaagtcgatgggacagttagaggggatgtgctaaagcgtgaaatcagttgtccttaatttttagaaagattttggtaactaggtgtctcagggctgggttggggtccaaagtgtaaggaccccctgcccttagtggagagctggagcttggagacattaccccttcatcagaaggaattttcggatgttttcttgggaagctgttttggtccttggaagcagtgagagctgggaagcttcttttggctctaggtgagttgtcatgtgggtaagttgaggttatcttgggataaagggtcttctagggcacaaaactcactctaggtttatattgtatgtagcttatattttttactaaggtgtcaccttataagcatctataaattgacttctttttcttagttgtatggccaggcagtccccattttaggagttggcttctgcaaattcaatccattgagctaactgttggggagcaatttggtagttgtagacatttgcagggaagggagatgtctgattctaaatgggagttgatgctcaggtccccagccaggtttgcatccagccctgagacatgtaggaaacacctttcagacccaggctctgaagattcccagaagccacaaggattgaagggaaaaggtgatcctggtaactgttccaggattgctccaggtttgagatggtattgctaaatttaaaattaaacaagaaacccaacaacagcttttaaagtgtcttctatctcattgtattttttttaacttgccccaatgatagaaaagtcttttgctgaaatgattttgatgatttttgtttatcgtttataaaaaggaaaagaaatatacaaactttgacttttgtgactttgtgaaggtttctttaagatgtgcattcctttctgcttgctctctagtaaatgttttactaccggg

SEQ ID NO: 7866 - DNA, 3735 bp, Homo sapiens
  source 1..3735: mol_type = unassigned DNA
atgaactggaataaaggtggtcctggcactaagcgaggatttggctttggaggttttgccatcagtgctgggaaaaaggaggaacccaaactcccacagcagtcccacagtgcctttggggcaaccagctcttcttctggatttggaaagtcagctccaccacagcttccttctttctacaaaattggatctaagcgggccaactttgatgaagaaaatgcctattttgaagatgaggaagaagattctagcaacgttgatttaccttacattcctgctgaaaactcaccaactcgccagcaattccattccaagccagtagattctgacagcgatgatgatcccttggaggcattcatggctgaagtggaggatcaggcagctagagacatgaagaggcttgaagaaaaggacaaggaaagaaaaaacgtaaagggtattcgagatgacattgaagaggaagatgaccaagaagcttattttcgatacatggcagaaaacccaactgctggtgtggttcaggaggaagaggaagacaatctagaatatgatagtgacggaaatccaattgcacctaccaaaaaaatcattgatcctcttccccccattgatcattcagagattgactatccaccatttgaaaaaaacttttacaatgagcatgaagagataaccaacctcactccacagcagttaatagatctccggcataagctcaatcttcgggtctctggtgctgcacctcctagaccaggaagtagctttgctcattttgggtttgacgaacaacttatgcaccagattcggaaatctgaatacacacagcccactccaatacagtgccagggtgtgcctgtggcattaagtggtagagacatgattggtattgccaaaacaggtagtgggaaaactgcagccttcatttggcccatgttgattcatataatggaccagaaggagttggaaccaggtgatggaccaattgcagtgattgtgtgtcctaccagggagctttgccagcagatccatgcagaatgtaagcggtttggaaaagcatataatcttcgatcagtggccgtatatggaggagggagtatgtgggagcaggccaaggcccttcaggagggggcagagattgttgtgtgtaccccaggtcgactgatagatcatgtgaaaaagaaagctaccaatcttcaaagagtctcttaccttgtgtttgatgaagcagatcgaatgtttgacatgggatttgagtaccaagttcgatccatagcaagtcatgttcgtcctgacaggcagactctcttatttagtgcaacttttcggaagaagattgaaaagttggccagagacatcctgatcgaccctattcgagtggtgcagggagatattggagaggcaaatgaagatgtgacacagattgtggagattctccattctggacctagtaaatggaactggcttacccggcgtctggtagaatttacctcttcagggagtgtcctcctctttgttactaaaaaagccaatgctgaagagctagcgaataaccttaaacaggagggtcataatcttgggctgctccatggggatatggatcagagtgagagaaacaaggtcatttcagactttaagaaaaaggacatcccagtcctggtggccacagatgttgcagcccgtggtctggacattccttcaattaagactgtcattaactatgatgtggcacgagacattgatacccacacgcataggattggccgcacaggaagagcgggtgagaaaggtgtggcctataccctactcactcccaaggacagcaattttgctggtgacctggtccggaacttggaaggagccaatcaacacgtttctaaggaactcctagatctggcaatgcagaatgcctggtttcggaaatctcgattcaaaggagggaaaggaaaaaagctgaacattggtggaggaggcctaggctacagggagcggcctggcctgggctctgagaacatggatcgaggaaataacaatgtaatgagcaattatgaggcctacaagccttccacaggagctatgggagatcgactaacggcaatgaaagcagctttccagtcacagtacaagagtcactttgttgcagccagtttaagtaatcagaaggctggaagttctgctgctggggcaagtgggtggactagtgcagggagcttgaattctgttccaactaactcagcacaacagggccataacagtcctgacagccccgtcaccagtgccgccaagggcatcccaggctttggcaatactggcaacatcagtggtgcccctgtgacctacccgtctgccggagcccaaggagtcaacaacacagcttcagggaataacagccgagaagggactgggggcagcaacgggaaaagagagagatatactgagaaccggggcagcagccgtcacagtcacggagagactggcaatcggcatagcgatagtccacgtcacggagatggtggtcgccatggagatggataccgccatccagaaagcagcagccgtcatactgatggccatcggcacggggagaacagacatggaggaagcgcaggccggcatggggagaaccggggtgcaaatgatggtcggaatggggaaagcaggaaagaagcttttaatcgtgagagcaagatggagcccaagatggaacccaaagtggacagcagcaagatggacaaggtggacagcaagacagataagacagctgacggctttgctgtcccagagccgcctaaacgcaagaaaagtcgatgggacagttagaggggatgtgctaaagcgtgaaatcagttgtccttaatttttagaaagattttggtaactaggtgtctcagggctgggttggggtccaaagtgtaaggaccccctgcccttagtggagagctggagcttggagacattaccccttcatcagaaggaattttcggatgttttcttgggaagctgttttggtccttggaagcagtgagagctgggaagcttcttttggctctaggtgagttgtcatgtgggtaagttgaggttatcttgggataaagggtcttctagggcacaaaactcactctaggtttatattgtatgtagcttatattttttactaaggtgtcaccttataagcatctataaattgacttctttttcttagttgtatggccaggcagtccccattttaggagttggcttctgcaaattcaatccattgagctaactgttggggagcaatttggtagttgtagacatttgcagggaagggagatgtctgattctaaatgggagttgatgctcaggtccccagccaggtttgcatccagccctgagacatgtaggaaacacctttcagacccaggctctgaagattcccagaagccacaaggattgaagggaaaaggtgatcctggtaactgttccaggattgctccaggtttgagatggtattgctaaatttaaaattaaacaagaaacccaacaacagcttttaaagtgtcttctatctcattgtattttttttaacttgccccaatgatagaaaagtcttttgctgaaatgattttgatgatttttgtttatcgtttataaaaaggaaaagaaatatacaaactttgacttttgtgactttgtgaaggtttctttaagatgtgcattcctttctgcttgctctctagtaaatgttttactaccggg

SEQ ID NO: 7867 - DNA, 4337 bp, Homo sapiens
  source 1..4337: mol_type = unassigned DNA
caagagtgtcgctctagtagtatatgcaacagtttaaactataggcatgttcatgtaaatatggtttctgtccaacccgttttctcttgggatttttggctagccccttgacgccactttttcttcattcgcagacccactttctagatgggtcatgaacactgtccacccaactgcagtttcccgtcagagtatctgaggagcctgtgaggcgttctggagctttaaggtcaggcgccttccgggagccgtagccccggccccgcccttctgcccgcgcgttcctcactgcgcatgtcgcgtttttgttcccctccccccttcagcaacgggccgtgaggcggtggcggtggtggcggtggcggcggcggtggtggtggtggcggcggcggcggcgaagggggcggagaggaaggagcgcggcgggaccgggccgggacagcgcgtactttgggctccgggattcgctccgcgcccgcggttgtagcagctgccgctgcagccatagcagcaggacttcctcaagcgcagggactatgtcttaaggcgctttgcagagccaagctcatttctggcacataagaggtcagtcattggcaccatgaactggaataaaggtggtcctggcactaagcgaggatttggctttggaggttttgccatcagtgctgggaaaaaggaggaacccaaactcccacagcagtcccacagtgcctttggggcaaccagctcttcttctggatttggaaagtcagctccaccacagcttccttctttctacaaaattggatctaagcgggccaactttgatgaagaaaatgcctattttgaagatgaggaagaagattctagcaacgttgatttaccttacattcctgctgaaaactcaccaactcgccagcaattccattccaagccagtagattctgacagcgatgatgatcccttggaggcattcatggctgaagtggaggatcaggcagctagagacatgaagaggcttgaagaaaaggacaaggaaagaaaaaacgtaaagggtattcgagatgacattgaagaggaagatgaccaagaagcttattttcgatacatggcagaaaacccaactgctggtgtggttcaggaggaagaggaagacaatctagaatatgatagtgacggaaatccaattgcacctaccaaaaaaatcattgatcctcttccccccattgatcattcagagattgactatccaccatttgaaaaaaacttttacaatgagcatgaagagataaccaacctcactccacagcagttaatagatctccggcataagctcaatcttcgggtctctggtgctgcacctcctagaccaggaagtagctttgctcattttgggtttgacgaacaacttatgcaccagattcggaaatctgaatacacacagcccactccaatacagtgccagggtgtgcctgtggcattaagtggtagagacatgattggtattgccaaaacaggtagtgggaaaactgcagccttcatttggcccatgttgattcatataatggaccagaaggagttggaaccaggtgatggaccaattgcagtgattgtgtgtcctaccagggagctttgccagcagatccatgcagaatgtaagcggtttggaaaagcatataatcttcgatcagtggccgtatatggaggagggagtatgtgggagcaggccaaggcccttcaggagggggcagagattgttgtgtgtaccccaggtcgactgatagatcatgtgaaaaagaaagctaccaatcttcaaagagtctcttaccttgtgtttgatgaagcagatcgaatgtttgacatgggatttgagtaccaagttcgatccatagcaagtcatgttcgtcctgacaggcagactctcttatttagtgcaacttttcggaagaagattgaaaagttggccagagacatcctgatcgaccctattcgagtggtgcagggagatattggagaggcaaatgaagatgtgacacagattgtggagattctccattctggacctagtaaatggaactggcttacccggcgtctggtagaatttacctcttcagggagtgtcctcctctttgttactaaaaaagccaatgctgaagagctagcgaataaccttaaacaggagggtcataatcttgggctgctccatggggatatggatcagagtgagagaaacaaggtcatttcagactttaagaaaaaggacatcccagtcctggtggccacagatgttgcagcccgtggtctggacattccttcaattaagactgtcattaactatgatgtggcacgagacattgatacccacacgcataggattggccgcacaggaagagcgggtgagaaaggtgtggcctataccctactcactcccaaggacagcaattttgctggtgacctggtccggaacttggaaggagccaatcaacacgtttctaaggaactcctagatctggcaatgcagaatgcctggtttcggaaatctcgattcaaaggagggaaaggaaaaaagctgaacattggtggaggaggcctaggctacagggagcggcctggcctgggctctgagaacatggatcgaggaaataacaatgtaatgagcaattatgaggcctacaagccttccacaggagctatgggagatcgactaacggcaatgaaagcagctttccagtcacagtacaagagtcactttgttgcagccagtttaagtaatcagaaggctggaagttctgctgctggggcaagtgggtggactagtgcagggagcttgaattctgttccaactaactcagcacaacagggccataacagtcctgacagccccgtcaccagtgccgccaagggcatcccaggctttggcaatactggcaacatcagtggtgcccctgtgacctacccgtctgccggagcccaaggagtcaacaacacagcttcagggaataacagccgagaagggactgggggcagcaacgggaaaagagagagatatactgagaaccggggcagcagccgtcacagtcacggagagactggcaatcggcatagcgatagtccacgtcacggagatggtggtcgccatggagatggataccgccatccagaaagcagcagccgtcatactgatggccatcggcacggggagaacagacatggaggaagcgcaggccggcatggggagaaccggggtgcaaatgatggtcggaatggggaaagcaggaaagaagcttttaatcgtgagagcaagatggagcccaagatggaacccaaagtggacagcagcaagatggacaaggtggacagcaagacagataagacagctgacggctttgctgtcccagagccgcctaaacgcaagaaaagtcgatgggacagttagaggggatgtgctaaagcgtgaaatcagttgtccttaatttttagaaagattttggtaactaggtgtctcagggctgggttggggtccaaagtgtaaggaccccctgcccttagtggagagctggagcttggagacattaccccttcatcagaaggaattttcggatgttttcttgggaagctgttttggtccttggaagcagtgagagctgggaagcttcttttggctctaggtgagttgtcatgtgggtaagttgaggttatcttgggataaagggtcttctagggcacaaaactcactctaggtttatattgtatgtagcttatattttttactaaggtgtcaccttataagcatctataaattgacttctttttcttagttgtatggccaggcagtccccattttaggagttggcttctgcaaattcaatccattgagctaactgttggggagcaatttggtagttgtagacatttgcagggaagggagatgtctgattctaaatgggagttgatgctcaggtccccagccaggtttgcatccagccctgagacatgtaggaaacacctttcagacccaggctctgaagattcccagaagccacaaggattgaagggaaaaggtgatcctggtaactgttccaggattgctccaggtttgagatggtattgctaaatttaaaattaaacaagaaacccaacaacagcttttaaagtgtcttctatctcattgtattttttttaacttgccccaatgatagaaaagtcttttgctgaaatgattttgatgatttttgtttatcgtttataaaaaggaaaagaaatatacaaactttgacttttgtgactttgtgaaggtttctttaagatgtgcattcctttctgcttgctctctagtaaatgttttactaccggga

SEQ ID NO: 7868 - DNA, 4148 bp, Homo sapiens
  source 1..4148: mol_type = unassigned DNA
atatgcaacagtttaaactataggcatgttcatgtaaatatggtttctgtccaacccgttttctcttgggatttttggctagccccttgacgccactttttcttcattcgcagacccactttctagatgggtcatgaacactgtccacccaactgcagtttcccgtcagagtatctgaggagcctgtgaggcgttctggagctttaagcaacgggccgtgaggcggtggcggtggtggcggtggcggcggcggtggtggtggtggcggcggcggcggcgaagggggcggagaggaaggagcgcggcgggaccgggccgggacagcgcgtactttgggctccgggattcgctccgcgcccgcggttgtagcagctgccgctgcagccatagcagcaggtcagtcattggcaccatgaactggaataaaggtggtcctggcactaagcgaggatttggctttggaggttttgccatcagtgctgggaaaaaggaggaacccaaactcccacagcagtcccacagtgcctttggggcaaccagctcttcttctggatttggaaagtcagctccaccacagcttccttctttctacaaaattggatctaagcgggccaactttgatgaagaaaatgcctattttgaagatgaggaagaagattctagcaacgttgatttaccttacattcctgctgaaaactcaccaactcgccagcaattccattccaagccagtagattctgacagcgatgatgatcccttggaggcattcatggctgaagtggaggatcaggcagctagagacatgaagaggcttgaagaaaaggacaaggaaagaaaaaacgtaaagggtattcgagatgacattgaagaggaagatgaccaagaagcttattttcgatacatggcagaaaacccaactgctggtgtggttcaggaggaagaggaagacaatctagaatatgatagtgacggaaatccaattgcacctaccaaaaaaatcattgatcctcttccccccattgatcattcagagattgactatccaccatttgaaaaaaacttttacaatgagcatgaagagataaccaacctcactccacagcagttaatagatctccggcataagctcaatcttcgggtctctggtgctgcacctcctagaccaggaagtagctttgctcattttgggtttgacgaacaacttatgcaccagattcggaaatctgaatacacacagcccactccaatacagtgccagggtgtgcctgtggcattaagtggtagagacatgattggtattgccaaaacaggtagtgggaaaactgcagccttcatttggcccatgttgattcatataatggaccagaaggagttggaaccaggtgatggaccaattgcagtgattgtgtgtcctaccagggagctttgccagcagatccatgcagaatgtaagcggtttggaaaagcatataatcttcgatcagtggccgtatatggaggagggagtatgtgggagcaggccaaggcccttcaggagggggcagagattgttgtgtgtaccccaggtcgactgatagatcatgtgaaaaagaaagctaccaatcttcaaagagtctcttaccttgtgtttgatgaagcagatcgaatgtttgacatgggatttgagtaccaagttcgatccatagcaagtcatgttcgtcctgacaggcagactctcttatttagtgcaacttttcggaagaagattgaaaagttggccagagacatcctgatcgaccctattcgagtggtgcagggagatattggagaggcaaatgaagatgtgacacagattgtggagattctccattctggacctagtaaatggaactggcttacccggcgtctggtagaatttacctcttcagggagtgtcctcctctttgttactaaaaaagccaatgctgaagagctagcgaataaccttaaacaggagggtcataatcttgggctgctccatggggatatggatcagagtgagagaaacaaggtcatttcagactttaagaaaaaggacatcccagtcctggtggccacagatgttgcagcccgtggtctggacattccttcaattaagactgtcattaactatgatgtggcacgagacattgatacccacacgcataggattggccgcacaggaagagcgggtgagaaaggtgtggcctataccctactcactcccaaggacagcaattttgctggtgacctggtccggaacttggaaggagccaatcaacacgtttctaaggaactcctagatctggcaatgcagaatgcctggtttcggaaatctcgattcaaaggagggaaaggaaaaaagctgaacattggtggaggaggcctaggctacagggagcggcctggcctgggctctgagaacatggatcgaggaaataacaatgtaatgagcaattatgaggcctacaagccttccacaggagctatgggagatcgactaacggcaatgaaagcagctttccagtcacagtacaagagtcactttgttgcagccagtttaagtaatcagaaggctggaagttctgctgctggggcaagtgggtggactagtgcagggagcttgaattctgttccaactaactcagcacaacagggccataacagtcctgacagccccgtcaccagtgccgccaagggcatcccaggctttggcaatactggcaacatcagtggtgcccctgtgacctacccgtctgccggagcccaaggagtcaacaacacagcttcagggaataacagccgagaagggactgggggcagcaacgggaaaagagagagatatactgagaaccggggcagcagccgtcacagtcacggagagactggcaatcggcatagcgatagtccacgtcacggagatggtggtcgccatggagatggataccgccatccagaaagcagcagccgtcatactgatggccatcggcacggggagaacagacatggaggaagcgcaggccggcatggggagaaccggggtgcaaatgatggtcggaatggggaaagcaggaaagaagcttttaatcgtgagagcaagatggagcccaagatggaacccaaagtggacagcagcaagatggacaaggtggacagcaagacagataagacagctgacggctttgctgtcccagagccgcctaaacgcaagaaaagtcgatgggacagttagaggggatgtgctaaagcgtgaaatcagttgtccttaatttttagaaagattttggtaactaggtgtctcagggctgggttggggtccaaagtgtaaggaccccctgcccttagtggagagctggagcttggagacattaccccttcatcagaaggaattttcggatgttttcttgggaagctgttttggtccttggaagcagtgagagctgggaagcttcttttggctctaggtgagttgtcatgtgggtaagttgaggttatcttgggataaagggtcttctagggcacaaaactcactctaggtttatattgtatgtagcttatattttttactaaggtgtcaccttataagcatctataaattgacttctttttcttagttgtatggccaggcagtccccattttaggagttggcttctgcaaattcaatccattgagctaactgttggggagcaatttggtagttgtagacatttgcagggaagggagatgtctgattctaaatgggagttgatgctcaggtccccagccaggtttgcatccagccctgagacatgtaggaaacacctttcagacccaggctctgaagattcccagaagccacaaggattgaagggaaaaggtgatcctggtaactgttccaggattgctccaggtttgagatggtattgctaaatttaaaattaaacaagaaacccaacaacagcttttaaagtgtcttctatctcattgtattttttttaacttgccccaatgatagaaaagtcttttgctgaaatgattttgatgatttttgtttatcgtttataaaaaggaaaagaaatatacaaactttgacttttgtgactttgtgaaggtttctttaagatgtgcattcctttctgcttgctctctagtaaatgttttactaccggga

SEQ ID NO: 7869 - DNA, 2513 bp, Homo sapiens
  source 1..2513: mol_type = unassigned DNA
agtgggcgggatagagagcgtgggcgggggggctagcctcgtgcgggctccttaagtagcggctgcgtggcttccctggcacgctactcttacgacgtcacggtcaggtggtgcagagctggacggcaacgacgtcggacgcgccccttcttggaacaatgtcccaccacggaggagctcccaaggcctctacgtgggtcgttgctagtcggcgaagctcgacagtgtcccgagcgccagagaggaggccggcggaggagttgaatcgaacaggtcctgagggatatagtgtcggcagaggtggtcgctggagaggcacctctaggcccccggaggccgtggccgctggtcacgaggaactgccgctgtgttttgctttgaagagccactttgttggcgcggtaatcggtcgtggtgggtcaaaaataaagaatatacaaagtacaacaaacaccacaatccaaataatacaagaacaaccagaatcattagtcaaaatttttggcagcaaggcaatgcaaacgaaagcaaaagcagtgatagacaattttgttaaaaagctagaagaaaattacaattcagaatgcggaattgatactgcattccaaccttctgttggaaaagatggaagcacagataacaatgttgttgcaggagatcggccattgatagattgggatcaaattagagaggaaggtttgaaatggcaaaaaacaaagtgggcagatttaccaccaattaagaaaaacttttataaagagtccactgccacaagtgccatgtcaaaagtagaagcagatagttggaggaaagaaaattttaatataacgtgggatgacttgaaggatggggagaaacgacctatccccaatcctacctgcacatttgatgacgcctttcaatgttatcctgaggttatggaaaacattaaaaaggcaggttttcaaaagccaacacctattcagtcacaggcatggcccattgtgttgcaaggaatagatcttataggagtagcccagactggaacaggaaagacattgtgttatttaatgcctggatttattcatctggtccttcaacccagccttaaaggtcaaaggaatagacccggcatgttagttctaactcccactcgggaattagcacttcaagtagaaggagaatgttgcaaatattcatataaagggcttcggagtgtttgtgtatatggtggtggaaatagagatgaacaaatagaagagcttaaaaaaggtgtagatatcataattgcaactcccggaagattgaatgatctgcaaatgagtaacttcgtcaatctgaagaatataacctacttggttttagatgaagcagacaagatgttggacatgggatttgaaccccagataatgaagattttgttagatgtgcgcccagataggcagacagttatgaccagtgctacatggcctcattcagttcatcgcctcgcacaatcttatttgaaagaaccaatgattgtctatgttggtacattggatctagttgctgtaagttcagtgaagcaaaatataattgtaaccaccgaggaagagaaatggagtcacatgcaaacttttctacagagtatgtcatccacagacaaagtcattgtcttcgtttctcgaaaagctgttgcggatcacttatcaagtgacctaatacttggaaatatatcagtagagtctctgcatggagatagagaacagagagatcgggagaaagcattagagaactttaaaacaggcaaagtgagaatactaattgcaactgatctagcctctagaggacttgatgtccatgacgttacacatgtctataattttgactttccacggaatattgaagaatacgtacaccgaatagggcgcacgggaagagcagggaggactggtgtttccattacaactttgactagaaatgattggagggttgcctctgaattgattaatattctggaaagagcaaatcagagtattccagaggagcttgtatcaatggctgagaggtttaaggcacatcaacagaaaagggaaatggaaagaaaaatggaaagacctcaaggaaggcccaagaagtttcattaatgtcttctgtactagtggggtagagaattcaagattttttagaaatatagtaagacggaagtattggacatgttggcagtatgaagagaccggactgatttgactgattcttaaaataatagtgtttgaaaatatagaatccagtgttttatactttctttaataaaaatagaagtatttaaacttggaagttgtttcctggatttttattaaggagtgtagcattagaatgtttttcttttaatcttttaaactgtctcctgtaattttgctgtatgtcataaggccagtctttcagaatttaatgttcagattttgtcatggcagtgaaaaagatgttttcaaacaaagaatcagcacctgaaaaaatactgttaataaatgttcgtttctgtgataaaaagacaa

SEQ ID NO: 7870 - DNA, 1057 bp, Homo sapiens
  source 1..1057: mol_type = unassigned DNA
aggtggtgcagagctggacggcaacgacgtcggacgcgccccttcttggaacaatgtcccaccacggaggagctcccaaggcctctacgtgggtcgttgctagtcggcgaagctcgacagtgtcccgagcgccagagaggaggccggcggaggagttgaatcgaacaggtcctgagggatatagtgtcggcagaggtggtcgctggagaggcacctctaggcccccggaggccgtggccgctggtcacgaggaactgccgctgtgttttgctttgaagagccactttgttggcgcggtaatcggtcgtggtgggtcaaaaataaagaatatacaaagtacaacaaacaccacaatccaaataatacaagaacaaccagaatcattagtcaaaatttttggcagcaaggcaatgcaaacgaaagcaaaagcagtgatagacaattttgttaaaaagctagaagaaaattacaattcagaatgcggaattgatactgcattccaaccttctgttggaaaagatggaagcacagataacaatgttgttgcaggagatcggccattgatagattgggatcaaattagagaggaaggtttgaaatggcaaaaaacaaagtgggcaggaaagaaaattttaatataacgtgggatgacttgaaggatggggagaaacgacctatccccaatcctacctgcacatttgatgacgcctttcaatgttatcctgaggttatggaaaacattaaaaaggcaggttttcaaaagccaacacctattcagtcacaggcatggcccattgtgttgcaaggaatagatcttataggagtagcccagactggaacaggaaagacattgtgttatttaatgcctggatttattcatctggtccttcaacccagccttaaaggtcaaaggaatagacccggcatgttagttctaactcccactcgggaattagcacttcaagtagaaggagaatgttgcaaatattcatataaagggcttcggagtgtttgtgtatatggtggtggaaatagagatgaacaaatagaagagctt

SEQ ID NO: 7871 - DNA, 2114 bp, Homo sapiens
  source 1..2114: mol_type = unassigned DNA
acctcattcatttctaccggtctctagtagtgcagcttcggctggtgtcatcggtgtccttcctccgctgccgcccccgcaaggcttcgccgtcatcgaggccatttccagcgacttgtcgcacgcttttctatatacttcgttccccgccaaccgcaaccattgacgccatgtcgggttattcgagtgaccgagaccgcggccgggaccgagggtttggtgcacctcgatttggaggaagtagggcagggcccttatctggaaagaagtttggaaaccctggggagaaattagttaaaaagaagaatttttatcaagagcaccctgatttggctaggcgcacagcacaagaggtggaaacatacagaagaagcaaggaaattacagttagaggtcacaactgcccgaagccagttctaaatttttatgaagccaatttccctgcaaatgtcatggatgttattgcaagacagaatttcactgaacccactgctattcaagctcagggatggccagttgctctaagtggattggatatggttggagtggcacagactggatctgggaaaacattgtcttatttgcttcctgccattgtccacatcaatcatcagccattcctagagagaggcgatgggcctatttgtttggtgctggcaccaactcgggaactggcccaacaggtgcagcaagtagctgctgaatattgtagagcatgtcgcttgaagtctacttgtatctacggtggtgctcctaagggaccacaaatacgtgatttggagagaggtgtggaaatctgtattgcaacacctggaagactgattgactttttagagtgtggaaaaaccaatctgagaagaacaacctaccttgtccttgatgaagcagatagaatgcttgatatgggctttgaaccccaaataaggaagattgtggatcaaataagacctgataggcaaactctaatgtggagtgcgacttggccaaaagaagtaagacagcttgctgaagatttcctgaaagactatattcatataaacattggtgcacttgaactgagtgcaaaccacaacattcttcagattgtggatgtgtgtcatgacgtagaaaaggatgaaaaacttattcgtctaatggaagagatcatgagtgagaaggagaataaaaccattgtttttgtggaaaccaaaagaagatgtgatgagcttaccagaaaaatgaggagagatgggtggcctgccatgggtatccatggtgacaagagtcaacaagagcgtgactgggttctaaatgaattcaaacatggaaaagctcctattctgattgctacagatgtggcctccagagggctagatgtggaagatgtgaaatttgtcatcaattatgactaccctaactcctcagaggattatattcatcgaattggaagaactgctcgcagtaccaaaacaggcacagcatacactttctttacacctaataacataaagcaagtgagcgaccttatctctgtgcttcgtgaagctaatcaagcaattaatcccaagttgcttcagttggtcgaagacagaggttcaggtcgttccaggggtagaggaggcatgaaggatgaccgtcgggacagatactctgcgggcaaaaggggtggatttaatacctttagagacagggaaaattatgacagaggttactctagcctgcttaaaagagattttggggcaaaaactcagaatggtgtttacagtgctgcaaattacaccaatgggagctttggaagtaattttgtgtctgctggtatacagaccagttttaggactggtaatccaacagggacttaccagaatggttatgatagcactcagcaatacggaagtaatgttccaaatatgcacaatggtatgaaccaacaggcatatgcatatcctgctactgcagctgcacctatgattggttatccaatgccaacaggatattcccaataagactttagaagtatatgtaaatgtctgtttttcataattgctctttatattgtgtgttatctgacaagatagttatttaagaaacatgggaattgcagaaatgactgcagtgcagcagtaattatggtgcac

SEQ ID NO: 7872 - DNA, 2105 bp, Homo sapiens
  source 1..2105: mol_type = unassigned DNA
acctcattcatttctaccggtctctagtagtgcagcttcggctggtgtcatcggtgtccttcctccgctgccgcccccgcaaggcttcgccgtcatcgaggccatttccagcgacttgtcgcacgcttttctatatacttcgttccccgccaaccgcaaccattgacgccatgtcgggttattcgagtgaccgagaccgcggccgggaccgagggtttggtgcacctcgatttggaggaagtagggcagggcccttatctggaaagaagtttggaaaccctggggagaaattagttaaaaagaagtggaatcttgatgagctgcctaaatttgagaagaatttttatcaagagcaccctgatttggctaggcgcacagcacaagaggtggaaacatacagatatttgcttcctgccattgtccacatcaatcatcagccattcctagagagaggcgatgggcctatttgtttggtgctggcaccaactcgggaactggcccaacaggtgcagcaagtagctgctgaatattgtagagcatgtcgcttgaagtctacttgtatctacggtggtgctcctaagggaccacaaatacgtgatttggagagaggtgtggaaatctgtattgcaacacctggaagactgattgactttttagagtgtggaaaaaccaatctgagaagaacaacctaccttgtccttgatgaagcagatagaatgcttgatatgggctttgaaccccaaataaggaagattgtggatcaaataagacctgataggcaaactctaatgtggagtgcgacttggccaaaagaagtaagacagcttgctgaagatttcctgaaagactatattcatataaacattggtgcacttgaactgagtgcaaaccacaacattcttcagattgtggatgtgtgtcatgacgtagaaaaggatgaaaaacttattcgtctaatggaagagatcatgagtgagaaggagaataaaaccattgtttttgtggaaaccaaaagaagatgtgatgagcttaccagaaaaatgaggagagatgggtggcctgccatgggtatccatggtgacaagagtcaacaagagcgtgactgggttctaaatgaattcaaacatggaaaagctcctattctgattgctacagatgtggcctccagagggctagatgtggaagatgtgaaatttgtcatcaattatgactaccctaactcctcagaggattatattcatcgaattggaagaactgctcgcagtaccaaaacaggcacagcatacactttctttacacctaataacataaagcaagtgagcgaccttatctctgtgcttcgtgaagctaatcaagcaattaatcccaagttgcttcagttggtcgaagacagaggttcaggtcgttccaggggtagaggaggcatgaaggatgaccgtcgggacagatactctgcgggcaaaaggggtggatttaatacctttagagacagggaaaattatgacagaggttactctagcctgcttaaaagagattttggggcaaaaactcagaatggtgtttacagtgctgcaaattacaccaatgggagctttggaagtaattttgtgtctgctggtatacagaccagttttaggactggtaatccaacagggacttaccagaatggttatgatagcactcagcaatacggaagtaatgttccaaatatgcacaatggtatgaaccaacaggcatatgcatatcctgctactgcagctgcacctatgattggttatccaatgccaacaggatattcccaataagactttagaagtatatgtaaatgtctgtttttcataattgctctttatattgtgtgttatctgacaagatagttatttaagaaacatgggaattgcagaaatgactgcagtgcagcagtaattatggtgcactttttcgctatttaagttggatatttctctacattcctgaaacaatttttaggttttttttgtactagaaaatgcaggcagtgttttcacaaaagtaaatgtacagtgatttgaaatacaataaatgaaggcaatgcatggccttccaataaaaaatatttgaagact

SEQ ID NO: 7873 - DNA, 3759 bp, Homo sapiens
  source 1..3759: mol_type = unassigned DNA
atagagcggctcccagcgttccctgcggcgtaggaggcggtccagactataaaagcggctgccggaaagcggccggcacctcattcatttctaccggtctctagtagtgcagcttcggctggtgtcatcggtgtccttcctccgctgccgcccccgcaaggcttcgccgtcatcgaggccatttccagcgacttgtcgcacgcttttctatatacttcgttccccgccaaccgcaaccattgacgccatgtcgggttattcgagtgaccgagaccgcggccgggaccgagggtttggtgcacctcgatttggaggaagtagggcagggcccttatctggaaagaagtttggaaaccctggggagaaattagttaaaaagaagtggaatcttgatgagctgcctaaatttgagaagaatttttatcaagagcaccctgatttggctaggcgcacagcacaagaggtggaaacatacagaagaagcaaggaaattacagttagaggtcacaactgcccgaagccagttctaaatttttatgaagccaatttccctgcaaatgtcatggatgttattgcaagacagaatttcactgaacccactgctattcaagctcagggatggccagttgctctaagtggattggatatggttggagtggcacagactggatctgggaaaacattgtcttatttgcttcctgccattgtccacatcaatcatcagccattcctagagagaggcgatgggcctatttgtttggtgctggcaccaactcgggaactggcccaacaggtgcagcaagtagctgctgaatattgtagagcatgtcgcttgaagtctacttgtatctacggtggtgctcctaagggaccacaaatacgtgatttggagagaggtgtggaaatctgtattgcaacacctggaagactgattgactttttagagtgtggaaaaaccaatctgagaagaacaacctaccttgtccttgatgaagcagatagaatgcttgatatgggctttgaaccccaaataaggaagattgtggatcaaataagacctgataggcaaactctaatgtggagtgcgacttggccaaaagaagtaagacagcttgctgaagatttcctgaaagactatattcatataaacattggtgcacttgaactgagtgcaaaccacaacattcttcagattgtggatgtgtgtcatgacgtagaaaaggatgaaaaacttattcgtctaatggaagagatcatgagtgagaaggagaataaaaccattgtttttgtggaaaccaaaagaagatgtgatgagcttaccagaaaaatgaggagagatgggtggcctgccatgggtatccatggtgacaagagtcaacaagagcgtgactgggttctaaatgaattcaaacatggaaaagctcctattctgattgctacagatgtggcctccagagggctagatgtggaagatgtgaaatttgtcatcaattatgactaccctaactcctcagaggattatattcatcgaattggaagaactgctcgcagtaccaaaacaggcacagcatacactttctttacacctaataacataaagcaagtgagcgaccttatctctgtgcttcgtgaagctaatcaagcaattaatcccaagttgcttcagttggtcgaagacagaggttcaggtcgttccaggggtagaggaggcatgaaggatgaccgtcgggacagatactctgcgggcaaaaggggtggatttaatacctttagagacagggaaaattatgacagaggttactctagcctgcttaaaagagattttggggcaaaaactcagaatggtgtttacagtgctgcaaattacaccaatgggagctttggaagtaattttgtgtctgctggtatacagaccagttttaggactggtaatccaacagggacttaccagaatggttatgatagcactcagcaatacggaagtaatgttccaaatatgcacaatggtatgaaccaacaggcatatgcatatcctgctactgcagctgcacctatgattggttatccaatgccaacaggatattcccaataagactttagaagtatatgtaaatgtctgtttttcataattgctctttatattgtgtgttatctgacaagatagttatttaagaaacatgggaattgcagaaatgactgcagtgcagcagtaattatggtgcactttttcgctatttaagttggatatttctctacattcctgaaacaatttttaggttttttttgtactagaaaatgcaggcagtgttttcacaaaagtaaatgtacagtgatttgaaatacaataaatgaaggcaatgcatggccttccaataaaaaatatttgaagactgaattaagtggaaattgtactttattttatataatgtcatgtaaaactttgcttaagatggtctggttttttttttgtttttgtttggttttttttttccatgaaaacaaatgactgttcctttttatttaatttgggaggcagggggaatcagaaggcccttctttataatgagctattcatattgcaggagtcagaatgaattgatacaggtgaatttttagttacaggctaaattgcataaaagctttgtcagcttccagcatcaggggagtcatttaatagcctttttccttatttgctagtatggttaaatgagaaaatagtaaaatagatacaaagtcatctatatagtgtgagaacgtgggtgactttttcaaagtttataatttaaaaagctccaaataactggctttttcaagagacttatactcatgctcttggctatactgtgaattactgaaatgttgaacaaacctgtgaaagacatacattagccctttaagatggccaggagctaagcttgagtctcctttactgaatttcgttcttagtgcaggttacttgtagattctagtcttcacaggctccctggggctcttaactagtcacactgggagtcatgaatgtctttccaataattcagggaattctagagatcctcaaactgtaaggtctattcatactcaacacaaggaaaaaacctcattaaaattaatgactaatcaggaggcaacgtaaccaaaagcacagtgaatgaaagttttcatggtaggttcaacatgggtttattgctagaaagatccaggggatagctttaggtttaacttcggctcaccaacgtaactttctaatcatttatttcagtaatagctagaagtgggtctgaatgttttcccagagtctgatacgtgtttttttttgccagaagagaggtcttcaggagacttcatttaaattctgattattaaactgaggctttaattgatgttaatgccttatgtcaaatgtaaagttagaatttgctagggctgggatagggagtgatatttctaggacttagacattgaaaactaattcagcctgtagtaacctggatggttttcaatggcatggttagtcaaattcatggttttaaacttagaagcagctttcgggggagagggtaggttggagcatttattacatattttactgtttaatgtcttaaccgtgggccttttaatttgtaaacactgaaatgattgttgggctgtggaaaacatttacctatttaccttggaagttttaaaagacagtccactttttagcatgtgtgttgtgtccagcctgtggtcgtcttaactaataaatgtgatttttctccc

SEQ ID NO: 7874 - DNA, 6359 bp, Homo sapiens
  source 1..6359: mol_type = unassigned DNA
agtctgcgcaggcgccgtagaactgtggcgctttctgggtaaagatggacgtccacgatctctttcgccggctcggcgcgggggccaaattcgacacgagacgcttctcggcagacgcagctcgattccagataggaaaaaggaaatatgactttgattcttcggaggtgcttcagggactggacttttttggaaacaagaagtctgtcccaggtgtgtgtggagcatcacaaacacatcagaagccccaaaatggagagaaaaaagaagagagcctaactgaaaggaagagggagcagagcaagaaaaaaaggaagacgatgacttcagaaattgcttcccaagaagaaggtgctactatacagtggatgtcatctgtagaagcaaagattgaagacaaaaaagttcagagagaaagtaaactaacttccggaaagttggagaatctcagaaaagaaaagataaacttcttgcggaataaacacaaaattcacgtccaaggaaccgatcttcctgacccaattgctacatttcagcaacttgaccaggaatataaaatcaattctcgactacttcagaacattctagatgcaggtttccaaatgcctacgccaatccaaatgcaagccatcccagttatgctgcatggtcgggaacttctggcttctgctccaactggatctggaaaaacattagcttttagcattcctattttaatgcagctgaaacaacccgcaaataaaggcttcagagccctgattatatcaccaacacgagaacttgccagccagattcacagagagttaataaaaatttctgagggaacaggattcaggatacacatgatccacaaagcagcagtggcagccaagaaatttggacctaaatcatctaaaaagtttgatattcttgtgactactccaaatcgactaatctatttattaaagcaagatccccccggaatcgacctagcaagtgttgagtggcttgtagtagacgaatcagataaactgtttgaagatggcaaaactgggttcagagaccagctggcttccattttcctggcctgcacatcccacaaggtccgaagagctatgttcagtgcaacttttgcatatgatgttgaacagtggtgcaaactcaacctggacaatgtcatcagtgtgtccattggagcaaggaattctgcagtagaaactgtagaacaagagcttctctttgttggatctgagaccggaaaacttctggccatgagagaacttgttaaaaagggtttcaatccacctgttcttgtttttgttcagtccattgaaagggctaaagaactttttcatgagctcatatatgaaggtattaatgtggatgttattcatgcagagagaacacaacaacagagagataacacagtccacagtttcagagcaggaaaaatctgggttctgatttgtacagccttgctagcaagagggattgattttaaaggtgtgaacttggtgatcaactatgactttccaactagctcagtggaatatatccacaggataggtcgaactggaagagcagggaataagggaaaagcaattacatttttcactgaggatgataagccattattaagaagcgttgctaatgttatacagcaggctgggtgtcctgtaccagaatacataaaaggttttcagaaactactaagcaaacaaaagaaaaagatgattaagaaaccattggaaagggagagcattagtacaactccaaaatgtttcttagaaaaagctaaggataaacagaaaaaggtcactggtcagaacagcaagaagaaagtagctcttgaagacaaaagttaaaaacagactttaaaaatactgtcccagaaatgtaattttatgatcccagcatgaatgttattttcatggaatacttgaagtcttacagtcacctgtaccaaacatttgaaatcaactacaagtacatgggactggtgataaatgatcctaaactatcaagtcagtttcaatttgtaggtgccttttttttttcctgtagagatgagggtcttgccatgttgtccaggctggtcttgaactcctgacctcacacaatcctcctgccttagcctcctgagtaactgagattacaggcacaagctgctgcacccagctctgtaggtgacttttaaatgattatacaatggaaataacattcattgacatttctgtggtttgaatccagagagatacttcttatagaaaaacaaatgtttatgctaaaaataacaccaaaatgtggtgaactcttaaggacttttcccttcaagtgtgaaggaaggtgtgatgaatgctgtggagaggcatctggaacagaaattcaaaataaagccttgacattaaataccccttccactgctcactttgtggatggtagcatgagctgtctaccaagaagaaacctgctgctctcttaattttaatatttcctaatttgttgatggccttttgtgttgtgaaccacaacaaagagaggcctcttttgtggctggttattccagttccctgggattttaaattctttggtctattaagtatccttgtattggatacgtaataccttagtgctgtcataatgttgtacaagatcatgatcagcttctccctttcttcattttctgtgatttaaccatgttctttcctgtctctttccatttaagatattttatttgaatactgataaacattttatcctgataaggaagaatgttcttgttacttgatatacctctgtcttcattctcttacagcttatctttccttaggttgatggtgcctcatttaataagtagatctctacttaagctaaaggattatgatcatatggtgttggagactattagctattagatttttctcaaaatatgagttttgtacaatggaatgaaaaagtgacttcatatacgtaagactggtgcctaagaatgacttgaatgttatcagtactaccacagaactataatatacattgccttttctcagcagcatttgaattcaacttatttatttcctctatttgtagctttttgttctagagtcagaacaggtggactttgctttgaatattttagatgggacaaaaattgttcatcttcggaatttatttaaagaaagatctactggtacagggtgtaaaaatacttacaagaatatgatttttttgtttgttcatgcaaacagatcctttacccaatatatattctggaggtaggtatactggtgcaacccatttgccagctgtgtgactttgagtaagttcttaatttctcagagtttcagtgttctcatctataaaattatgtctccaattgtgagtacctagcactgtacctgatacatagtaaactcacaataaatatttcttaaacatagattttgttaggaatacaggcttgataacacagtccttacccttacaatgtaatgttagagataaaggagcaaatagagtcacgcatcacttaatgacagagatatgttctgagaaatgcatcgttaggtgatattgtcattgtgtaaacatcatgttgtttacttccacaaacctagatggtatagcctaccagtacacctaggctatatggtatagtctgttgctcctaggctacaaacccgtatagcatgttactgtcctgcatgctatagacagttggaacatgtagacttgtataaacactgcacacttaacctatactaaatttattgaaaatatttttcttggccaggcgtagtggctcatgcctgtaatcctaacacttcgggaggcctaggcgggcaggttgtctgagctcaggagtttagagaccagcccgggcaacatggcaaaaccccatctctactaaaaaaaataccaaaaaaagttagccgggtgtggtggcatagtcccggctactcaggagtctgaggcaggagaatagcttgaacctgtgaggcggaggttgcagtaagccgagatcgcgctactgcactccagcctgggcgacagggcaagactgtcttgaaaataaacacacacacacacattatatatattatgtattatatatattagatatatattttttcttcaataaattaaccttagcttactgtaacttttactttatgagtttttttgttttgttttgttttttttttttgagaaacagggtctgttacctaatttggagtttagtggcacaatcatggcccactgcagccttgacctcttagactcaagtgatcctcaaacctcagcctcccgagtagctggtactataggtgcgggccaccaacactcagctaatttttaaattttgtagagacgaggtcttgcttgttgtccagttgggttttttagacttttttttttttttttttttggagatggagtcttgctctgttgcccaggctggagtgcagtggcatgatctcggctcactgcaacctctgactcctgggttcaagtgattctcctgcctcagcctcccgagttgctgggactacaggcatgcgccaccacacccagctaatttttgtatttttagtgacagggtttcaccatgttggccaggctggtctcaaactcctgacctggagtgagccactatatctggcctttataaacttttttgattcttgtcataacacttagcctaaaatgcaaatgtacagctgtagaaaaatactttatttctttatatccttattctagaagctttttttctattaatttttgtttgtttgttttgttttactatttacttctaaaacttttttgttaaaaaccatggcacaaacacacacattatgctaggcatacaaaaggtcaggatcatcagtctcactgtcttccacccccacttctcatcccaccattgtatctgctgtctgtggctgaccaaaacatcatcatgtagcacatgactagtgtggcaagtgctctgttagatgtaaggccatgatgctaaagcatcacaagagggcatctaacccagattggggatgtcatggaaggccgacatcctgagttgaatcctgcaaatgtaaaaaccaataggcaaagaagaggaacaaaaaggattccaggacaaactgaggtcacatctatgatccttgactttattgtgtctgtttaaagtatctacagtaacctgtatcaacttagtcagtgtattaatactaaatttagctccttcaaagcagttggaactatgtgctacataaatttcagcttcacacaaggaagggaaggagtgaaattagtgaacaggcagttacagcaaaagaaaaaacataaaaattgaatagctggctctggtgaaatgagcaaggactttagagtcaaactggcctggatttgaatcctgatcctcattgcttgtagctgtatgatctggacaaatgacagtagctgtttctaaccttgattttctcatctgtaagatgccaattgtaactcctaaggatactgaggattttttaaaatgcgtgtacagttcctgaccagtggtttgtgcctaataacttattacaaattattacccagtaaaaaccttgagacaagagtgaaaacgtaaagctaattaatccattacttgttagcaagcaaactacgtgcttgagaaaattactcaactttcatgttttacttccagacagtagtttgattaaaagaaaaaaaaaaatcacagcccaggcatgtggctcacaccctggcacttggaggccgaggtgggagcatagcttgagcctagcagtttgaaactagcctgggcaacatagatcctatctctacaaaaaaaaaaaaaaaaaaaaaaaaattggcccggtgtggtggtgcatgcctgcggtcccagctactcaggaggctgaggcgagaggatcgcttgagccagggaggctgaggctgctgtgagccatgatcatgccactgcactccagcctggacaacagagcaagaccctgtctcaaaaaaaaaaaaaaatcagtaaaaaatatgccgaaatagcttcagagtaattatgaattgccttccaaaaaccactgttttgcacttgcctgcaagaataggaaaaacaaaaggactgtaaggtggcaggatggcagaaccaaacaagagtagtacaccttggagttttttcgaaatatgggttgggtttttgggctcttggttgatttaaaataaaatttaaatgccttcagcgtctgtgataggtgccaacatgaagctaccgagttccagagaaagaggggagagctgatcactcatcagtgctgcgagactatcaaagggcccttcaggacctatctgttctttgtgtgtaaagagtaaca

SEQ ID NO: 7875 - DNA, 3881 bp, Homo sapiens
  source 1..3881: mol_type = unassigned DNA
cgcaggcgccgtagaactgtggcgctttctgggtaaagatggacgtccacgatctctttcgccggctcggcgcgggggccaaattcgacacgagacgcttctcggcagacgcagctcgattccagataggaaaaaggaaatatgactttgattcttcggaggtgcttcagggactggacttttttggaaacaagaagtctgtcccaggtgtgtgtggagcatcacaaacacatcagaagccccaaaatggagagaaaaaagaagagagcctaactgaaaggaagagggagcagagcaagaaaaaaaggaagacgatgacttcagagacagggtttcaccatgttagccagtatggtctcgatctcctgacctcgtgattcacccaccttgggctcccaaagtgctgggattacagatgtgagccaccacgcccagccagaaattgcttcccaagaagaaggtgctactatacagtggatgtcatctgtagaagcaaagattgaagacaaaaaagttcagagagaaagtaaactaacttccggaaagttggagaatctcagaaaagaaaagataaacttcttgcggaataaacacaaaattcacgtccaaggaaccgatcttcctgacccaattgctacatttcagcaacttgaccaggaatataaaatcaattctcgactacttcagaacattctagatgcaggtttccaaatgcctacgccaatccaaatgcaagccatcccagttatgctgcatggtcgggaacttctggcttctgctccaactggatctggaaaaacattagcttttagcattcctattttaatgcagctgaaacaacccgcaaataaaggcttcagagccctgattatatcaccaacacgagaacttgccagccagattcacagagagttaataaaaatttctgagggaacaggattcaggatacacatgatccacaaagcagcagtggcagccaagaaatttggacctaaatcatctaaaaagtttgatattcttgtgactactccaaatcgactaatctatttattaaagcaagatccccccggaatcgacctagcaagtgttgagtggcttgtagtagacgaatcagataaactgtttgaagatggcaaaactgggttcagagaccagctggcttccattttcctggcctgcacatcccacaaggtccgaagagctatgttcagtgcaacttttgcatatgatgttgaacagtggtgcaaactcaacctggacaatgtcatcagtgtgtccattggagcaaggaattctgcagtagaaactgtagaacaagagcttctctttgttggatctgagaccggaaaacttctggccatgagagaacttgttaaaaagggtttcaatccacctgttcttgtttttgttcagtccattgaaagggctaaagaactttttcatgagctcatatatgaaggtattaatgtggatgttattcatgcagagagaacacaacaacagagagataacacagtccacagtttcagagcaggaaaaatctgggttctgatttgtacagccttgctagcaagagggattgattttaaaggtgtgaacttggtgatcaactatgactttccaactagctcagtggaatatatccacaggataggtcgaactggaagagcagggaataagggaaaagcaattacatttttcactgaggatgataagccattattaagaagcgttgctaatgttatacagcaggctgggtgtcctgtaccagaatacataaaaggttttcagaaactactaagcaaacaaaagaaaaagatgattaagaaaccattggaaagggagagcattagtacaactccaaaatgtttcttagaaaaagctaaggataaacagaaaaaggtcactggtcagaacagcaagaagaaagtagctcttgaagacaaaagttaaaaacagactttaaaaatactgtcccagaaatgtaattttatgatcccagcatgaatgttattttcatggaatacttgaagtcttacagtcacctgtaccaaacatttgaaatcaactacaagtacatgggactggtgataaatgatcctaaactatcaagtcagtttcaatttgtaggtgccttttttttttcctgtagagatgagggtcttgccatgttgtccaggctggtcttgaactcctgacctcacacaatcctcctgccttagcctcctgagtaactgagattacaggcacaagctgctgcacccagctctgtaggtgacttttaaatgattatacaatggaaataacattcattgacatttctgtggtttgaatccagagagatacttcttatagaaaaacaaatgtttatgctaaaaataacaccaaaatgtggtgaactcttaaggacttttcccttcaagtgtgaaggaaggtgtgatgaatgctgtggagaggcatctggaacagaaattcaaaataaagccttgacattaaataccccttccactgctcactttgtggatggtagcatgagctgtctaccaagaagaaacctgctgctctcttaattttaatatttcctaatttgttgatggccttttgtgttgtgaaccacaacaaagagaggcctcttttgtggctggttattccagttccctgggattttaaattctttggtctattaagtatccttgtattggatacgtaataccttagtgctgtcataatgttgtacaagatcatgatcagcttctccctttcttcattttctgtgatttaaccatgttctttcctgtctctttccatttaagatattttatttgaatactgataaacattttatcctgataaggaagaatgttcttgttacttgatatacctctgtcttcattctcttacagcttatctttccttaggttgatggtgcctcatttaataagtagatctctacttaagctaaaggattatgatcatatggtgttggagactattagctattagatttttctcaaaatatgagttttgtacaatggaatgaaaaagtgacttcatatacgtaagactggtgcctaagaatgacttgaatgttatcagtactaccacagaactataatatacattgccttttctcagcagcatttgaattcaacttatttatttcctctatttgtagctttttgttctagagtcagaacaggtggactttgctttgaatattttagatgggacaaaaattgttcatcttcggaatttatttaaagaaagatctactggtacagggtgtaaaaatacttacaagaatatgatttttttgtttgttcatgcaaacagatcctttacccaatatatattctggaggtaggtatactggtgcaacccatttgccagctgtgtgactttgagtaagttcttaatttctcagagtttcagtgttctcatctataaaattatgtctccaattgtgagtacctagcactgtacctgatacatagtaaactcacaataaatatttcttaaacatagattttgttaggaatacaggcttgataacacagtccttacccttacaatgtaatgttagagataaaggagcaaatagagtcacgcatcacttaatgacagagatatgttctgagaaatgcatcgttaggtgatattgtcattgtgtaaacatcatgttgtttacttccacaaacctagatggtatagcctaccagtacacctaggctatatggtatagtctgttgctcctaggctacaaacccgtatagcatgttactgtcctgcatgctatagacagttggaacatgtagacttgtataaacactgcacacttaacctatactaaatttattgaaaatatttttcttggccaggcg

SEQ ID NO: 7876 - DNA, 4377 bp, Homo sapiens
  source 1..4377: mol_type = unassigned DNA
ccttctgcgttcccagcgcgcggcccgaatggcggccgacaagggcccggcggctggacctcggtcgcgagctgccatggcccagtggaggaagaagaaagggctccggaagcgccgaggcgcggcctcccaggcccgcggcagcgactcggaggacggcgagtttgagatccaggcggaagatgacgcccgggcccggaagctgggacctggaagacccctgcccaccttccccacctcggaatgcacctcggatgtggagccggacacccgggagatggtgcgtgcccagaacaagaagaagaagaagtctggaggcttccagtccatgggcctgagctacccggtgttcaaaggcatcatgaagaaggggtacaaggtgccaacacccatccagaggaagaccatcccggtgatcttggatggcaaggacgtggtggccatggcccggacgggcagtggcaagacagcctgcttcctcctcccaatgttcgagcggctcaagacccacagtgcccagaccggggcccgcgccctcatcctctcgccgacccgagagctggccctgcagaccctgaagttcactaaggagctaggcaagttcactggcctcaagactgccctgatcctgggtggagacaggatggaagaccagtttgcagccctgcacgaaaatcccgacataattattgccacgcccggacggttggtgcatgtggctgtggaaatgagcctgaagctgcagagtgtggaatacgtggtgttcgatgaagctgaccggctttttgaaatgggtttcgcagagcagctgcaggagatcatcgcccgcctccccgggggccaccagacggtgctgttctccgccacgctgcccaaactgctggtggaatttgcccgggctggcctcacggagcccgtgctcatccggcttgacgtggataccaagctcaacgagcagctgaagacctccttcttcctcgtgcgggaggacaccaaggctgccgtgctgctccacctgctgcacaacgtggtgcggccccaggaccagaccgtggtgtttgtggccacgaagcaccacgccgagtacctcactgagctgctgacgacccagcgggtgagctgcgcccacatctacagtgccctagacccgacagcccgcaagatcaatctcgccaaattcacgcttggcaagtgctccactctcattgtgactgacctggccgcccgaggcctggacatcccgctgctggacaatgtcatcaactacagcttccccgccaagggcaaactcttcctgcaccgcgtgggccgtgtggctcgggctggccgaagtggcacagcctactccttggtggcccctgatgaaatcccctacctgctggatctgcacctgttcctgggccgctccctcaccctcgcccgacccctcaaggagccctcaggtgtggccggtgtggatggcatgctgggtcgggtgccacagagtgtggtggacgaggaggacagtggtctgcagagcaccctggaggcatcgctggagctacggggcctggcccgcgttgctgataacgcccagcagcagtatgtgcgctcacgcccggcgccctcgcctgagtccatcaagagggccaaggagatggaccttgtggggctgggcctgcaccccctcttcagctcgcgttttgaggaggaggagctgcagcggctgaggctggtggacagcataaagaactaccgctcccgggcgactatctttgagatcaacgcctccagccgagacctgtgcagccaggtgatgcgcgccaagcggcagaaggaccgcaaggccatcgcccgcttccagcagggacagcaggggcggcaggagcagcaggagggcccagtgggcccagccccgagccgcccagcactgcaggagaagcagcctgagaaggaggaggaggaggaggcgggagagagtgtggaggacattttctcagaggtcgtgggccggaagcggcagcggtcaggacccaacaggggagccaagaggcggagggaggaggcccggcagcgggaccaggaattctacatcccctaccggcccaaggactttgacagcgagcggggcctgagcatcagcggggaagggggagcctttgagcagcaggcagctggcgctgtcctggacttgatgggggatgaagcccagaacctgacgaggggccggcagcagctcaagtgggaccgtaagaagaagcggtttgtgggacagtcaggacaggaagacaagaagaagattaagacagagagcggccgctacatcagcagctcctacaagcgagacctctatcagaagtggaaacagaaacagaaaattgatgatcgtgactcggacgaagaaggggcatctgaccggcgaggcccagagcgaagaggtgggaagcgagaccgtggccaaggtgcatcccggccccacgccccaggcacccctgcaggccgagtccgcccggaactcaagaccaagcagcagatcctgaagcagcggcgccgggcccagaagctgcacttcctgcagcgtggtggcctcaagcagctctctgcccgcaaccgccgccgcgtccaggagctgcagcagggcgccttcggccggggtgcccgctccaagaagggcaagatgcggaagaggatgtgaggaccaggacccagccccgtggctccttgattggccttagggtgggcatcagcagacgttcccgtgcaccactgtgtgcctggccctgtgctgggcactgggggcactccctgcaggagccatcatctgtgaaaaggagcactgtatggccacagaagggcagcagctgcgtcagcctaagacagagacatttgaacagggccttgaagggtgtgcaggagttcgccagcaaagccaggcaggccaagacttgagttggcaactcagctgctgctgcttccatgtgttctgggttcagaggtcatggctgcaccggtcagagccctgagtgcctcagggtttggcaatggaatttttaatgtaataaatctttattgagcactgctggtggccaggagtgcggtctacttggggaactggaatggagagacccaggtactaaaatcccagctaacgtggcagaggagttgcgggtctcctgagggtgagttctgctgccttgtccatttagcgatgaggaaagtgaagctcagagcacaaaccaggtgccagaggcgggagttggtcccccttcctcccactggacatggttgcagctgggagtgggctgggggaggggaacaggatgcccagcccagggggcaaggacacagctgctcccctctggctatgaagaggttaacgcggcccctccacacctggaggtcagaacctggcctgtcctctgtcttcttgccacccaccccctgtttgaggttctgagaaggtcaagggcagccccagcagctggattctcaggctgggcccctcacctggcagagtccatagtggagggggccttggtgatctctcatctagcatggaccctgttctgagacctgacaaagagttttttttcatgccccaaccaccctggcagggagggcctggtctgatctcattttagaggcagttgccccacacatagccccttgaccttcccatcacctcctcatcagggcctgcatttatggagtgcttgctatgtgcccctcatggcaggcccacagcactctgaacaggcacagccctcccatcttcccaatgaggaaacggattcaggaagagccactcagtccacaccccattggaaatgtgggccctcctatctcagggtctctcaggggttccctctcccgctgctcacctgtgtcagggctaggaggcaggggctgcaggctcagcctgacccaggccggccagcatggcagagaggtcctgcatgaacagcttcacctgggggggcccagcacgaagtcacatcccagccccagagtcactgtccagcccccacccctcaacacgcgggggaggccgaaaggtagggcggggactggagatcccctcattaaaagaacagtgatgatggtggttcccagaggtggtgactgagatcctaaaccgttctgggttttgaaagcctcaggccaaccttcccaactgctgcgtgagcagacaccttcacagcttcctcgctgctgtcacctgcactatccaattagtattttcatttacatcaatcagctttattttcttgtaactggatcagtcatattcattggtttgtgacctactcttatctccgtgggtggctctccttttgttttaattaacttctttatgaatatgaacttaataaataccatggatccattgtaaaaact

SEQ ID NO: 7877 - DNA, 4380 bp, Homo sapiens
  source 1..4380: mol_type = unassigned DNA
ccttctgcgttcccagcgcgcggcccgaatggcggccgacaagggcccggcggctggacctcggtcgcgagctgccatggcccagtggaggaagaagaaagggctccggaagcgccgaggcgcggcctcccaggcccgcggcagcgactcggaggacggcgagtttgagatccaggcggaagatgacgcccgggcccggaagctgggacctggaagacccctgcccaccttccccacctcggaatgcacctcggatgtggagccggacacccgggagatggtgcgtgcccagaacaagaagaagaagaagtctggaggcttccagtccatgggcctgagctacccggtgttcaaaggcatcatgaagaaggggtacaaggtgccaacacccatccagaggaagaccatcccggtgatcttggatggcaaggacgtggtggccatggcccggacgggcagtggcaagacagcctgcttcctcctcccaatgttcgagcggctcaagacccacagtgcccagaccggggcccgcgccctcatcctctcgccgacccgagagctggccctgcagaccctgaagttcactaaggagctaggcaagttcactggcctcaagactgccctgatcctgggtggagacaggatggaagaccagtttgcagccctgcacgaaaatcccgacataattattgccacgcccggacggttggtgcatgtggctgtggaaatgagcctgaagctgcagagtgtggaatacgtggtgttcgatgaagctgaccggctttttgaaatgggtttcgcagagcagctgcaggagatcatcgcccgcctccccgggggccaccagacggtgctgttctccgccacgctgcccaaactgctggtggaatttgcccgggctggcctcacggagcccgtgctcatccggcttgacgtggataccaagctcaacgagcagctgaagacctccttcttcctcgtgcgggaggacaccaaggctgccgtgctgctccacctgctgcacaacgtggtgcggccccaggaccagaccgtggtgtttgtggccacgaagcaccacgccgagtacctcactgagctgctgacgacccagcgggtgagctgcgcccacatctacagtgccctagacccgacagcccgcaagatcaatctcgccaaattcacgcttggcaagtgctccactctcattgtgactgacctggccgcccgaggcctggacatcccgctgctggacaatgtcatcaactacagcttccccgccaagggcaaactcttcctgcaccgcgtgggccgtgtggctcgggctggccgaagtggcacagcctactccttggtggcccctgatgaaatcccctacctgctggatctgcacctgttcctgggccgctccctcaccctcgcccgacccctcaaggagccctcaggtgtggccggtgtggatggcatgctgggtcgggtgccacagagtgtggtggacgaggaggacagtggtctgcagagcaccctggaggcatcgctggagctacggggcctggcccgcgttgctgataacgcccagcagcagtatgtgcgctcacgcccggcgccctcgcctgagtccatcaagagggccaaggagatggaccttgtggggctgggcctgcaccccctcttcagctcgcgttttgaggaggaggagctgcagcggctgaggctggtggacagcataaagaactaccgctcccgggcgactatctttgagatcaacgcctccagccgagacctgtgcagccaggtgatgcgcgccaagcggcagaaggaccgcaaggccatcgcccgcttccagcagggacagcaggggcggcaggagcagcaggagggcccagtgggcccagccccgagccgcccagcactgcaggagaagcagcctgagaaggaggaggaggaggaggcgggagagagtgtggaggacattttctcagaggtcgtgggccggaagcggcagcggtcaggacccaacaggggagccaagaggcggagggaggaggcccggcagcgggaccaggaattctacatcccctaccggcccaaggactttgacagcgagcggggcctgagcatcagcggggaagggggagcctttgagcagcaggcagctggcgctgtcctggacttgatgggggatgaagcccagaacctgacgaggggccggcagcagctcaagtgggaccgtaagaagaagcggtttgtgggacagtcaggacaggaagacaagaagaagattaagacagagagcggccgctacatcagcagctcctacaagcgagacctctatcagaagtggaaacagaaacagaaaattgatgatcgtgactcggacgaagaaggggcatctgaccggcgaggcccagagcgaagaggtgggaagcgagaccgtggccaagcaggtgcatcccggccccacgccccaggcacccctgcaggccgagtccgcccggaactcaagaccaagcagcagatcctgaagcagcggcgccgggcccagaagctgcacttcctgcagcgtggtggcctcaagcagctctctgcccgcaaccgccgccgcgtccaggagctgcagcagggcgccttcggccggggtgcccgctccaagaagggcaagatgcggaagaggatgtgaggaccaggacccagccccgtggctccttgattggccttagggtgggcatcagcagacgttcccgtgcaccactgtgtgcctggccctgtgctgggcactgggggcactccctgcaggagccatcatctgtgaaaaggagcactgtatggccacagaagggcagcagctgcgtcagcctaagacagagacatttgaacagggccttgaagggtgtgcaggagttcgccagcaaagccaggcaggccaagacttgagttggcaactcagctgctgctgcttccatgtgttctgggttcagaggtcatggctgcaccggtcagagccctgagtgcctcagggtttggcaatggaatttttaatgtaataaatctttattgagcactgctggtggccaggagtgcggtctacttggggaactggaatggagagacccaggtactaaaatcccagctaacgtggcagaggagttgcgggtctcctgagggtgagttctgctgccttgtccatttagcgatgaggaaagtgaagctcagagcacaaaccaggtgccagaggcgggagttggtcccccttcctcccactggacatggttgcagctgggagtgggctgggggaggggaacaggatgcccagcccagggggcaaggacacagctgctcccctctggctatgaagaggttaacgcggcccctccacacctggaggtcagaacctggcctgtcctctgtcttcttgccacccaccccctgtttgaggttctgagaaggtcaagggcagccccagcagctggattctcaggctgggcccctcacctggcagagtccatagtggagggggccttggtgatctctcatctagcatggaccctgttctgagacctgacaaagagttttttttcatgccccaaccaccctggcagggagggcctggtctgatctcattttagaggcagttgccccacacatagccccttgaccttcccatcacctcctcatcagggcctgcatttatggagtgcttgctatgtgcccctcatggcaggcccacagcactctgaacaggcacagccctcccatcttcccaatgaggaaacggattcaggaagagccactcagtccacaccccattggaaatgtgggccctcctatctcagggtctctcaggggttccctctcccgctgctcacctgtgtcagggctaggaggcaggggctgcaggctcagcctgacccaggccggccagcatggcagagaggtcctgcatgaacagcttcacctgggggggcccagcacgaagtcacatcccagccccagagtcactgtccagcccccacccctcaacacgcgggggaggccgaaaggtagggcggggactggagatcccctcattaaaagaacagtgatgatggtggttcccagaggtggtgactgagatcctaaaccgttctgggttttgaaagcctcaggccaaccttcccaactgctgcgtgagcagacaccttcacagcttcctcgctgctgtcacctgcactatccaattagtattttcatttacatcaatcagctttattttcttgtaactggatcagtcatattcattggtttgtgacctactcttatctccgtgggtggctctccttttgttttaattaacttctttatgaatatgaacttaataaataccatggatccattgtaaaaact

SEQ ID NO: 7878 - DNA, 4538 bp, Homo sapiens
  source 1..4538: mol_type = unassigned DNA
gcgacttcggcggcgccacgagagcgggcagcggaggagattgacgtgagtgaattcagatataactcaagcttgttagagggctttttaaaaataaaaagttgattccgtgcaagagagcaagttactgctgcttaccgttcagagacttacaggtgcttgcctgcattgcaataaaggactcatttattgagcaagacttatatttatctcttcattttggagagcctaataaactgttattacagtttctctactgactttcaaaagttttgaagtttgaaagacctttgcaattaaaacagcatgagcacggccagaacagagaaccctgttataatgggtctgtccagtcaaaatggtcagctgagaggccctgtgaaacccactggtggccctggaggagggggcacacagacacagcaacagatgaaccagctgaaaaacaccaacacaatcaataatggcactcagcagcaagcacagagtatgaccaccactattaaacctggtgatgactggaaaaagactttaaaactccctccaaaggatctaagaatcaaaacttcggatgtgacctccacaaaaggaaatgagtttgaagattactgtttgaaacgggagttactgatgggaatttttgaaatgggctgggaaaagccatctcctattcaggaggagagcattcccattgctttatctggtagggatatcttagctagagcaaaaaatggaacaggcaagagcggtgcctacctcattcccttacttgaacggctagacctgaagaaggacaatatacaagcaatggtgattgttcccactagagaacttgctctacaggtcagtcaaatttgcatccaggtcagcaaacacatgggaggggccaaagtgatggcaaccacaggaggaaccaatttacgagatgacataatgaggcttgatgatacagtgcacgtggtgattgctacccctgggagaatcctggatcttattaagaaaggagtagcaaaggttgatcatgtccagatgatagtattggatgaggcagataagttgctgtcacaggattttgtgcagataatggaggatattattctcacgctacctaaaaacaggcagattttactatattccgctactttccctcttagtgtacagaagttcatgaattcccatttgcagaaaccctatgagattaacctgatggaggaactaactctgaagggagtaacccagtactacgcatatgtaactgagcgccaaaaagtacactgcctcaacacacttttctccaggcttcagataaaccagtcgatcattttctgtaactcctctcagcgagttgaattgctagccaagaagatttctcaactgggttattcttgcttctatattcatgctaaaatgaggcaggaacatcgaaatcgtgtatttcatgatttccgaaatggcttatgccgcaatcttgtttgcactgatctgtttacccgaggtattgatatacaagctgtgaatgtggtaataaactttgatttcccaaagctggcagagacctatctccatcgtattggaagatcaggtcgctttggtcatcttggcttagccatcaacttgatcacatatgatgatcgcttcaacctgaaaagtattgaggagcagctgggaacagaaattaaacctattccgagcaacattgataagagcctgtatgtggcagaataccacagcgagcctgtagaagatgagaaaccttaacaagcatgctttgacaaattacaaaaggctcgtttggatctgtgacacatcgttttggggggaatgctcctctctttgtgggtttttcatcttttattttggaactatgaagacttaaaagagctcagacattttctttttttaactggtgaagagaaaaaggctgaaaagaaggaatataccttttttgttccacttgtttgcactgtgtgctgactgaacattagttgcactaactgctggtttttaaaaaatgttttctggggaaaggggacaaggaaggaaaagaaagaagagaaggggagaaaccctaaaaagagaagaatcttaatgaacacacaagcttgtcaatgatttcaaaattctccaacagctgactctcgtgcatttcaacttctccctgattcctcatccgttttttaagcctgaagagcttattacttatttgtgcgaagtgccttatgctatgagaccattcagaatatcatcttttagacacagcccgaggaatcaacaatagtaactctttctttccgtttttttttctttttcttttaaaaaatgtcttcttattttggtttcaggttgaagtctcttccctttctacccagtactcgagcccagggctagaagttgaaactcactagtaatgttaaacaccattttttttttctttttggggaggagttgatatgcaactgcagttcatccgcactgtaaatacatgtatttaaaaaaacaatcccaagtaaaaatttcttctgggctgagtagataaaaaacatcatcgctcccaaaggaaagagcagtctatcattgcaggagccatatgacaagcctttgtgctctatagcagacactaaagactgggttacatatgcctccagtagtagtatggcacttgatgtgtagacatgtcagagcttggccctctttcctctgtggcaaagcgtgtcccatagaaaattgggtgtgtatacttgtataactttgtaaataagttttttttctgggttcatatatatatatatatatacatatatatatatttttttttggatgaaggttgctgggattaaggggattagagtgattatgggagcagctaaagatgagaggggctcagttttacgcaacactaaattctagaaagtactttggcctcgtgctgtagagagcagatttctatggtaccctgtgttagtaaaggggcccagaaatctgggatgtactgtttgctgccacactgtctcatctagtacctttggagtaggtttaccagagagagcaaggaagcttcaaaacattgataattcaacatttattttgagaagctctgattttgcttcttccccctttctaaaagtttgaggaatatttcaagctctgcaacagggggcaaagattaatctaccttgcagtgtaggaattctattgagtggcagtgtcattgagcagtatatatataaagcacagatttgcatttcagaatattagccagtaccagctttggtaatgttagcagttctggagcttaattttctgtggatcatttcctgtagtgtgtaaatgtgttgccctctgcccgctttgatacataaacttttgcaggaatgggcaacctgagagctgttaactttcatgctacagaaagctgcttgccattctcttgcattgtgacaagaattgttacctgtcattttgcactgtaaattgctggcagatgctttacagtcaatagtgttgctttaaattgtgcccctcccaacatgcttgatgtttggcctgatctccaggcaaaaggagtgagatgaatcaaaaccagtgaacttttttttttaatgtttttaattcccttttaacccagtgtactaggtcaatcaggaggcatctggaaagggggggaaaaaagcaaaaaacaaaattaaaaaaaattgatttccatattttatttttcaaaaccctaaaatattacaaaataagtcccgcatatactttaatgttttaactcttttggacaaaggaatcaattacttgaagttgcttttttgactctgcctacttctgagcaaactatttgcgactcacccacaattgccttggagatcaaaatcctacagatgcctcctgatgggacatagccctaactccttaacaactgtagcaagaactgcacggtacaaacccaaaaaagaacaagctcatctatttggaacccaagcctcatattttctgtccagtcaatgttggttactaaatagaaaacctaattaaggaagtaacttttttccagggaggggtgggagagggaatttaaaaggtgtcaacttttgaccaaaaaaattgtgcccttgtaccgatgcagctctctttctcccccacctcttgcgagataagagggatcattcatgtagaagaaaagagtataaatgcaattctgtatctcgctagagaacgtgtgggtgactaaacaaaaagtgcagtctccttcaccaactttagactgcgtggtgccacatgcctgtgggtccctcttaaagcacagacttaaaatggaaagtattactgaagtatagcctctaatgaggagtggcacttaaactatctgggacaccactactggacacggtcttgtagaggcagctgtccagttttggtgcttgactcttgaataggaattgttaaatggaaagatgctctgaggactaggtcaaagcctggtctttttttttttttttttttttttctttcttttttgggccctcataataagcattgtt

SEQ ID NO: 7879 - DNA, 1813 bp, Homo sapiens
  source 1..1813: mol_type = unassigned DNA
attttgggagcttcgagtcaacaataaaggaccgagggtgccgagcgggagtggcctcgttggtaggacacgggcccgagtcgcgaggcttgggattgacgtgagtgaattcagatataactcaagcttgttagagggctttttaaaaataaaaagttgattccgtgcaagagagcaagttactgctgcttaccgttcagagacttacaggtgcttgcctgcattgcaataaaggactcatttattgagcaagacttatatttatctcttcattttggagagcctaataaactgttattacagtttctctactgactttcaaaagttttgaagtttgaaagacctttgcaattaaaacagcatgagcacggccagaacagagaaccctgttataatgggtctgtccagtcaaaatggtcagctgagaggccctgtgaaacccactggtggccctggaggagggggcacacagacacagcaacagatgaaccagctgaaaaacaccaacacaatcaataatggcactcagcagcaagcacagagtatgaccaccactattaaacctggtgatgactggaaaaagactttaaaactccctccaaaggatctaagaatcaaaacttcggatgtgacctccacaaaaggaaatgagtttgaagattactgtttgaaacgggagttactgatgggaatttttgaaatgggctgggaaaagccatctcctattcaggaggagagcattcccattgctttatctggtagggatatcttagctagagcaaaaaatggaacaggcaagagcggtgcctacctcattcccttacttgaacggctagacctgaagaaggacaatatacaagcaatggtgattgttcccactagagaacttgctctacaggtcagtcaaatttgcatccaggtcagcaaacacatgggaggggccaaagtgatggcaaccacaggaggaaccaatttacgagatgacataatgaggcttgatgatacagtgcacgtggtgattgctacccctgggagaatcctggatcttattaagaaaggagtagcaaaggttgatcatgtccagatgatagtattggatgaggcagataagttgctgtcacaggattttgtgcagataatggaggatattattctcacgctacctaaaaacaggcagattttactatattccgctactttccctcttagtgtacagaagttcatgaattcccatttgcagaaaccctatgagattaacctgatggaggaactaactctgaagggagtaacccagtactacgcatatgtaactgagcgccaaaaagtacactgcctcaacacacttttctccaggcttcagataaaccagtcgatcattttctgtaactcctctcagcgagttgaattgctagccaagaagatttctcaactgggttattcttgcttctatattcatgctaaaatgaggcaggaacatcgaaatcgtgtatttcatgatttccgaaatggcttatgccgcaatcttgtttgcactgatctgtttacccgaggtattgatatacaagctgtgaatgtggtaataaactttgatttcccaaagctggcagagacctatctccatcgtattggaagatcaggtcgctttggtcatcttggcttagccatcaacttgatcacatatgatgatcgcttcaacctgaaaagtattgaggagcagctgggaacagaaattaaacctattccgagcaacattgataagagcctgtatgtggcagaataccacagcgagcctgtagaagatgagaaaccttaa

SEQ ID NO: 7880 - DNA, 2541 bp, Homo sapiens
  source 1..2541: mol_type = unassigned DNA
acgggcccgagtcgcgaggcttgggattgacgtgagtgaattcagatataactcaagcttgttagagggctttttaaaaataaaaagttgattccgtgcaagagagcaagttactgctgcttaccgttcagagacttacaggtgcttgcctgcattgcaataaaggactcatttattgagcaagacttatatttatctcttcattttggagagcctaataaactgttattacagtttctctactgactttcaaaagttttgaagtttgaaagacctttgcaattaaaacagcatgagcacggccagaacagagaaccctgttataatgggtctgtccagtcaaaatggtcagctgagaggccctgtgaaacccactggtggccctggaggagggggcacacagacacagcaacagatgaaccagctgaaaaacaccaacacaatcaataatggcactcagcagcaagcacagagtatgaccaccactattaaacctggtgatgactggaaaaagactttaaaactccctccaaaggatctaagaatcaaaacttcggatgtgacctccacaaaaggaaatgagtttgaagattactgtttgaaacgggagttactgatgggaatttttgaaatgggctgggaaaagccatctcctattcaggaggagagcattcccattgctttatctggtagggatatcttagctagagcaaaaaatggaacaggcaagagcggtgcctacctcattcccttacttgaacggctagacctgaagaaggacaatatacaagcaatggtgattgttcccactagagaacttgctctacaggtcagtcaaatttgcatccaggtcagcaaacacatgggaggggccaaagtgatggcaaccacaggaggaaccaatttacgagatgacataatgaggcttgatgatacagtgcacgtggtgattgctacccctgggagaatcctggatcttattaagaaaggagtagcaaaggttgatcatgtccagatgatagtattggatgaggcagataagttgctgtcacaggattttgtgcagataatggaggatattattctcacgctacctaaaaacaggcagattttactatattccgctactttccctcttagtgtacagaagttcatgaattcccatttgcagaaaccctatgagattaacctgatggaggaactaactctgaagggagtaacccagtactacgcatatgtaactgagcgccaaaaagtacactgcctcaacacacttttctccaggcttcagataaaccagtcgatcattttctgtaactcctctcagcgagttgaattgctagccaagaagatttctcaactgggttattcttgcttctatattcatgctaaaatgaggcaggaacatcgaaatcgtgtatttcatgatttccgaaatggcttatgccgcaatcttgtttgcactgatctgtttacccgaggtattgatatacaagctgtgaatgtggtaataaactttgatttcccaaagctggcagagacctatctccatcgtattggaagatcaggtcgctttggtcatcttggcttagccatcaacttgatcacatatgatgatcgcttcaacctgaaaagtattgaggagcagctgggaacagaaattaaacctattccgagcaacattgataagagcctgtatgtggcagaataccacagcgagcctgtagaagatgagaaaccttaacaagcatgctttgacaaattacaaaaggctcgtttggatctgtgacacatcgttttggggggaatgctcctctctttgtgggtttttcatcttttattttggaactatgaagacttaaaagagctcagacattttctttttttaactggtgaagagaaaaaggctgaaaagaaggaatataccttttttgttccacttgtttgcactgtgtgctgactgaacattagttgcactaactgctggtttttaaaaaatgttttctggggaaaggggacaaggaaggaaaagaaagaagagaaggggagaaaccctaaaaagagaagaatcttaatgaacacacaagcttgtcaatgatttcaaaattctccaacagctgactctcgtgcatttcaacttctccctgattcctcatccgttttttaagcctgaagagcttattacttatttgtgcgaagtgccttatgctatgagaccattcagaatatcatcttttagacacagcccgaggaatcaacaatagtaactctttctttccgtttttttttctttttcttttaaaaaatgtcttcttattttggtttcaggttgaagtctcttccctttctacccagtactcgagcccagggctagaagttgaaactcactagtaatgttaaacaccattttttttttctttttggggaggagttgatatgcaactgcagttcatccgcactgtaaatacatgtatttaaaaaaacaatcccaagtaaaaatttcttctgggctgagtagataaaaaacatcatcgctcccaa

SEQ ID NO: 7881 - DNA, 2883 bp, Homo sapiens
  source 1..2883: mol_type = unassigned DNA
tcagccaggcggcgacttcggcggcgccacgagagcgggcagcggaggagattgacgtgagtgaattcagatataactcaagcttgttagagggctttttaaaaataaaaagttgattccgtgcaagagagcaagttactgctgcttaccgttcagagacttacaggtgcttgcctgcattgcaataaaggactcatttattgagcaagacttatatttatctcttcattttggagagcctaataaactgttattacagtttctctactgactttcaaaagttttgaagtttgaaagacctttgcaattaaaacagcatgagcacggccagaacagagaaccctgttataatgggtctgtccagtcaaaatggtcagctgagaggccctgtgaaacccactggtggccctggaggagggggcacacagacacagcaacagatgaaccagctgaaaaacaccaacacaatcaataatggcactcagcagcaagcacagagtatgaccaccactattaaacctggtgatgactggaaaaagactttaaaactccctccaaaggatctaagaatcaaaacttcggatgtgacctccacaaaaggaaatgagtttgaagattactgtttgaaacgggagttactgatgggaatttttgaaatgggctgggaaaagccatctcctattcaggaggagagcattcccattgctttatctggtagggatatcttagctagagcaaaaaatggaacaggcaagagcggtgcctacctcattcccttacttgaacggctagacctgaagaaggacaatatacaagcaatggtgattgttcccactagagaacttgctctacaggtcagtcaaatttgcactgtgtgctgactgaacattagttgcactaactgctggtttttaaaaaatgttttctggggaaaggggacaaggaaggaaaagaaagaagagaaggggagaaaccctaaaaagagaagaatcttaatgaacacacaagcttgtcaatgatttcaaaattctccaacagctgactctcgtgcatttcaacttctccctgattcctcatccgttttttaagcctgaagagcttattacttatttgtgcgaagtgccttatgctatgagaccattcagaatatcatcttttagacacagcccgaggaatcaacaatagtaactctttctttccgtttttttttctttttcttttaaaaaatgtcttcttattttggtttcaggttgaagtctcttccctttctacccagtactcgagcccagggctagaagttgaaactcactagtaatgttaaacaccattttttttttctttttggggaggagttgatatgcaactgcagttcatccgcactgtaaatacatgtatttaaaaaaacaatcccaagtaaaaatttcttctgggctgagtagataaaaaacatcatcgctcccaaaggaaagagcagtctatcattgcaggagccatatgacaagcctttgtgctctatagcagacactaaagactgggttacatatgcctccagtagtagtatggcacttgatgtgtagacatgtcagagcttggccctctttcctctgtggcaaagcgtgtcccatagaaaattgggtgtgtatacttgtataactttgtaaataagttttttttctgggttcatatatatatatatatatacatatatatatatttttttttggatgaaggttgctgggattaaggggattagagtgattatgggagcagctaaagatgagaggggctcagttttacgcaacactaaattctagaaagtactttggcctcgtgctgtagagagcagatttctatggtaccctgtgttagtaaaggggcccagaaatctgggatgtactgtttgctgccacactgtctcatctagtacctttggagtaggtttaccagagagagcaaggaagcttcaaaacattgataattcaacatttattttgagaagctctgattttgcttcttccccctttctaaaagtttgaggaatatttcaagctctgcaacagggggcaaagattaatctaccttgcagtgtaggaattctattgagtggcagtgtcattgagcagtatatatataaagcacagatttgcatttcagaatattagccagtaccagctttggtaatgttagcagttctggagcttaattttctgtggatcatttcctgtagtgtgtaaatgtgttgccctctgcccgctttgatacataaacttttgcaggaatgggcaacctgagagctgttaactttcatgctacagaaagctgcttgccattctcttgcattgtgacaagaattgttacctgtcattttgcactgtaaattgctggcagatgctttacagtcaatagtgttgctttaaattgtgcccctcccaacatgcttgatgtttggcctgatctccaggcaaaaggagtgagatgaatcaaaaccagtgaacttttttttttaatgtttttaattcccttttaacccagtgtactaggtcaatcaggaggcatctggaaagggggggaaaaaagcaaaaaacaaaattaaaaaaaattgatttccatattttatttttcaaaaccctaaaatattacaaaataagtcccgcatatactttaatgttttaactcttttggacaaaggaatcaattacttgaagttgcttttttgactctgcctacttctgagcaaactatttgcgactcacccacaattgccttggagatcaaaatcctacagatgcctcctgatgggacatagccctaactccttaacaactgtagcaagaactgcacggtacaaacccaaaaaagaacaagctcatctatttggaaccc

SEQ ID NO: 7882 - DNA, 6071 bp, Homo sapiens
  source 1..6071: mol_type = unassigned DNA
aggaaaccgaaactcccgccggatgcataaaagactggctgcggtggctcagagcgccgagtcctaggccaggtctggggtaacctggaacttccacctgggctctgcgctaggtctctgtttcactccctccccgcggggcgcgcagctcgcgggtctttggacaccaccggtcctgagtccgcggactgccattttcattaagaactgccacttagaggtaccaaaataaagggtatttgctacctttaatacttgccagttcaggttggaggcacaggcagcagcaagaatggaaagaaatgttcttacaacattttcacaggaaatgtcccagttaattttgaatgaaatgccaaaagctgaatattccagtttattcaatgattttgttgaatctgaattttttttgattgatggggattcattacttatcacatgtatctgtgagatatcatttaagcctgggcagaacctccatttcttctatctggttgaacgctatcttgtggatcttattagcaaaggaggacaattcaccatagttttcttcaaggatgccgagtatgcgtatttcaacttccctgaacttctttctttgagaactgctttaattcttcatcttcagaagaataccaccattgatgttcgaacaacattttcgagatgcttatcaaaagagtggggaagtttcttggaagagagttacccatatttcctgatagttgcagacgaaggcctgaacgatctacaaacacagcttttcaactttttaatcattcattcttgggcaaggaaggtcaacgttgtactttcctcagggcaagaatctgatgttctttgcctttatgcataccttcttccaagcatgtacagacaccagattttttcctggaagaataagcagaacattaaagatgcttatacaaccctgcttaaccagttggaaagatttaagctttcagcattagcacctctttttggaagtttaaaatggaataatattacggaagaggcacacaagactgtatctctgcttacacaagtctggccagaaggatctgacattcggcgtgtcttttgtgttacttcatgctcattatctttgagaatgtaccatcgctttttaggaaacagagagccctcctctggtcaggaaactgagatccaacaggtgaacagtaattgcttaaccctgcaggagatggaagatttgtgtaaactgcattgtctcactgtggtttttctactccatctgcctctttctcaaagagcttgtgctagagtcatcacttcccattgggctgaggacatgaagcctttattacaaatgaaaaagtggtgtgaatatttcatcttaagaaatatacatacttttgaattttggaatctgaatttaattcacctttctgacttaaatgatgagcttttgttgaagaatattgctttttactatgaaaatgaaaatgtaaaaggcctacatttgaatttgggagataccattatgaaagattatgaatatctctggaataccgtatcaaagttggtcagagactttgaggttggacagccatttcctctgagaacaacaaaagtttgttttcttgaaaagaaaccatcaccaatcaaagacagctccaatgaaatggtgcccaatttgggttttattccaacgtcatcttttgtggttgataaatttgctggagatattttgaaagatttgccttttctaaagagtgatgatcctattgttacttcactggttaaacaaaaggaatttgatgaacttgtgcactggcattctcataaacccctgagtgatgattatgacaggtccaggtgtcagtttgatgaaaaatctagagaccctcgtgttcttagatctgtgcaaaagtatcatgttttccaacggttttatgggaattcattagaaacagtctcttcgaaaatcatcgtgactcaaactattaagtcaaagaaggattttagtgggcccaagagcaaaaaggcacacgagaccaaggctgaaataattgctagagagaataagaaaaggttatttgccagggaagaacaaaaggaagagcaaaagtggaatgctttgtcattttctattgaagagcaattgaaagaaaatttacactctggaataaagagcctggaagattttttgaaatcctgtaaaagtagctgtgtgaaacttcaggttgaaatggtggggttaactgcttgcttgaaagcctggaaagaacattgccgaagtgaagaaggtaaaaccacgaaagatttaagtatagctgttcaggtgatgaaaaggatccactccttgatggaaaaatactcagaacttttacaagaagatgatcggcaactcatagccagatgccttaagtatttaggatttgatgagttggcaagttctttacatccagcccaggatgcagaaaatgatgtaaaagtgaagaaaaggaataaatattcagttggcattgggccagctcggttccaactgcaatacatgggccattatttgatacgagatgagagaaaagacccagatcccagggtccaggattttattcccgacacatggcagcgagagctccttgatgttgtggataagaatgagtcagcagtgattgttgccccaacgtcctcaggcaaaacctatgcctcctactactgtatggagaaagtgctgaaggagagcgacgacggggtggtcgtgtacgttgcacccacaaaggcccttgttaatcaagtggcagcaactgttcagaatcgttttacgaaaaatctgccaagtggtgaagttctctgtggtgttttcaccagggagtatcgtcatgatgccttaaactgtcaggtacttattacagtgcctgcctgctttgaaattctgctgcttgctcctcatcgccaaaactgggtgaaaaagatcagatatgttatatttgatgaggttcattgtcttggtggagaaattggagcagaaatctgggaacatctccttgtcatgatccgatgtccctttttggctctttcagctaccataagtaatcctgaacatctcaccgagtggctacaatcggtaaaatggtactggaaacaagaagacaaaataattgaaaataataccgcttctaaaagacatgtgggtcgtcaggccggctttcccaaagactacttgcaagtaaaacaatcgtataaagttagacttgtgctctatggagagaggtataatgatctagagaagcatgtatgttcaataaaacatggtgacattcattttgatcattttcacccatgtgctgcactaacaacagatcatattgaaaggtatggattccctcctgatcttaccctttcacctcgagaaagcatccagctgtatgatgccatgtttcaaatttggaaaagttggcctcgggcccaggaactgtgcccagaaaacttcattcattttaacaataaattagtcattaaaaagatggatgctaggaaatatgaagagagtctaaaggcagaattaacaagttggattaaaaatggcaacgtagagcaggccagaatggtacttcagaatcttagtcctgaagcagatttgagtccagaaaacatgatcaccatgtttccacttctagttgaaaaactaaggaaaatggagaagttacctgcactattttttttattcaagttaggagctgtagaaaacgcagctgaaagtgtgagcactttcctaaagaaaaagcaggagacaaaaaggcctcccaaagctgataaagaagcccatgtcatggctaacaaacttcgaaaagttaaaaaatccatagagaaacaaaagatcatagatgaaaagagccagaaaaaaaccagaaatgtggatcaaagcctaatacatgaagctgaacatgataatctagtgaagtgtctagagaagaacctggaaatcccacaggactgcacatatgctgatcaaaaagcagtggacactgagactttgcagaaggtatttggtcgagtaaaatttgaaagaaaaggtgaagaattgaaagccttggcagaaaggggtattggatatcatcacagtgctatgagtttcaaagaaaaacaattagttgaaatcctctttagaaaaggatatcttagggtggtgacagctactggaacacttgctttaggtgtcaacatgccttgtaaatctgtggtttttgctcaaaactcagtctatctggatgcgttgaattatagacagatgtctggccgtgctggaagaagaggtcaagacctgatgggagatgtatatttctttgatattccattccccaaaataggaaaactcataaaatccaatgttcctgagctgagaggacacttccctctcagcataaccctggtcctgcgactcatgctgctggcttccaagggagatgacccagaggatgccaaggcaaaggtgctatcagtgctaaagcattcattgctgtccttcaagcaacccagagtcatggacatgttaaaactttacttcctgttttctttgcagttcctggtgaaagagggctatttagatcaagaaggtaatcctatggggtttgctggacttgtatcacatttgcattatcatgaaccttctaatcttgtttttgtcagttttcttgtaaatggactcttccatgatctctgtcagccaaccaggaaaggctcaaaacatttttctcaagacgttatggaaaagctagtattagtattggcacatctctttggaagaagatattttccaccaaagttccaagatgcacacttcgagttttatcaatcaaaggtgttccttgatgatctccctgaggattttagtgatgctttagatgaatataacatgaaaattatggaggactttaccactttcctacgaattgtttccaaactggctgatatgaatcaggaatatcaactcccattgtcaaaaatcaaattcacaggtaaagaatgtgaagactctcaactcgtatctcatttgatgagctgcaaggaaggaagagtagcaatttcaccatttgtttgtctgtctgggaactttgatgatgatttgcttcgactagaaactccaaaccatgttactctaggcacaatcggtgtcaatcgctctcaggctccagtgctgttgtcacagaaatttgataaccgaggaaggaaaatgtcgcttaatgcctatgcactggatttctacaaacatggttccttgataggattagtccaggataacaggatgaatgaaggagatgcttattatttgttgaaggattttgcactcaccattaaatctatcagtgtttccttgcgtgagctatgtgaaaatgaagacgacaacgttgtcttagcctttgaacaactgagtacaactttttgggaaaagttaaacaaagtctaaaaacaaagtctatgcaaaccacttaaaaataattccatagtagtttttcaggtcacgtttttgattcttatgcttcttgccagaaatacattatgataaagtggaaatacattacgatgaagtggaaagagcaaacactttggaatcaaacagagttgcaatcaaacctgccatgttctgtcatgaatactcacaaattatttagtatacctgaatcttggtttctttttataactgagtaataatggttacatctcaggtagtttgaggattgactaaaaaaatgcgagaatgttgtatgtgactgaataacaatttttactctgcgaagccaaagtaaatataatattatcagtaactttatccccagtgtcagtatttataaaatgtttattaaggctagaaaaaatgaatacaatatcctgaaggtgaaatatattctcttcaattagcataaatatgatttacataagttagctatacagctattgagatagtactttctagtaaacttaaactactttttaaacatacattttgtgatgatttaacaaaaatatagagaatgatttgctttattgtaattgtatataagtgactggaaaagcacaaagaaataaagtgggttcgatctgtttac

SEQ ID NO: 7883 - DNA, 534 bp, Homo sapiens
  source 1..534: mol_type = unassigned DNA
aaaccgaaactcccgccggatgcataaaagactggctgcggtggctcagagcgccgagtcctaggccaggactgccattttcattaagaactgccacttagaggtaccaaaataaagggtatttgctacctttaatacttgccagttcaggttggaggcacaggcagcagcaagaatggaaagaaatgttcttacaacattttcacaggaaatgtcccagttaattttgaatgaaatgccaaaagctgaatattccagtttattcaatgattttgttgaatctgaattttttttgattgatggggattcattacttatcacatgtatctgtgagatatcatttaagcctgggcagaacctccatttcttctatctggttgaacgctatcttgtggatcttattagcaaaggaggacaattcaccatagttttcttcaaggatgccgagtatgcgtatttcaacttccctgaacttctttctttgagaactgctttaattcttcatcttcagaagaataccaccattgatgttcg

SEQ ID NO: 7884 - DNA, 3901 bp, Homo sapiens
  source 1..3901: mol_type = unassigned DNA
aggaaaccgaaactcccgccggatgcataaaagactggctgcggtggctcagagcgccgagtcctaggccaggtctggggtaacctggaacttccacctgggctctgcgctaggtctctgtttcactccctccccgcggggcgcgcagctcgcgggtctttggacaccaccggtcctgagtccgcggactgccattttcattaagaactgccacttagaggtaccaaaataaagggtatttgctacctttaatacttgccagttcaggttggaggcacaggcagcagcaagaatggaaagaaatgttcttacaacattttcacaggaaatgtcccagttaattttgaatgaaatgccaaaagctgaatattccagtttattcaatgattttgttgaatctgaattttttttgattgatggggattcattacttatcacatgtatctgtgagatatcatttaagcctgggcagaacctccatttcttctatctggttgaacgctatcttgtggatcttattagcaaaggaggacaattcaccatagttttcttcaaggatgccgagtatgcgtatttcaacttccctgaacttctttctttgagaactgctttaattcttcatcttcagaagaataccaccattgatgttcgaacaacattttcgagatgcttatcaaaagagtggggaagtttcttggaagagagttacccatatttcctgatagttgcagacgaaggcctgaacgatctacaaacacagcttttcaactttttaatcattcattcttgggcaaggaaggtcaacgttgtactttcctcagggcaagaatctgatgttctttgcctttatgcataccttcttccaagcatgtacagacaccagattttttcctggaagaataagcagaacattaaagatgcttatacaaccctgcttaaccagttggaaagatttaagctttcagcattagcacctctttttggaagtttaaaatggaataatattacggaagaggcacacaagactgtatctctgcttacacaagtctggccagaaggatctgacattcggcgtgtcttttgtgttacttcatgctcattatctttgagaatgtaccatcgctttttaggaaacagagagccctcctctggtcaggaaactgagatccaacaggtgaacagtaattgcttaaccctgcaggagatggaagatttgtgtaaactgcattgtctcactgtggtttttctactccatctgcctctttctcaaagagcttgtgctagagtcatcacttcccattgggctgaggacatgaagcctttattacaaatgaaaaagtggtgtgaatatttcatcttaagaaatatacatacttttgaattttggaatctgaatttaattcacctttctgacttaaatgatgagcttttgttgaagaatattgctttttactatgaaaatgaaaatgtaaaaggcctacatttgaatttgggagataccattatgaaagattatgaatatctctggaataccgtatcaaagttggtcagagactttgaggttggacagccatttcctctgagaacaacaaaagtttgttttcttgaaaagaaaccatcaccaatcaaagacagctccaatgaaatggtgcccaatttgggttttattccaacgtcatcttttgtggttgataaatttgctggagatattttgaaagatttgccttttctaaagagtgatgatcctattgttacttcactggttaaacaaaaggaatttgatgaacttgtgcactggcattctcataaacccctgagtgatgattatgacaggtccaggtgtcagtttgatgaaaaatctagagaccctcgtgttcttagatctgtgcaaaagtatcatgttttccaacggttttatgggaattcattagaaacagtctcttcgaaaatcatcgtgactcaaactattaagtcaaagaaggattttagtgggcccaagagcaaaaaggcacacgagaccaaggctgaaataattgctagagagaataagaaaaggttatttgccagggaagaacaaaaggaagagcaaaagtggaatgctttgtcattttctattgaagagcaattgaaagaaaatttacactctggaataaagagcctggaagattttttgaaatcctgtaaaagtagctgtgtgaaacttcaggttgaaatggtggggttaactgcttgcttgaaagcctggaaagaacattgccgaagtgaagaaggtaaaaccacgaaagatttaagtatagctgttcaggtgatgaaaaggatccactccttgatggaaaaatactcagaacttttacaagaagatgatcggcaactcatagccagatgccttaagtatttaggatttgatgagttggcaagttctttacatccagcccaggatgcagaaaatgatgtaaaagtgaagaaaaggaataaatattcagttggcattgggccagctcggttccaactgcaatacatgggccattatttgatacgagatgagagaaaagacccagatcccagggtccaggattttattcccgacacatggcagcgagagctccttgatgttgtggataagaatgagtcagcagtgattgttgccccaacgtcctcaggcaaaacctatgcctcctactactgtatggagaaagtgctgaaggagagcgacgacggggtggtcgtgtacgttgcacccacaaaggcccttgttaatcaagtggcagcaactgttcagaatcgttttacgaaaaatctgccaagtggtgaagttctctgtggtgttttcaccagggagtatcgtcatgatgccttaaactgtcaggtacttattacagtgcctgcctgctttgaaattctgctgcttgctcctcatcgccaaaactgggtgaaaaagatcagatatgttatatttgatgaggttcattgtcttggtggagaaattggagcagaaatctgggaacatctccttgtcatgatccgatgtccctttttggctctttcagctaccataagtaatcctgaacatctcaccgagtggctacaatcggtaaaatggtactggaaacaagaagacaaaataattgaaaataataccgcttctaaaagacatgtgggtcgtcaggccggctttcccaaagactacttgcaagtaaaacaatcgtataaagttagacttgtgctctatggagagaggtataatgatctagagaagcatgtatgttcaataaaacatggtgacattcattttgatcattttcacccatgtgctgcactaacaacagatcatattgaaaggtatggattccctcctgatcttaccctttcacctcgagaaagcatccagctgtatgatgccatgtttcaaatttggaaaagttggcctcgggcccaggaactgtgcccagaaaacttcattcattttaacaataaattagtcattaaaaagatggatgctaggaaatatgaagagagtctaaaggcagaattaacaagttggattaaaaatggcaacgtagagcaggccagaatggtacttcagaatcttagtcctgaagcagatttgagtccagaaaacatgatcaccatgtttccacttctagttgaaaaactaaggaaaatggagaagttacctgcactattttttttattcaagttaggagctgtagaaaacgcagctgaaagtgtgagcactttcctaaagaaaaagcaggagacaaaaaggcctcccaaagctgataaagaagcccatgtcatggctaacaaacttcgaaaagttaaaaaatccatagagaaacaaaagatcatagatgaaaagagccagaaaaaccagaaatgtggatcaaagcctaatacatga

SEQ ID NO: 7885 - DNA, 1605 bp, Homo sapiens
  source 1..1605: mol_type = unassigned DNA
ggaggaagttataaagagggtacgagggggccagctggagagccatgcagtccaagcgggattgtgagctgtggtgtgagagggtgaatccagagaacaaggcggcgctggaggcgtgggtcagggagacaggcatccgcctggtgcaggtgaacgggcagaggaagtatggcgggccacccccaggctgggtgggcagcccgccgccagctgggtcagaggtgttcatcgggcggctgcctcaggacgtgtacgagcaccagcttatcccgctgttccagcgcgtgggccgcctctacgagttccgcctgatgatgaccttcagcggcctgaaccgcggcttcgcctatgcccgctacagctcgaggcgcggcgcgcaggccgccatcgccacgctgcacaaccatccgctgcggccgtcctgcccgctgctcgtgtgccgcagcaccgagaagtgtgagctgagcgttgacggcctgccgccgaatctgacccgcagcgcgctgctgctcgcgctgcagccgctgggtcccggcttgcaggaggcgcggctgctgcccagccccggaccggcgcccgggcagatcgctctgctcaaattcagctcgcaccgggccgctgccatggccaaaaaggccctggtggaagggcagtcacacctctgtggagagcaggtggctgtggagtggctcaagccagacctgaagcagcgacttcgccagcagcttgtgggtcccttcttgcggtccccacagccagagggcagccagttggctttggcaagggacaagttagggttccaaggggctcgggctaccctgcagttgctgtgccaacgaatgaagctgggcagccctgtgttcctcaccaagtgtttgggcataggacctgctggctggcaccgcttctggtaccaggtggtgattcctgggcatccggtgcccttcagcggcctcatctgggttgtgctgaccctagatggccgggatgggcatgaggtggccaaggatgctgtgtctgtacggctgctgcaggcactcagtgagtctggggccaacctcctgtggtctgctggggctgaggcaggtaccatggttaaacagtgactccattctttctccacaggcaccctgaatgggcatgcagagcctgtgtcaggccccatcccagcaggcctgggtggccactttctgacccccaaaggtggggaggggcatgggcccaggcccatcagcctccctgctgggacagggacctatggcacctgggggcagcttaggtttgggttaagttgtggtgaggggccttgccctcccgctcccagcccagggtccaacctgacccagtgatcttccatggccgttccttgtcccacccccacccgatcataccttcccccctctgccacagcttagcatgaatcttctttattgtcctgatttgtcctctttgttggtttttatttgtggggaagggcagctgagccaaaggggtcagaaattctgccctttgcctccaccacatggcattctggttttggtttctgtatagttttgggtctttctatgctggttgtatttatattaaacccctggttagtatata

SEQ ID NO: 7886 - DNA, 2590 bp, Homo sapiens
  source 1..2590: mol_type = unassigned DNA
agaaagcaatgtttgagcaccagctatgctgagattccctcgttcagtattcgttgagcacccagtgtgtgagagcgcctggttttgccctcaaggagcttagagtggagtttacaggaatgaatcactgattagcggcaggcctaagtgtgggcactgtcgcaccacacacccagatactactccaggcacgggcattaggggctcccacaggctggacaggccttggactttcctggttgaaccgtgaggccgcggtgtcagtccacactccactgtgggtggcgggttcggccccgcgaggaggcgccgctctcaaaccccacggtcccgcgcagcgaagaggcgaggcggccgcggaaggcaggcgcagcccactcttcccgagaggccccgacatctcccggataatctggagctttcaaaatgtttgccaaagcaaccaggaattttcttagagaagttgatgctgatggtgacctgattgcagtatcaaatctgaatgactctgataagttacagcttctaagtctggtgacaaaaaagaagagattctggtgctggcagagacccaagtaccagtttttatccctcacccttggcgatgtactcatagaagaccaatttccgagtccagtggtcgtggagtcggactttgtgaaatacgagggcaagtttgcaaaccacgtgagtggaaccctggagactgcactggggaaggtcaagctgaacctggggggcagcagccgcgtagagagccagtcttcatttggaaccctgaggaagcaggaggtggatttgcagcagctcatcagagactctgccgagagaacaataaatctgagaaaccctgtgctccagcaggtgctggaaggaaggaatgaggtcctgtgcgttttgacacagaagatcacgacgatgcagaagtgtgtgatctctgagcacatgcaggtcgaggagaagtgtggtggcatcgtgggcatccagaccaagacggtgcaggtgtcagcgacggaggatgggaatgtcaccaaggactccaacgtggtgctggagatcccagctgccaccaccattgcctacggtgtcattgagttatacgtgaaactggacggccagttcgagttctgccttctccgagggaagcaaggtggcttcgagaacaagaagagaattgactctgtctacctggaccccctggtctttcgagagtttgcattcatagacatgccagatgctgcgcatgggatatcttcccaggatggaccattaagtgttttaaagcaagcgaccctgctcctggagaggaatttccatccatttgcggagctgcctgagccacaacagacagctttgagtgacatcttccaggcggtcctatttgatgatgaactactcatggtcctggaaccagtgtgcgatgacctggtcagcggcctctcgcccacagtggcggtgctgggggagctgaagccccggcagcagcaggaccttgtggccttcctgcagctggtggggtgcagcttacagggtgggtgtccgggccccgaggatgcaggcagcaagcagctgtttatgacagcctacttcttggtcagtgccctcgcagaaatgccagatagcgcagcagctctgctgggcacttgctgcaaactccagatcattcccacactgtgccacttgcttcgtgctctgtctgatgatggagtatctgatcttgaagacccaaccttgactcccctgaaagatacagaaaggtttgggattgtgcagcgcttgtttgcctcagctgacattagtctggagagactgaagtcatctgtgaaagctgtcattctgaaggactctaaagtcttcccactgcttctttgtataaccctgaatggactctgtgctttaggcagagaacattcatgatgtcatatgtgaactagaagtacgtgttactggccaaggctatttttcagaactgttaaaggtcatatgcacgttaaaagttgaccaatgaaatgaatttacagaacagtttaagaagtggtgacattttgcatgatgaatgacctgacttttagccaccaggtactctttaaacagttttccttatcagaggccctcctgtgctggtgacccagcatctgagttaggttccagcatgtaaagagctgggagggcggagaattcttagcatacattcagacgttttttctgcacaataataagtccatctgtcacttgcattccactttttgttacatagaaagagtctgaccctttaatccaaaaggtctttttacattgtgaatgctgtgggaaggcaatttctctgcacacaagaggctacgttttggaagtgatgtatgttatttgatgactgaaaatgaactgtaaatgctcctagagtatattcctctgctgaacaaaattaaacttcaaaaaaatctaacagtaacacacccctgcttgggaccctagctatatgcattttatgtgaccttgccatgcttcagtgaacatactaattctatgtctagcacatgttgatttcctatgtattctgggtattctattaaaggaaactttgaactatgtc

SEQ ID NO: 7887 - DNA, 1689 bp, Homo sapiens
  source 1..1689: mol_type = unassigned DNA
ggggcgcccggaccgagcaaaggtcccggcgggcgggccctctctccgccctccccaagcgcccgccccccgccggcccagcgcaggctcctccgactccgccagcgcagggggcgcggctgccggggacccagcagcgggcgcgcggataatctggagctttcaaaatgtttgccaaagcaaccaggaattttcttagagaagttgatgctgatggtgacctgattgcagtatcaaatctgaatgactctgataagttacagcttctaagtctggtgacaaaaaagaagagattctggtgctggcagagacccaagtaccagtttttatccctcacccttggcgatgtactcatagaagaccaatttccgagtccagtggtcgtggagtcggactttgtgaaatacgagggcaagtttgcaaaccacgtgagtggaaccctggagactgcactggggaaggtcaagctgaacctggggggcagcagccgcgtagagagccagtcttcatttggaaccctgaggaagcaggaggtggatttgcagcagctcatcagagactctgccgagagaacaataaatctgagaaaccctgtgctccagcaggtgctggaaggaaggaatgaggtcctgtgcgttttgacacagaagatcacgacgatgcagaagtgtgtgatctctgagcacatgcaggtcgaggagaagtgtggtggcatcgtgggcatccagaccaagacggtgcaggtgtcagcgacggaggatgggaatgtcaccaaggactccaacgtggtgctggagatcccagctgccaccaccattgcctacggtgtcattgagttatacgtgaaactggacggccagttcgagttctgccttctccgagggaagcaaggtggcttcgagaacaagaagagaattgactctgtctacctggaccccctggtctttcgagagtttgcattcatagacatgccagatgctgcgcatgggatatcttcccaggatggaccattaagtgttttaaagcaagcgaccctgctcctggagaggaatttccatccatttgcggagctgcctgagccacaacagacagctttgagtgacatcttccaggcggtcctatttgatgatgaactactcatggtcctggaaccagtgtgcgatgacctggtcagcggcctctcgcccacagtggcggtgctgggggagctgaagccccggcagcagcaggaccttgtggccttcctgcagctggtggggtgcagcttacagggtgggtgtccgggccccgaggatgcaggcagcaagcagctgtttatgacagcctacttcttggtcagtgccctcgcagaaatgccagatagcgcagcagctctgctgggcacttgctgcaaactccagatcattcccacactgtgccacttgcttcgtgctctgtctgatgatggagtatctgatcttgaagacccaaccttgactcccctgaaagatacagaaaggtttgggattgtgcagcgcttgtttgcctcagctgacattagtctggagagactgaagtcatctgtgaaagctgtcattctgaaggactctaaagtcttcccactgcttctttgtataaccctgaatggactctgtgctttaggcagagaacattcatgatgtcatatgtgaactagaagtacgtgttact

SEQ ID NO: 7888 - DNA, 2265 bp, Homo sapiens
  source 1..2265: mol_type = unassigned DNA
aggagcttagagtggagtttacaggaatgaatcactgattagcggcaggcctaagtgtgggcactgtcgcaccacacacccagatactactccaggcacgggcattaggggctcccacaggctggacaggccttggactttcctggttgaaccgtgaggccgcggtgtcagtccacactccactgtgggtggcgggttcggccccgcgaggaggcgccgctctcaaaccccacggtcccgcgcagcgaagaggcgaggcggccgcggaaggcaggcgcagcccactcttcccgagaggccccgacatctcccggtggtcgtggagtcggactttgtgaaatacgagggcaagtttgcaaaccacgtgagtggaaccctggagactgcactggggaaggtcaagctgaacctggggggcagcagccgcgtagagagccagtcttcatttggaaccctgaggaagcaggaggtggatttgcagcagctcatcagagactctgccgagagaacaataaatctgagaaaccctgtgctccagcaggtgctggaaggaaggaatgaggtcctgtgcgttttgacacagaagatcacgacgatgcagaagtgtgtgatctctgagcacatgcaggtcgaggagaagtgtggtggcatcgtgggcatccagaccaagacggtgcaggtgtcagcgacggaggatgggaatgtcaccaaggactccaacgtggtgctggagatcccagctgccaccaccattgcctacggtgtcattgagttatacgtgaaactggacggccagttcgagttctgccttctccgagggaagcaaggtggcttcgagaacaagaagagaattgactctgtctacctggaccccctggtctttcgagagtttgcattcatagacatgccagatgctgcgcatgggatatcttcccaggatggaccattaagtgttttaaagcaagcgaccctgctcctggagaggaatttccatccatttgcggagctgcctgagccacaacagacagctttgagtgacatcttccaggcggtcctatttgatgatgaactactcatggtcctggaaccagtgtgcgatgacctggtcagcggcctctcgcccacagtggcggtgctgggggagctgaagccccggcagcagcaggaccttgtggccttcctgcagctggtggggtgcagcttacagggtgggtgtccgggccccgaggatgcaggcagcaagcagctgtttatgacagcctacttcttggtcagtgccctcgcagaaatgccagatagcgcagcagctctgctgggcacttgctgcaaactccagatcattcccacactgtgccacttgcttcgtgctctgtctgatgatggagtatctgatcttgaagacccaaccttgactcccctgaaagatacagaaaggtttgggattgtgcagcgcttgtttgcctcagctgacattagtctggagagactgaagtcatctgtgaaagctgtcattctgaaggactctaaagtcttcccactgcttctttgtataaccctgaatggactctgtgctttaggcagagaacattcatgatgtcatatgtgaactagaagtacgtgttactggccaaggctatttttcagaactgttaaaggtcatatgcacgttaaaagttgaccaatgaaatgaatttacagaacagtttaagaagtggtgacattttgcatgatgaatgacctgacttttagccaccaggtactctttaaacagttttccttatcagaggccctcctgtgctggtgacccagcatctgagttaggttccagcatgtaaagagctgggagggcggagaattcttagcatacattcagacgttttttctgcacaataataagtccatctgtcacttgcattccactttttgttacatagaaagagtctgaccctttaatccaaaaggtctttttacattgtgaatgctgtgggaaggcaatttctctgcacacaagaggctacgttttggaagtgatgtatgttatttgatgactgaaaatgaactgtaaatgctcctagagtatattcctctgctgaacaaaattaaacttcaaaaaaatctaacagtaacacacccctgcttgggaccctagctatatgcattttatgtgaccttgccatgcttcagtgaacatactaattctatgtctagcacatgttgatttcctatgtattctgggtattctattaaaggaaactttgaactatg

SEQ ID NO: 7889 - DNA, 2818 bp, Homo sapiens
  source 1..2818: mol_type = unassigned DNA
gttctatagtcctattaatcagtctttagtgagcctatgtcctgggctgtgaaacttagttccctccccccattatgtggggcagaatggctagaggggactggagttgagttaggctctgataaaaccccaatcgtttaggctttggtgaaacagtttctcttgaagacaggcctcgttaagaacagaatgctctggcatgtttcaaaatggctacgttccccgcctcccgctgcaagaatgaggggagtttttctgatattccctgtgagaacctggttagagctcctagaggtaaaactcacagaagtgtagagagtttctaactctcagacttgtccaccctgagcttccagcagttcatcagttacagttcagggtttcccatgcaagcaatggttcctgtggtttctgctctgtttctgtcacccaggctggagtacagtggcacgatcacagctcactgcaccctcaacttcccaggctcaggtgattctcctgcatcagcctcccgagtagctgggactacaggtgtggacacattgagaagtcactatctatgaactaggaagcaggatctcaccagacatcgaatctgctgatgccttcatcttggacttctctctcagcctccagaactataatctggagctttcaaaatgtttgccaaagcaaccaggaattttcttagagaagttgatgctgatggtgacctgattgcagtatcaaatctgaatgactctgataagttacagcttctaagtctggtgacaaaaaagaagagattctggtgctggcagagacccaagtaccagtttttatccctcacccttggcgatgtactcatagaagaccaatttccgagtccagtggtcgtggagtcggactttgtgaaatacgagggcaagtttgcaaaccacgtgagtggaaccctggagactgcactggggaaggtcaagctgaacctggggggcagcagccgcgtagagagccagtcttcatttggaaccctgaggaagcaggaggtggatttgcagcagctcatcagagactctgccgagagaacaataaatctgagaaaccctgtgctccagcaggtgctggaaggaaggaatgaggtcctgtgcgttttgacacagaagatcacgacgatgcagaagtgtgtgatctctgagcacatgcaggtcgaggagaagtgtggtggcatcgtgggcatccagaccaagacggtgcaggtgtcagcgacggaggatgggaatgtcaccaaggactccaacgtggtgctggagatcccagctgccaccaccattgcctacggtgtcattgagttatacgtgaaactggacggccagttcgagttctgccttctccgagggaagcaaggtggcttcgagaacaagaagagaattgactctgtctacctggaccccctggtctttcgagagtttgcattcatagacatgccagatgctgcgcatgggatatcttcccaggatggaccattaagtgttttaaagcaagcgaccctgctcctggagaggaatttccatccatttgcggagctgcctgagccacaacagacagctttgagtgacatcttccaggcggtcctatttgatgatgaactactcatggtcctggaaccagtgtgcgatgacctggtcagcggcctctcgcccacagtggcggtgctgggggagctgaagccccggcagcagcaggaccttgtggccttcctgcagctggtggggtgcagcttacagggtgggtgtccgggccccgaggatgcaggcagcaagcagctgtttatgacagcctacttcttggtcagtgccctcgcagaaatgccagatagcgcagcagctctgctgggcacttgctgcaaactccagatcattcccacactgtgccacttgcttcgtgctctgtctgatgatggagtatctgatcttgaagacccaaccttgactcccctgaaagatacagaaaggtttgggattgtgcagcgcttgtttgcctcagctgacattagtctggagagactgaagtcatctgtgaaagctgtcattctgaaggactctaaagtcttcccactgcttctttgtataaccctgaatggactctgtgctttaggcagagaacattcatgatgtcatatgtgaactagaagtacgtgttactggccaaggctatttttcagaactgttaaaggtcatatgcacgttaaaagttgaccaatgaaatgaatttacagaacagtttaagaagtggtgacattttgcatgatgaatgacctgacttttagccaccaggtactctttaaacagttttccttatcagaggccctcctgtgctggtgacccagcatctgagttaggttccagcatgtaaagagctgggagggcggagaattcttagcatacattcagacgttttttctgcacaataataagtccatctgtcacttgcattccactttttgttacatagaaagagtctgaccctttaatccaaaaggtctttttacattgtgaatgctgtgggaaggcaatttctctgcacacaagaggctacgttttggaagtgatgtatgttatttgatgactgaaaatgaactgtaaatgctcctagagtatattcctctgctgaacaaaattaaacttcaaaaaaatctaacagtaacacacccctgcttgggaccctagctatatgcattttatgtgaccttgccatgcttcagtgaacatactaattctatgtctagcacatgttgatttcctatgtattctgggtattctattaaaggaaactttgaact

SEQ ID NO: 7890 - DNA, 2847 bp, Homo sapiens
  source 1..2847: mol_type = unassigned DNA
gaaactcctaggcagcagaggcccacgactacttcctcctgagtgccgttcagtggcctgtgtccaggctctgaagggctccaagaagctggtgctgtctgtgtactcagcagggcgcatccctgggggctacgtcaccaaccacatctacacctgggtggacccgcagggccgcagcatctccccaccctcgggcctgccccagccccacggtggtgccctgaggcagcaggagggtgaccggaggagcaccctgcacctcctgcaaggaggggatgagaaaaaggtgaacctggtgctgggggacggccggtccctgggcctcacgatccgtgggggagctgagtacggccttggcatttacatcactggcgtggacccaggctctgaagcagaaggcagcgggctcaaggttggggaccagattctagaagtgaatgggcggagctttctcaacatcctacacgacgaggctgtcaggctgcttaagtcatctcggcacctcatcctgacagtgaaggacgtcgggaggctgccccgtgcccgcaccactgtggacgagaccaagtggatcgccagttcccggatcagggagaccatggcgaactcggcagggtttcttggcgatctcacaacagaaggaataaacaagccaggattttacaagggcccagccggctcccaggtgaccctgagcagcctggggaaccagacacgagtgctgctggaggagcaggctcggcacctgctgaacgagcaggaacacgccaccatggcctactacctggatgagtaccgtggtggcagcgtctctgtggaggccctcgtcatggccctgttcaagctgctcaacacccacgccaagttctcactcctctctgaggtgagaggcaccatttccccgcaagacctagaacgcttcgaccacctggtgctgaggcgtgagattgagtccatgaaggcgcggcagcccccaggccccggggctggggacacctactccatggtctcctacagtgacacgggttcatccacaggcagccacggcacctccaccaccgtcagctcggccaggaacactctggacctggaggaaactggcgaggctgtccagggcaatatcaacgccctcccagatgtgtccgtggatgatgtcagatccacctcccaggggctgtcaagcttcaagccactgcctcgcccaccacctctggcccaaggcaacgacctcccactaggccagccaaggaagctggggagagaggacctccagccaccttcctccatgccttcctgctcgggcactgtcttctcggctccacagaaccgcagcccgccagcgggcaccgcacccaccccagggacctcctctgcacaggacttgccctcttcccccatctatgcctccgtctcccctgccaaccccagctccaagaggccgctggacgcccatctggccctggtcaaccaacaccccatcggccccttcccacgggtccagtcacccccgcacctgaaaagcccctctgcagaggccacagtggctgggggctgccttctgcccccatcaccctctggccacccagaccagacaggcacaaaccagcactttgtcatggtggaggtccaccgccccgacagcgagccagacgtcaatgaagtgagggcgctgccccagacgcgcacagcctctacgctctcccacctctcggacagcgggcagactctaagcgaggacagtggtgtggatgctggcgaggcagaggccagcgccccaggccgaggaaggcagtcggtgtccaccaagagcaggagtagcaaggagctgcctcggaacgagaggcccacagatggggccaacaaaccgcctggacttctggagcccacgtccactctggtccgtgtgaagaaaagtgcggccaccctgggcatcgccatcgagggtggcgccaacacccgccagcccctgcctaggattgtcactattcagagaggcggctcagctcacaactgtgggcagctcaaggtgggccacgtgattctggaagtgaatgggctgacgcttcggggcaaggagcaccgggaggccgcccgcattatcgccgaggccttcaagactaaggaccgtgactacattgactttctggtcactgagttcaatgtgatgctctagaggccaaggcctgagggcctcccaccactgcccagcccctggtcccagtccctttccaccgttggcttcatcaagctccttgcggggttggggctgcatggccagggtggcaggaagacatcccccctccatcccagcccactggaccagaactgggagaggaagagagcaggacaaggcagacagaaggtcaggtcaggaactggtgctgtactgggtacacagtaggcgcccaggacaagtgggttgcaagacaggaagaaaggaaaaggaagggcagagtgctggtttctccaggttgggttgggggcactgctgtcccccctccagctaggacccagcccatccccagatgcctgagcctttgtccaaagtgaggtcactcgagaattcatggacacggcccccagtcagggggcatcttgcaagacctttagtgccacaaataagcatcgagcacctccccattcacacccccattcctcctggctccttatcccccatggtgtttattatttatttccctccccatgcccctggggaccccaaggccccagcttccctctgcacccccagcctatcccagaggccttgcaggtgaccagcagtgtcattgtatttatatacagagcttatgactttaatttttcaataaagaaatctgaacaaggtta

SEQ ID NO: 7891 - DNA, 3566 bp, Homo sapiens
  source 1..3566: mol_type = unassigned DNA
gtctccgcgaccccctaggatccagccactgtacccgtgctccccaaacccaggctccagccgtcgtctccgcgctcccggggatccagctgtcgcgccagtacccgcgaggacagcggcaccgcccacaccccgcgcgctcagagcccggccgggcctcggcgtggagatgaacgcgccgctggacggcctgtcggtgagctcgtcctccaccggctcgctgggctcggcggccggggcgggcggcggcgggggcgcggggctgcggttactgtctgccaacgtgcgccagctgcaccaagcgctgaccgcgctgctgagcgaggcggagcgggagcagttcacccactgcctgaacgcttaccacgcgcgccgcaacgtcttcgacctggtgcgcaccctgcgcgtgctgctggacagtccggtcaagcggcgcctgctgcccatgcttcgtctggtcatcccgcgctccgaccagctgctcttcgaccaatacacggccgagggcctctacctgcccgccaccaccccctacaggcagcccgcctggggcggccccgacagcgcggggccaggggaggtgcgcctggtgagtttgcggcgtgccaaggcccacgagggcttgggcttcagcatccgtgggggctcggagcacggcgtgggcatctacgtgtctctggtggaaccaggctctctagctgagaaggaaggactgcgggtcggggaccagattctgcgcgtcaacgacaaatccctggcccgggtgacccacgcggaggccgtcaaggctctgaagggctccaagaagctggtgctgtctgtgtactcagcagggcgcatccctgggggctacgtcaccaaccacatctacacctgggtggacccgcagggccgcagcatctccccaccctcgggcctgccccagccccacggtggtgccctgaggcagcaggagggtgaccggaggagcaccctgcacctcctgcaaggaggggatgagaaaaaggtgaacctggtgctgggggacggccggtccctgggcctcacgatccgtgggggagctgagtacggccttggcatttacatcactggcgtggacccaggctctgaagcagaaggcagcgggctcaaggttggggaccagattctagaagtgaatgggcggagctttctcaacatcctacacgacgaggctgtcaggctgcttaagtcatctcggcacctcatcctgacagtgaaggacgtcgggaggctgccccgtgcccgcaccactgtggacgagaccaagtggatcgccagttcccggatcagggagaccatggcgaactcggcagggtttcttggcgatctcacaacagaaggaataaacaagccaggattttacaagggcccagccggctcccaggtgaccctgagcagcctggggaaccagacacgagtgctgctggaggagcaggctcggcacctgctgaacgagcaggaacacgccaccatggcctactacctggatgagtaccgtggtggcagcgtctctgtggaggccctcgtcatggccctgttcaagctgctcaacacccacgccaagttctcactcctctctgaggtgagaggcaccatttccccgcaagacctagaacgcttcgaccacctggtgctgaggcgtgagattgagtccatgaaggcgcggcagcccccaggccccggggctggggacacctactccatggtctcctacagtgacacgggttcatccacaggcagccacggcacctccaccaccgtcagctcggccaggaacactctggacctggaggaaactggcgaggctgtccagggcaatatcaacgccctcccagatgtgtccgtggatgatgtcagatccacctcccaggggctgtcaagcttcaagccactgcctcgcccaccacctctggcccaaggcaacgacctcccactaggccagccaaggaagctggggagagaggacctccagccaccttcctccatgccttcctgctcgggcactgtcttctcggctccacagaaccgcagcccgccagcgggcaccgcacccaccccagggacctcctctgcacaggacttgccctcttcccccatctatgcctccgtctcccctgccaaccccagctccaagaggccgctggacgcccatctggccctggtcaaccaacaccccatcggccccttcccacgggtccagtcacccccgcacctgaaaagcccctctgcagaggccacagtggctgggggctgccttctgcccccatcaccctctggccacccagaccagacaggcacaaaccagcactttgtcatggtggaggtccaccgccccgacagcgagccagacgtcaatgaagtgagggcgctgccccagacgcgcacagcctctacgctctcccacctctcggacagcgggcagactctaagcgaggacagtggtgtggatgctggcgaggcagaggccagcgccccaggccgaggaaggcagtcggtgtccaccaagagcaggagtagcaaggagctgcctcggaacgagaggcccacagatggggccaacaaaccgcctggacttctggagcccacgtccactctggtccgtgtgaagaaaagtgcggccaccctgggcatcgccatcgagggtggcgccaacacccgccagcccctgcctaggattgtcactattcagagaggcggctcagctcacaactgtgggcagctcaaggtgggccacgtgattctggaagtgaatgggctgacgcttcggggcaaggagcaccgggaggccgcccgcattatcgccgaggccttcaagactaaggaccgtgactacattgactttctggtcactgagttcaatgtgatgctctagaggccaaggcctgagggcctcccaccactgcccagcccctggtcccagtccctttccaccgttggcttcatcaagctccttgcggggttggggctgcatggccagggtggcaggaagacatcccccctccatcccagcccactggaccagaactgggagaggaagagagcaggacaaggcagacagaaggtcaggtcaggaactggtgctgtactgggtacacagtaggcgcccaggacaagtgggttgcaagacaggaagaaaggaaaaggaagggcagagtgctggtttctccaggttgggttgggggcactgctgtcccccctccagctaggacccagcccatccccagatgcctgagcctttgtccaaagtgaggtcactcgagaattcatggacacggcccccagtcagggggcatcttgcaagacctttagtgccacaaataagcatcgagcacctccccattcacacccccattcctcctggctccttatcccccatggtgtttattatttatttccctccccatgcccctggggaccccaaggccccagcttccctctgcacccccagcctatcccagaggccttgcaggtgaccagcagtgtcattgtatttatatacagagcttatgactttaatttttcaataaagaaatctgaacaaggtt

SEQ ID NO: 7892 - DNA, 1718 bp, Homo sapiens
  source 1..1718: mol_type = unassigned DNA
agttcgcaaagtccgggcttgcggccgggcggcgcagaggcgcggaggctccccgggcggctgcatcccggggctgccccggacatgccccgcaccccttgtcggacgcccgcgccgcttcaccggctgccactccccggagtgctctgggactagagcgccctccgccccaacttctgactttggggtcccccagccctagaggaacgggcgcccggctgggggagccccgggcatggtgtgacggggcagtcaggtcagctttgcggcgcccccaaactccagccacccgtcgtctccgtgccctccagaatgtagctgctgaccccgcgccccccggactccagcagcagtctccgccacctccgggctccagcagccaactcttgtgtctctcaggaacccgccgacgtctccgcgtcccccggattccaggttcgcgacccccgccgtcttcgcgcctccgggactctagcagcggtctccgcgaccccctaggatccagccactgtacccgtgctccccaaacccaggctccagccgtcgtctccgcgctcccggggatccagctgtcgcgccagtacccgcgaggacagcggcaccgcccacaccccgcgcgctcagagcccggccgggcctcggcgtggagatgaacgcgccgctggacggcctgtcggtgagctcgtcctccaccggctcgctgggctcggcggccggggcgggcggcggcgggggcgcggggctgcggttactgtctgccaacgtgcgccagctgcaccaagcgctgaccgcgctgctgagcgaggcggagcgggagcagttcacccactgcctgaacgcttaccacgcgcgccgcaacgtcttcgacctggtgcgcaccctgcgcgtgctgctggacagtccggtcaagcggcgcctgctgcccatgcttcgtctggtcatcccgcgctccgaccagctgctcttcgaccaatacacggccgagggcctctacctgcccgccaccaccccctacaggcagcccgcctggggcggccccgacagcgcggggccaggggaggtgcgcctggtgagtttgcggcgtgccaaggcccacgagggcttgggcttcagcatccgtgggggctcggagcacggcgtgggcatctacgtgtctctggtggaaccaggctctctagctgagaaggaaggactgcgggtcggggaccagattctgcgcgtcaacgacaaatccctggcccgggtgacccacgcggaggccgtcaaggctctgaagggctccaagaagctggtgctgtctgtgtactcagcagggcgcatccctgggggctacgtcaccaaccacatctacacctgggtggacccgcagggccgcagcatctccccaccctcgggcctgccccagccccacggtggtgccctgaggcagcaggagggtgaccggaggagcaccctgcacctcctgcaaggaggggatgagaaaaaggtgagtggggtggggaaaggaggccagcctctcagacaccgtattctccctccgaacccagaacagcagagctgcttggaggccgcaagaagaggctggttctgtccaggctctgtcttccctcaagtctgtactgaagggtggtgttttttctttgcttttctttttgacctgtgtagtgtatgttataatacaggctaagctgccacaataaaagagcttaaatactgtg

SEQ ID NO: 7893 - DNA, 3278 bp, Homo sapiens
  source 1..3278: mol_type = unassigned DNA
catgacctgggcacatccctctcctctcttggcctcagtttccccatggaaagctgaaatacaccatccaactgtctcattctttatttgtccccaaattacttaactcattctatagaccttagttgcttcatccaaaaagtggggaccataaccctgccctcatcccagatctgtgcagatgaaagagagggagggagagggaaagagagagatgctttggggtgtatttggccagaggccaccaggctggatcccatgaagaaatctgggtgagagggtcttaaagtcataaactgagatccagttgccaggtggctgcatagttgccaacagtgtaatgtgtcaccttttgatcttcatcagaaatctcaggctggtggccacctggccaaatacactgcagagcatgtctgtctgtctgtctgtctgtgtctctctgtgtgtgtgtgtgtgtgtgtgtgtgtgtgtgtgtgtgtgtgtgtctcccccttcccttcctttcacctgcatagtattaaacattttcaaagttacttgccaacatctagaaagataccaggttttctataaaaaaaaaaactggatttctggatgcttcttaaaaatcaggaagtctggcagcctgagcccacatcggctggagctgagccgcacctgcgagttgcatctgggatctccagttcaccggcccctaagctcctgagggttggcctgaccctgaggttgcctgtcaatcaccatttcttccctccactccttgtgttacctgcctggtcctgcggggttggcaacaactcaggagcccacctcgggtggttttggaggtgccgtgcacactgctgattgggaggctggacgctgccagtctgtccggagtttcctttacccctgagtagcccccagactgaactggcagcgagtggaggccacgatgcatggttctcttgaagctttgctcttcctgccccaagtcaccctgtcccttgcccacgcccatttgatctgctcaaatgcacaactggagatgtgtgtctttccccacaggtttcttggcgatctcacaacagaaggaataaacaagccaggattttacaagggcccagccggctcccaggtgaccctgagcagcctggggaaccagacacgagtgctgctggaggagcaggctcggcacctgctgaacgagcaggaacacgccaccatggcctactacctggatgagtaccgtggtggcagcgtctctgtggaggccctcgtcatggccctgttcaagctgctcaacacccacgccaagttctcactcctctctgaggtgagaggcaccatttccccgcaagacctagaacgcttcgaccacctggtgctgaggcgtgagattgagtccatgaaggcgcggcagcccccaggccccggggctggggacacctactccatggtctcctacagtgacacgggttcatccacaggcagccacggcacctccaccaccgtcagctcggccaggaacactctggacctggaggaaactggcgaggctgtccagggcaatatcaacgccctcccagatgtgtccgtggatgatgtcagatccacctcccaggggctgtcaagcttcaagccactgcctcgcccaccacctctggcccaaggcaacgacctcccactaggccagccaaggaagctggggagagaggacctccagccaccttcctccatgccttcctgctcgggcactgtcttctcggctccacagaaccgcagcccgccagcgggcaccgcacccaccccagggacctcctctgcacaggacttgccctcttcccccatctatgcctccgtctcccctgccaaccccagctccaagaggccgctggacgcccatctggccctggtcaaccaacaccccatcggccccttcccacgggtccagtcacccccgcacctgaaaagcccctctgcagaggccacagtggctgggggctgccttctgcccccatcaccctctggccacccagaccagacaggcacaaaccagcactttgtcatggtggaggtccaccgccccgacagcgagccagacgtcaatgaagtgagggcgctgccccagacgcgcacagcctctacgctctcccacctctcggacagcgggcagactctaagcgaggacagtggtgtggatgctggcgaggcagaggccagcgccccaggccgaggaaggcagtcggtgtccaccaagagcaggagtagcaaggagctgcctcggaacgagaggcccacagatggggccaacaaaccgcctggacttctggagcccacgtccactctggtccgtgtgaagaaaagtgcggccaccctgggcatcgccatcgagggtggcgccaacacccgccagcccctgcctaggattgtcactattcagagaggcggctcagctcacaactgtgggcagctcaaggtgggccacgtgattctggaagtgaatgggctgacgcttcggggcaaggagcaccgggaggccgcccgcattatcgccgaggccttcaagactaaggaccgtgactacattgactttctggtcactgagttcaatgtgatgctctagaggccaaggcctgagggcctcccaccactgcccagcccctggtcccagtccctttccaccgttggcttcatcaagctccttgcggggttggggctgcatggccagggtggcaggaagacatcccccctccatcccagcccactggaccagaactgggagaggaagagagcaggacaaggcagacagaaggtcaggtcaggaactggtgctgtactgggtacacagtaggcgcccaggacaagtgggttgcaagacaggaagaaaggaaaaggaagggcagagtgctggtttctccaggttgggttgggggcactgctgtcccccctccagctaggacccagcccatccccagatgcctgagcctttgtccaaagtgaggtcactcgagaattcatggacacggcccccagtcagggggcatcttgcaagacctttagtgccacaaataagcatcgagcacctccccattcacacccccattcctcctggctccttatcccccatggtgtttattatttatttccctccccatgcccctggggaccccaaggccccagcttccctctgcacccccagcctatcccagaggccttgcaggtgaccagcagtgtcattgtatttatatacagagcttatgactttaatttttcaataaagaaatctgaacaaggtt

SEQ ID NO: 7894 - DNA, 1202 bp, Homo sapiens
  source 1..1202: mol_type = unassigned DNA
aaactacttggtgaaaccatgctttgtatttttaagatgtataattatatttaaaaacaagcaatgcttaattttgtgcctgattttcctctttaaaaatggatttatctgggggttgcagttgatgacgttttgattttaatatgtttgctgctgctaccaagagctttgtcaagcaagttggagatggagggagattagttcctgttccaagcctcagtgaagctgacaaatatcaacctctaagtctggtggtaaaaaagaagcgatgctttctgtttcctagatataaatttacttcaacaccttttacactgaaagatattctcctaggagacagagaaatttcagctggtatttcatcttatcaattactgaattatgaagatgaatcagatgtttcactctatggaaggcgaggtaaccatattgtaaatgacgttgggattaacgttgctggatcagattccattgcagtgaaagcttcatttggtatagtaaccaaacatgaagtggaagtatcaacattactcaaagaaattactacacgaaaaattaactttgaccacagcttgatacgtcagtcaaggagcagcagaaaggcagtattgtgtgtggtcatggagagcatccgaaccacacgacagtgctcactgtctgtgcatgctggaattcgaggggaagcaatgcggtttcactttatggatgaacagaatcccaagggaagggacaaagctattgttttcccagcacatacaaccatagctttcagtgtttttgaactcttcatatacctggatggtgcctttgacctttgtgtcacttcagtgtcaaaaggaggatttgaaagggaagaaacggcaacatttgcactgctgtacaggttgagaaatatcctatttgaaagaaatagaagagtgatggatgtcatttctcgttcacagctttacttggatgatcttttttctgactactatgacaaacctctcagcatgactgatatttcactcaaagaagggacccatatccgagttaacttacttaatcacaacattcccaaagggccttgcatactctgtggaatggggaacttcaaaagggagacagtttatgggtgctttcagtgttctgttgatggtcagaagtatgtgagacttcatgcagttccttgttttgatatttggcacaagaggatgaaataa

SEQ ID NO: 7895 - DNA, 1531 bp, Homo sapiens
  source 1..1531: mol_type = unassigned DNA
tttcttgccgggagagagggattagagggattgtccggcgtgggtctagggtcgttgaggcctaaagttaagcctttgtggggaggacggattgggggctgggtcactttaagaaaaagattctaaaattacgaaggcagaattccagggagtctcccgggcctggtcctgaagcttgagaccccggatatatacgctccagggggctgcggtgcgctcttcgggtccccgagccctgtgtttaggaacacgcggggacgtccaaacacccgctcctctcccgccgggcgggctcctttgtcttctgggctttcgtcgcgagatggaacgctggttgatgacgttttgattttaatatgtttgctgctgctaccaagagctttgtcaagcaagttggagatggagggagattagttcctgttccaagcctcagtgaagctgacaaatatcaacctctaagtctggtggtaaaaaagaagcgatgctttctgtttcctagatataaatttacttcaacaccttttacactgaaagatattctcctaggagacagagaaatttcagctggtatttcatcttatcaattactgaattatgaagatgaatcagatgtttcactctatggaaggcgaggtaaccatattgtaaatgacgttgggattaacgttgctggatcagattccattgcagtgaaagcttcatttggtatagtaaccaaacatgaagtggaagtatcaacattactcaaagaaattactacacgaaaaattaactttgaccacagcttgatacgtcagtcaaggagcagcagaaaggcagtattgtgtgtggtcatggagagcatccgaaccacacgacagtgctcactgtctgtgcatgctggaattcgaggggaagcaatgcggtttcactttatggatgaacagaatcccaagggaagggacaaagctattgttttcccagcacatacaaccatagctttcagtgtttttgaactcttcatatacctggatggtgcctttgacctttgtgtcacttcagtgtcaaaaggaggatttgaaagggaagaaacggcaacatttgcactgctgtacaggttgagaaatatcctatttgaaagaaatagaagagtgatggatgtcatttctcgttcacagctttacttggatgatcttttttctgactactatgacaaacctctcagcatgactgatatttcactcaaagaagggacccatatccgagttaacttacttaatcacaacattcccaaagggccttgcatactctgtggaatggggaacttcaaaagggagacagtttatgggtgctttcagtgttctgttgatggtcagaagtatgtgagacttcatgcagttccttgttttgatatttggcacaagaggatgaaataaaatgaaaaatgaatacaccgtgttggtgttttaggtgcagttgtgccacaaaccttccctaaattatctaggtttgctttgatgaattaaattaaaatgagaaaagcaaaaagaaa

SEQ ID NO: 7896 - DNA, 2994 bp, Homo sapiens
  source 1..2994: mol_type = unassigned DNA
tcgccgccgccattttagctgttggttccggccgcaccgtgtgggctgtagtagcgggaggggtgggggtcctccagagttaagtggctgtcctcgactgtgcccatacagcagccagctttcttccttaataactgcccgttcgaagagtgcgaggatgtccaagcggcaccggttggacctaggggaggattacccctctggcaagaagcgtgcggggaccgatgggaaggatcgagatcgagaccgggatcgtgaagatcggtctaaagatcgagaccgagaacgtgatagaggagatagagagcgagagagggagaaagaaaaggagaaggagttgcgagcttcaacaaatgctatgcttatcagtgctggattaccacctttgaaagcttcccattcagctcactcaacccactcagcacattcaacgcattcaacacattctgctcattcaacgcatgccggacatgcaggtcacacgtcacttccacagtgcattaatccgttcaccaacttaccccatactcctcgatactatgatattctaaagaaacgtcttcagctccctgtttgggaatacaaggataggtttacagatattctggttagacatcagtcctttgtactggttggtgagactgggtctggtaaaacaacacagattccacagtggtgtgtggagtacatgcgatcattaccaggacccaagagaggagttgcctgtacccaacccaggagagtggctgcaatgagtgtggctcagagagttgctgatgagatggatgtgatgttgggccaggaagttggttactccattcgatttgaagactgcagtagtgcaaaaaccattcttaagtatatgactgatgggatgttacttcgtgaagctatgaatgatcccctcctggagcgttatggtgtaataattcttgatgaggctcatgagaggacactggctacagatattctaatgggtgttctgaaggaagttgtaagacagagatcagatttaaaggttatagttatgagcgctactctagatgcaggaaaattccagatttactttgataactgtcctctcctaactattcctgggcgtacacatcctgttgagatcttctatactccagaaccagagagagattatcttgaagcagcaattcgaacagttatccagattcatatgtgtgaagaggaagagggagatcttcttcttttcttaactggtcaagaggaaattgatgaagcctgtaagagaataaagcgtgaagttgatgatttgggccctgaagttggtgacattaaaatcattccattgtattctacacttccacctcagcagcagcaacgcatttttgagcctccacctcccaaaaaacagaatggagcaattggaagaaaggtagttgtgtcaactaacatagcagagacgtctttgacaatagatggtgtggtgtttgtgattgatcctggatttgcgaaacagaaggtctacaatcctcgaatcagagttgagtcccttttggtgacagctattagtaaagcttcagctcagcaaagggctggtcgagctggacgtaccagacctggaaaatgcttcagactttacacagagaaagcttataaaacagaaatgcaggataacacctatcctgagattttgcgttctaatttaggatcagttgtgttacaattgaagaaacttggtattgatgacttggtacattttgattttatggatccaccagctcctgaaactctgatgagagccctggaacttttgaattacctggctgctttaaatgatgatggagatctgactgaattgggatccatgatggcagagtttcctctagatccacagctcgcaaaaatggttattgcaagttgtgactacaactgttctaatgaggtcctatctattactgctatgttgtcagtcccacagtgttttgttcgccccacggaggccaagaaagccgcagatgaggccaagatgagatttgcccacatagatggagatcatctgacactgctgaacgtctaccatgcttttaaacaaaatcatgaatcggttcagtggtgttatgacaacttcattaactacaggtccctgatgtccgcagacaatgtacgccagcagctatctcgaattatggacagatttaatttgcctcgtcgaagtactgactttacaagcagggactattatattaatataagaaaagctttggttactgggtattttatgcaggtggcacatttagaacgaacagggcattacttaactgtgaaagataaccaggtggttcagttgcatccctctactgttcttgaccacaaacctgaatgggtgctttataatgagtttgttctaacaacaaagaattacatccggacatgtacagatatcaagccagaatggttggtgaaaattgcccctcaatattatgacatgagcaatttcccacagtgtgaagcaaagagacagttggaccgcatcattgccaaacttcaatccaaggaatattcacagtactgaattcagtgcttagaactgaagttattgagaggacagctttaaaagatgaatgaactcaaaagttcgagttgtgctcttcacgttggttcgataatggcctttatttgaaagctttttaatttttctttacagtaaatattccattctgatttcataaattaaacatttatgcctcccttttgtgttgacactgtagctcatactggaaaagtcgatcaatgttttgcagtttattgaaagtagttctatatataacaatgttataagcatttctttagaaatggttgaaaatgcttctaaaatgtgattatcgaccatggtatgcatgatcgttgtaattgttgacattccttttagaagttgtgaaatgttacaacttgtgcttatgtagacacaatcttctgtctcagtacagaggcactgacttcaataaagtctatttatactaa

SEQ ID NO: 7897 - DNA, 2556 bp, Homo sapiens
  source 1..2556: mol_type = unassigned DNA
agctgttggttccggccgcaccgtgtgggctgtagtagcgggaggggtgggggtcctccagagttaagtggctgtcctcgactgtgcccatacagcagccagctttcttccttaataactgcccgttcgaagagtgcgaggatgtccaagcggcaccggttggacctaggggaggattacccctctggcaagaagcgtgcggggaccgatgggaaggatcgagatcgagaccgagaacgtgatagaggagatagagagcgagagagggagaaagaaaaggagaaggagttgcgagcttcaacaaatgctatgcttatcagtgctggattaccacctttgaaagcttcccattcagctcactcaacccactcagcacattcaacgcattcaacacattctgctcattcaacgcatgccggacatgcaggtcacacgtcacttccacagtgcattaatccgttcaccaacttaccccatactcctcgatactatgatattctaaagaaacgtcttcagctccctgtttgggaatacaaggataggtttacagatattctggttagacatcagtcctttgtactggttggtgagactgggtctggtaaaacaacacagattccacagtggtgtgtggagtacatgcgatcattaccaggacccaagagaggagttgcctgtacccaacccaggagagtggctgcaatgagtgtggctcagagagttgctgatgagatggatgtgatgttgggccaggaagttggttactccattcgatttgaagactgcagtagtgcaaaaaccattcttaagtatatgactgatgggatgttacttcgtgaagctatgaatgatcccctcctggagcgttatggtgtaataattcttgatgaggctcatgagaggacactggctacagatattctaatgggtgttctgaaggaagttgtaagacagagatcagatttaaaggttatagttatgagcgctactctagatgcaggaaaattccagatttactttgataactgtcctctcctaactattcctgggcgtacacatcctgttgagatcttctatactccagaaccagagagagattatcttgaagcagcaattcgaacagttatccagattcatatgtgtgaagaggaagagggagatcttcttcttttcttaactggtcaagaggaaattgatgaagcctgtaagagaataaagcgtgaagttgatgatttgggccctgaagttggtgacattaaaatcattccattgtattctacacttccacctcagcagcagcaacgcatttttgagcctccacctcccaaaaaacagaatggagcaattggaagaaaggtagttgtgtcaactaacatagcagagacgtctttgacaatagatggtgtggtgtttgtgattgatcctggatttgcgaaacagaaggtctacaatcctcgaatcagagttgagtcccttttggtgacagctattagtaaagcttcagctcagcaaagggctggtcgagctggacgtaccagacctggaaaatgcttcagactttacacagagaaagcttataaaacagaaatgcaggataacacctatcctgagattttgcgttctaatttaggatcagttgtgttacaattgaagaaacttggtattgatgacttggtacattttgattttatggatccaccagctcctgaaactctgatgagagccctggaacttttgaattacctggctgctttaaatgatgatggagatctgactgaattgggatccatgatggcagagtttcctctagatccacagctcgcaaaaatggttattgcaagttgtgactacaactgttctaatgaggtcctatctattactgctatgttgtcagtcccacagtgttttgttcgccccacggaggccaagaaagccgcagatgaggccaagatgagatttgcccacatagatggagatcatctgacactgctgaacgtctaccatgcttttaaacaaaatcatgaatcggttcagtggtgttatgacaacttcattaactacaggtccctgatgtccgcagacaatgtacgccagcagctatctcgaattatggacagatttaatttgcctcgtcgaagtactgactttacaagcagggactattatattaatataagaaaagctttggttactgggtattttatgcaggtggcacatttagaacgaacagggcattacttaactgtgaaagataaccaggtggttcagttgcatccctctactgttcttgaccacaaacctgaatgggtgctttataatgagtttgttctaacaacaaagaattacatccggacatgtacagatatcaagccagaatggttggtgaaaattgcccctcaatattatgacatgagcaatttcccacagtgtgaagcaaagagacagttggaccgcatcattgccaaacttcaatccaaggaatattcacagtactgaattcagtgcttagaactgaagttattgagaggacagctttaaaagatgaatgaactcaaa

SEQ ID NO: 7898 - DNA, 1933 bp, Homo sapiens
  source 1..1933: mol_type = unassigned DNA
ctgaacaatatgtgcctttttgactcttcagaggctgtgaatttctggtcttggaagatcacagtggagcaattggacagataggattttatccttcatatcccttgcaaaagatctctaagaacccatggagagccagccagcgcaagagtgtctgatgcagatgtttttgcccatcgagccagcctgctttgtggaatggctggggacttcaccatcacagttaggcgtggtgatggtggatgaggcacacgaaaggaccctacacacagacattctctttggattgatcaaggatgttgctcgcttccgacctgagctcaaggtcctggtggcttcagccacaatggacactgcccgtttttccaccttctttgatgacgcccctgtgtttcgaatccccggacgcaggtttcctgtggacatcttctacaccaaggctccagaggctgactacttggaagcttgtgtagtatctgtgttgcagatccatgtgacccagccccctggggatatcctggtgttcctgacaggacaggaggagattgaggctgcctgtgagatgctccaggatcgctgccgccgcctgggctccaaaatccgggagctcctggtgctgcccatttatgccaatctgccctctgacatgcaggcccgtatcttccagcccacaccacctggggcacgaaaggtggttgtggcaacgaacattgctgagacatcactcaccattgagggcatcatttatgtgctggatccagggttctgtaagcagaagagctacaacccccgcacaggcatggaatcgctcactgtcacaccctgcagcaaggcctcagccaatcagcgagctggcagggcaggtcgggtggctgcagggaagtgcttccgcctgtataccgcctgggcctatcagcacgagcttgaggaaaccacagtgcctgagatccagaggaccagcttgggcaatgtcgtgttgctgctcaagagcttagggatccatgacctaatgcactttgatttcctggaccctccaccatatgagacactgctgctggctttggagcagctgtatgctctgggagccctcaaccaccttggggagctcaccacgtctggtcgaaagatggcagagctgccggtggaccccatgctgtccaaaatgatcttagcctctgagaagtacagctgttcagaggagatcctgacagtggctgccatgctctctgtcaacaactccatcttctaccgaccaaaggacaaggtcgtccatgctgacaatgcccgtgtcaacttctttctccctggcggtgaccacctggttctgctaaatgtttacacacagtgggctgagagtggttactcttcccagtggtgctatgagaactttgtacagttcagatcgatgcgccgagcccgggatgtgcgggaacagctggaagggctcttggaacgtgtggaagttggtctcagttcctgccagggggactatatccgtgtacgcaaggccatcactgctggttacttttaccacacggcacggttgactcggagtggctaccgcacagtgaaacagcagcagacagtcttcattcatcccaactcctccctctttgagcaacagccacgctggctgctctaccacgaacttgtcttgaccaccaaagagttcatgagacaggtactggagattgagagcagttggcttctggaggtggctccccattattataaggccaaggagctagaagatccccatgctaagaaaatgcccaaaaaaataggcaaaacacgagaagagctagggtaagagaaggacgtaaacagaacctgacaccagctccttttccttctatacattatttaatacctattaaataaaattatttttggaataaagcttgtgggaacatttgggatctagagaaagtga

SEQ ID NO: 7899 - DNA, 3445 bp, Homo sapiens
  source 1..3445: mol_type = unassigned DNA
ggccgaaaaagtacagccccttccgggctccgcggtacgggaagacagctttgggatgtcggaagatcctagaggtcccaaggtagctgacttgcgaagctgaggctccagccgagggctccaggcctctgaccggcccagcagtgagcgcggctgcccgacgcttcagggccgggagcagggagcgtgagtcgccatggcgacgccggcgggtctggagcgctgggttcaggacgagctgcactcggtgttggggctgagcgagcggcacgtcgcccagtttctgatcggtaccgcacagcgctgcacctctgccgaggagttcgtgcagcgcctacgagacactgataccttggatctcagtgggccggcccgggacttcgccctgagactctggaacaaggtaccacgaaaggcagtggtagaaaagccagctcgggcagcagagcgagaggcccgggccctgctggagaagaaccgatcttataggttactggaagacagtgaagagagcagtgaggagactgtgagtagggctggaagcagcctccagaagaaacgtaaaaagcggaaacacctcaggaagaagcgtgaggaagaagaggaggaagaggcttctgagaaagggaagaagaaaacaggggggagtaaacagcagacagagaagccagagtcggaagatgagtgggaacggacagagcgtgaacgccttcaggacctggaggagcgtgatgcctttgctgagcgggttcgacagcgggacaaggatcggactcgaaatgtcctggaacggtcagacaagaaggcttatgaagaggctcagaagcgcctcaagatggccgaggaagaccggaaggccatggtccctgagctgcggaagaaatctcgccgagagtacctggctaagcgggagcgagagaagcttgaggacctggaggcggagctggctgatgaggagttcctttttggggacgtggagctgagccggcacgagcggcaggagctcaaatataagcggcgagtgcgggatctcgcccgggagtaccgggcagctggggagcaggagaagctggaggccaccaatcgctaccacatgcccaaggaaacccgaggacagccagcccgagctgtggatctagtggaggaggaatcaggagcccctggggaggagcagcggcgctgggaggaggcgcggcttggggcagcgtccctgaagtttggggcccgagatgctgcctctcaggagcccaagtatcaactggtgctggaggaggaggagaccattgagtttgtccgggccactcagctccagggtgatgaggagccgtcagctccacccacttcaactcaggcccagcagaaagagtccatccaggccgtccgccgcagcctcccggtgttcccatttcgagaggagctcctggctgctattgcaaatcaccaagtcctcatcattgaaggcgagacaggctcagggaagaccacccagatcccgcagtatctctttgaggagggttatacaaacaagggtatgaagattgcctgcacccaaccccggagagtggctgccatgagtgtggccgcccgagtggcccgggagatgggtgtgaagcttgggaatgaggttggctacagcatccgctttgaggactgcacatcagagcgaactgtcctccgctacatgacagatgggatgcttctccgggagttcctctctgagcctgacctggcgagttacagcgtggtgatggtggatgaggcacacgaaaggaccctacacacagacattctctttggattgatcaaggatgttgctcgcttccgacctgagctcaaggtcctggtggcttcagccacaatggacactgcccgtttttccaccttctttgatgacgcccctgtgtttcgaatccccggacgcaggtttcctgtggacatcttctacaccaaggctccagaggctgactacttggaagcttgtgtagtatctgtgttgcagatccatgtgacccagccccctggggatatcctggtgttcctgacaggacaggaggagattgaggctgcctgtgagatgctccaggatcgctgccgccgcctgggctccaaaatccgggagctcctggtgctgcccatttatgccaatctgccctctgacatgcaggcccgtatcttccagcccacaccacctggggcacgaaaggtggttgtggcaacgaacattgctgagacatcactcaccattgagggcatcatttatgtgctggatccagggttctgtaagcagaagagctacaacccccgcacaggcatggaatcgctcactgtcacaccctgcagcaaggcctcagccaatcagcgagctggcagggcaggtcgggtggctgcagggaagtgcttccgcctgtataccgcctgggcctatcagcacgagcttgaggaaaccacagtgcctgagatccagaggaccagcttgggcaatgtcgtgttgctgctcaagagcttagggatccatgacctaatgcactttgatttcctggaccctccaccatatgagacactgctgctggctttggagcagctgtatgctctgggagccctcaaccaccttggggagctcaccacgtctggtcgaaagatggcagagctgccggtggaccccatgctgtccaaaatgatcttagcctctgagaagtacagctgttcagaggagatcctgacagtggctgccatgctctctgtcaacaactccatcttctaccgaccaaaggacaaggtcgtccatgctgacaatgcccgtgtcaacttctttctccctggcggtgaccacctggttctgctaaatgtttacacacagtgggctgagagtggttactcttcccagtggtgctatgagaactttgtacagttcagatcgatgcgccgagcccgggatgtgcgggaacagctggaagggctcttggaacgtgtggaagttggtctcagttcctgccagggggactatatccgtgtacgcaaggccatcactgctggttacttttaccacacggcacggttgactcggagtggctaccgcacagtgaaacagcagcagacagtcttcattcatcccaactcctccctctttgagcaacagccacgctggctgctctaccacgaacttgtcttgaccaccaaagagttcatgagacaggtactggagattgagagcagttggcttctggaggtggctccccattattataaggccaaggagctagaagatccccatgctaagaaaatgcccaaaaaaataggcaaaacacgagaagagctagggtaagagaaggacgtaaacagaacctgacaccagctccttttccttctatacattatttaatacctattaaataaaattatttttggaataaagcttgtgggaacatttgggatctagagaaagtga

SEQ ID NO: 7900 - DNA, 1933 bp, Homo sapiens
  source 1..1933: mol_type = unassigned DNA
ctgaacaatatgtgcctttttgactcttcagaggctgtgaatttctggtcttggaagatcacagtggagcaattggacagataggattttatccttcatatcccttgcaaaagatctctaagaacccatggagagccagccagcgcaagagtgtctgatgcagatgtttttgcccatcgagccagcctgctttgtggaatggctggggacttcaccatcacagttaggcgtggtgatggtggatgaggcacacgaaaggaccctacacacagacattctctttggattgatcaaggatgttgctcgcttccgacctgagctcaaggtcctggtggcttcagccacaatggacactgcccgtttttccaccttctttgatggcgcccctgtgtttcgaatccccggacgcaggtttcctgtggacatcttctacaccaaggctccagaggctgactacttggaagcttgtgtagtatctgtgttgcagatccatgtgacccagccccctggggatatcctggtgttcctgacaggacaggaggagattgaggctgcctgtgagatgctccaggatcgctgccgccgcctgggctccaaaatccgggagctcctggtgctgcccatttatgccaatctgccctctgacatgcaggcccgtatcttccagcccacaccacctggggcacgaaaggtggttgtggcaacgaacattgctgagacatcactcaccattgagggcatcatttatgtgctggatccagggttctgtaagcagaagagctacaacccccgcacaggcatggaatcgctcactgtcacaccctgcagcaaggcctcagccaatcagcgagctggcagggcaggtcgggtggctgcagggaagtgcttccgcctgtataccgcctgggcctatcagcacgagcttgaggaaaccacagtgcctgagatccagaggaccagcttgggcaatgtcgtgttgctgctcaagagcttagggatccatgacctaatgcactttgatttcctggaccctccaccatatgagacactgctgctggctttggagcagctgtatgctctgggagccctcaaccaccttggggagctcaccacgtctggtcgaaagatggcagagctgccggtggaccccatgctgtccaaaatgatcttagcctctgagaagtacagctgttcagaggagatcctgacagtggctgccatgctctctgtcaacaactccatcttctaccgaccaaaggacaaggtcgtccatgctgacaatgcccgtgtcaacttctttctccctggcggtgaccacctggttctgctaaatgtttacacacagtgggctgagagtggttactcttcccagtggtgctatgagaactttgtacagttcagatcgatgcgccgagcccgggatgtgcgggaacagctggaagggctcttggaacgtgtggaagttggtctcagttcctgccagggggactatatccgtgtacgcaaggccatcactgctggttacttttaccacacggcacggttgactcggagtggctaccgcacagtgaaacagcagcagacagtcttcattcatcccaactcctccctctttgagcaacagccacgctggctgctctaccacgaacttgtcttgaccaccaaagagttcatgagacaggtactggagattgagagcagttggcttctggaggtggctccccattattataaggccaaggagctagaagatccccatgctaagaaaatgcccaaaaaaataggcaaaacacgagaagagctagggtaagagaaggacgtaaacagaacctgacaccagctccttttccttctatacattatttaatacctattaaataaaattatttttggaataaagcttgtgggaacatttgggatctagagaaagtga

SEQ ID NO: 7901 - DNA, 3445 bp, Homo sapiens
  source 1..3445: mol_type = unassigned DNA
ggccgaaaaagtacagccccttccgggctccgcggtacgggaagacagctttgggatgtcggaagatcctagaggtcccaaggtagctgacttgcgaagctgaggctccagccgagggctccaggcctctgaccggcccagcagtgagcgcggctgcccgacgcttcagggccgggagcagggagcgtgagtcgccatggcgacgccggcgggtctggagcgctgggttcaggacgagctgcactcggtgttggggctgagcgagcggcacgtcgcccagtttctgatcggtaccgcacagcgctgcacctctgccgaggagttcgtgcagcgcctacgagacactgataccttggatctcagtgggccggcccgggacttcgccctgagactctggaacaaggtaccacgaaaggcagtggtagaaaagccagctcgggcagcagagcgagaggcccgggccctgctggagaagaaccgatcttataggttactggaagacagtgaagagagcagtgaggagactgtgagtagggctggaagcagcctccagaagaaacgtaaaaagcggaaacacctcaggaagaagcgtgaggaagaagaggaggaagaggcttctgagaaagggaagaagaaaacaggggggagtaaacagcagacagagaagccagagtcggaagatgagtgggaacggacagagcgtgaacgccttcaggacctggaggagcgtgatgcctttgctgagcgggttcgacagcgggacaaggatcggactcgaaatgtcctggaacggtcagacaagaaggcttatgaagaggctcagaagcgcctcaagatggccgaggaagaccggaaggccatggtccctgagctgcggaagaaatctcgccgagagtacctggctaagcgggagcgagagaagcttgaggacctggaggcggagctggctgatgaggagttcctttttggggacgtggagctgagccggcacgagcggcaggagctcaaatataagcggcgagtgcgggatctcgcccgggagtaccgggcagctggggagcaggagaagctggaggccaccaatcgctaccacatgcccaaggaaacccgaggacagccagcccgagctgtggatctagtggaggaggaatcaggagcccctggggaggagcagcggcgctgggaggaggcgcggcttggggcagcgtccctgaagtttggggcccgagatgctgcctctcaggagcccaagtatcaactggtgctggaggaggaggagaccattgagtttgtccgggccactcagctccagggtgatgaggagccgtcagctccacccacttcaactcaggcccagcagaaagagtccatccaggccgtccgccgcagcctcccggtgttcccatttcgagaggagctcctggctgctattgcaaatcaccaagtcctcatcattgaaggcgagacaggctcagggaagaccacccagatcccgcagtatctctttgaggagggttatacaaacaagggtatgaagattgcctgcacccaaccccggagagtggctgccatgagtgtggccgcccgagtggcccgggagatgggtgtgaagcttgggaatgaggttggctacagcatccgctttgaggactgcacatcagagcgaactgtcctccgctacatgacagatgggatgcttctccgggagttcctctctgagcctgacctggcgagttacagcgtggtgatggtggatgaggcacacgaaaggaccctacacacagacattctctttggattgatcaaggatgttgctcgcttccgacctgagctcaaggtcctggtggcttcagccacaatggacactgcccgtttttccaccttctttgatggcgcccctgtgtttcgaatccccggacgcaggtttcctgtggacatcttctacaccaaggctccagaggctgactacttggaagcttgtgtagtatctgtgttgcagatccatgtgacccagccccctggggatatcctggtgttcctgacaggacaggaggagattgaggctgcctgtgagatgctccaggatcgctgccgccgcctgggctccaaaatccgggagctcctggtgctgcccatttatgccaatctgccctctgacatgcaggcccgtatcttccagcccacaccacctggggcacgaaaggtggttgtggcaacgaacattgctgagacatcactcaccattgagggcatcatttatgtgctggatccagggttctgtaagcagaagagctacaacccccgcacaggcatggaatcgctcactgtcacaccctgcagcaaggcctcagccaatcagcgagctggcagggcaggtcgggtggctgcagggaagtgcttccgcctgtataccgcctgggcctatcagcacgagcttgaggaaaccacagtgcctgagatccagaggaccagcttgggcaatgtcgtgttgctgctcaagagcttagggatccatgacctaatgcactttgatttcctggaccctccaccatatgagacactgctgctggctttggagcagctgtatgctctgggagccctcaaccaccttggggagctcaccacgtctggtcgaaagatggcagagctgccggtggaccccatgctgtccaaaatgatcttagcctctgagaagtacagctgttcagaggagatcctgacagtggctgccatgctctctgtcaacaactccatcttctaccgaccaaaggacaaggtcgtccatgctgacaatgcccgtgtcaacttctttctccctggcggtgaccacctggttctgctaaatgtttacacacagtgggctgagagtggttactcttcccagtggtgctatgagaactttgtacagttcagatcgatgcgccgagcccgggatgtgcgggaacagctggaagggctcttggaacgtgtggaagttggtctcagttcctgccagggggactatatccgtgtacgcaaggccatcactgctggttacttttaccacacggcacggttgactcggagtggctaccgcacagtgaaacagcagcagacagtcttcattcatcccaactcctccctctttgagcaacagccacgctggctgctctaccacgaacttgtcttgaccaccaaagagttcatgagacaggtactggagattgagagcagttggcttctggaggtggctccccattattataaggccaaggagctagaagatccccatgctaagaaaatgcccaaaaaaataggcaaaacacgagaagagctagggtaagagaaggacgtaaacagaacctgacaccagctccttttccttctatacattatttaatacctattaaataaaattatttttggaataaagcttgtgggaacatttgggatctagagaaagtga

SEQ ID NO: 7902 - DNA, 1933 bp, Homo sapiens; identical to SEQ ID NO: 7898
  source 1..1933: mol_type = unassigned DNA

SEQ ID NO: 7903 - DNA, 892 bp, Homo sapiens
  source 1..892: mol_type = unassigned DNA
tttgggatgtcggaagatcctagaggtcccaaggtaccacgaaaggcagtggtagaaaagccagctcgggcagcagagcgagaggcccgggccctgctggagaagaaccgatcttataggttactggaagacagtgaagagagcagtgaggagactgtgagtagggctggaagcagcctccagaagaaacgtaaaaagcggaaacacctcaggaagaagcgtgaggaagaagaggaggaagaggcttctgagaaagggaagaagaaaacaggggggagtaaacagcagacagagaagccagagtcggaagatgagtgggaacggacagagcgtgaacgccttcaggacctggaggagcgtgatgcctttgctgagcgggttcgacagcgggacaaggatcggactcgaaatgtcctggaacggtcagacaagaaggcttatgaagaggctcagaagcgcctcaagatggccgaggaagaccggaaggccatggtccctgagctgcggaagaaatctcgccgagagtacctggctaagcgggagcgagagaagcttgaggacctggaggcggagctggctgatgaggagttcctttttggggacgtggagctgagccggcacgagcggcaggagctcaaatataagcggcgagtgcgggatctcgcccgggagtaccgggcagctggggagcaggagaagctggaggccaccaatcgctaccacatgcccaaggaaacccgaggacagccagcccgagctgtggatctagtggaggaggaatcaggagcccctggggaggagcagcggcgctgggaggaggcgcggcttggggcagcgtccctgaagtttggggcccgagatgctgcctctcaggagcccaagtatcaactgg

SEQ ID NO: 7904 - DNA, 3445 bp, Homo sapiens; identical to SEQ ID NO: 7899
  source 1..3445: mol_type = unassigned DNA

SEQ ID NO: 7905 - DNA, 3445 bp, Homo sapiens; identical to SEQ ID NO: 7899
  source 1..3445: mol_type = unassigned DNA

SEQ ID NO: 7906 - DNA, 3445 bp, Homo sapiens; identical to SEQ ID NO: 7899
  source 1..3445: mol_type = unassigned DNA

SEQ ID NO: 7907 - DNA, 892 bp, Homo sapiens; identical to SEQ ID NO: 7903
  source 1..892: mol_type = unassigned DNA

SEQ ID NO: 7908 - DNA, 892 bp, Homo sapiens; identical to SEQ ID NO: 7903
  source 1..892: mol_type = unassigned DNA

SEQ ID NO: 7909 - DNA, 1933 bp, Homo sapiens; identical to SEQ ID NO: 7898
  source 1..1933: mol_type = unassigned DNA

SEQ ID NO: 7910 - DNA, 892 bp, Homo sapiens; identical to SEQ ID NO: 7903
  source 1..892: mol_type = unassigned DNA

SEQ ID NO: 7911 - DNA, 892 bp, Homo sapiens; identical to SEQ ID NO: 7903
  source 1..892: mol_type = unassigned DNA

SEQ ID NO: 7912 - DNA, 892 bp, Homo sapiens; identical to SEQ ID NO: 7903
  source 1..892: mol_type = unassigned DNA

SEQ ID NO: 7913 - DNA, 892 bp, Homo sapiens; identical to SEQ ID NO: 7903
  source 1..892: mol_type = unassigned DNA

SEQ ID NO: 7914 - DNA, 1933 bp, Homo sapiens; identical to SEQ ID NO: 7898
  source 1..1933: mol_type = unassigned DNA

SEQ ID NO: 7915 - DNA, 892 bp, Homo sapiens; identical to SEQ ID NO: 7903
  source 1..892: mol_type = unassigned DNA

SEQ ID NO: 7916 - DNA, 2203 bp, Homo sapiens
  source 1..2203: mol_type = unassigned DNA
ggccgaaaaagtacagccccttccgggctccgcggtacgggaagacagctttgggatgtcggaagatcctagaggtcccaaggtagctgacttgcgaagctgaggctccagccgagggctccaggcctctgaccggcccagcagtgagcgcggctgcccgacgcttcagggccgggagcagggagcgtgagtcgccatggcgacgccggcgggtctggagcgctgggttcaggacgagctgcactcggtgttggggctgagcgagcggcacgtcgcccagtttctgatcggtaccgcacagcgctgcacctctgccgaggagttcgtgcagcgcctacgagacactgataccttggatctcagtgggccggcccgggacttcgccctgagactctggaacaaggtaccacgaaaggcagtggtagaaaagccagctcgggcagcagagcgagaggcccgggccctgctggagaagaaccgatcttataggttactggaagacagtgaagagagcagtgaggagactgtgagtagggctggaagcagcctccagaagaaacgtaaaaagcggaaacacctcaggaagaagcgtgaggaagaagaggaggaagaggcttctgagaaagggaagaagaaaacaggggggagtaaacagcagacagagaagccagagtcggaagatgagtgggaacggacagagcgtgaacgccttcaggacctggaggagcgtgatgcctttgctgagcgggttcgacagcgggacaaggatcggactcgaaatgtcctggaacggtcagacaagaaggcttatgaagaggctcagaagcgcctcaagatggccgaggaagaccggaaggccatggtccctgagctgcggaagaaatctcgccgagagtacctggctaagcgggagcgagagaagcttgaggacctggaggcggagctggctgatgaggagttcctttttggggacgtggagctgagccggcacgagcggcaggagctcaaatataagcggcgagtgcgggatctcgcccgggagtaccgggcagctggggagcaggagaagctggaggccaccaatcgctaccacatgcccaaggaaacccgaggacagccagcccgagctgtggatctagtggaggaggaatcaggagcccctggggaggagcagcggcgctgggaggaggcgcggcttggggcagcgtccctgaagtttggggcccgagatgctgcctctcaggagcccaagtatcaactggtgctggaggaggaggagaccattgagtttgtccgggccactcagctccagggtgatgaggagccgtcagctccacccacttcaactcaggcccagcagaaagagtccatccaggccgtccgccgcagcctcccggtgttcccatttcgagaggagctcctggctgctattgcaaatcaccaagtcctcatcattgaaggcgagacaggctcagggaagaccacccagatcccgcagtatctctttgaggagggttatacaaacaagggtatgaagattgcctgcacccaaccccggagagtggctgccatgagtgtggccgcccgagtggcccgggagatgggtgtgaagcttgggaatgaggttggctacagcatccgctttgaggactgcacatcagagcgaactgtcctccgctacatgacagatgggatgcttctccgggagttcctctctgagcctgacctggcgagttacagcgtggtgatggtggatgaggcacacgaaaggaccctacacacagacattctctttggattgatcaaggatgttgctcgcttccgacctgagctcaaggtcctggtggcttcagccacaatggacactgcccgtttttccaccttctttgatgacgcccctgtgtttcgaatccccggacgcaggtttcctgtggacatcttctacaccaaggctccagaggctgactacttggaagcttgtgtagtatctgtgttgcagatccatgtgacccagccccctggggatatcctggtgttcctgacaggacaggaggagattgaggctgcctgtgagatgctccaggatcgctgccgccgcctgggctccaaaatccgggagctcctggtgctgcccatttatgccaatctgccctctgacatgcaggcccgtatcttccagcccacaccacctggggcacgaaag

SEQ ID NO: 7917 - DNA, 3445 bp, Homo sapiens; identical to SEQ ID NO: 7899
  source 1..3445: mol_type = unassigned DNA

SEQ ID NO: 7918 - DNA, 1933 bp, Homo sapiens; identical to SEQ ID NO: 7898
  source 1..1933: mol_type = unassigned DNA

SEQ ID NO: 7919 - DNA, 1933 bp, Homo sapiens; identical to SEQ ID NO: 7898
  source 1..1933: mol_type = unassigned DNA

SEQ ID NO: 7920 - DNA, 691 bp, Homo sapiens
  source 1..691: mol_type = unassigned DNA
ctgaacaatatgtgcctttttgactcttcagaggctgtgaatttctggtcttggaagatcacagtggagcaattggacagataggattttatccttcatatcccttgcaaaagatctctaagaacccatggagagccagccagcgcaagagtgtctgatgcagatgtttttgcccatcgagccagcctgctttgtggaatggctggggacttcaccatcacagttaggcgtggtgatggtggatgaggcacacgaaaggaccctacacacagacattctctttggattgatcaaggatgttgctcgcttccgacctgagctcaaggtcctggtggcttcagccacaatggacactgcccgtttttccaccttctttgatgacgcccctgtgtttcgaatccccggacgcaggtttcctgtggacatcttctacaccaaggctccagaggctgactacttggaagcttgtgtagtatctgtgttgcagatccatgtgacccagccccctggggatatcctggtgttcctgacaggacaggaggagattgaggctgcctgtgagatgctccaggatcgctgccgccgcctgggctccaaaatccgggagctcctggtgctgcccatttatgccaatctgccctctgacatgcaggcccgtatcttccagcccacaccacctggggcacgaaag

SEQ ID NO: 7921 - DNA, 3445 bp, Homo sapiens; identical to SEQ ID NO: 7899
  source 1..3445: mol_type = unassigned DNA

SEQ ID NO: 7922 - DNA, 576 bp, Homo sapiens
  source 1..576: mol_type = unassigned DNA
gaagatcctagaggtcccaaggtagctgacttgcgaagctgaggctccagccgagggctccaggcctctgaccggcccagcagtgagcgcggctgcccgacgcttcagggccgggagcagggagcgtgagtcgccatggcgacgccggcgggtctggagcgctgggttcaggacgagctgcactcggtgttggggctgagcgagcggcacgtcgcccagtttctgatcggtaccgcacagcgctgcacctctgccgaggagttcgtgcagcgcctacgagacactgataccttggatctcagtgggccggcccgggacttcgccctgagactctggaacaaggtaccacgaaaggcagtggtagaaaagccagctcgggcagcagagcgagaggcccgggccctgctggagaagaaccgatcttataggttactggaagacagtgaagagagcagtgaggagactgtgagtagggctggaagcagcctccagaagaaacgtaaaaagcggaaacacctcaggaagaagcgtgaggaagaagaggaggaagaggcttctgagaaagggaagaagaaa

SEQ ID NO: 7923 - DNA, 4502 bp, Homo sapiens
  source 1..4502: mol_type = unassigned DNA
aattgcgaggcagcggtcgccccggcccgagaagcccggatcgaagcgcagggtggcagccccggagccggggaatgtgaagagctctcggctgtgcagtggtaccgtcggggcctgggccgcgaaggatcttctgccacagctgcaacatgggcggcaagaacaagaaacacaaggctccagcggccgcggtggtccgggccgccgtgtctgcttccagagccaaatctgccgaggctggaattgccggggaggcccaaagcaagaagccagtgtccaggccggccaccgctgccgctgccgctgccggctccagggagccccgtgtcaagcaaggtccaaaaatttatagttttaattctacaaatgattctagtggtcctgcaaatctggataaatctattttgaaagtggtaattaataacaaactagagcaaagaattattggagtgatcaatgagcataaaaagcaaaataatgacaaaggaatgatttctggaagacttactgccaaaaaattgcaggatttatacatggctttacaagcattttcatttaagacaaaggacattgaagatgccatgaccaatacactcttatatggaggtgaccttcattctgccttggattggctctgtttaaacctttcagatgatgcacttcctgaaggattcagtcaggaatttgaagagcagcaacctaaaagtaggcctaaatttcagtctcctcaaatacaagccactatttcacctccattgcaacctaaaacaaaaacatatgaagaggaccctaagagtaagccaaaaaaggaagaaaaaaatatggaagtaaatatgaaagagtggattttacgatatgctgaacaacaaaatgaagaagaaaagaatgagaattctaaaagtttagaagaggaggaaaaatttgaccctaatgaaaggtacttacatcttgcagcaaaactgctggatgcaaaagaacaagcagctacctttaaactagaaaaaaacaagcaaggccaaaaagaggctcaggaaaaaataaggaaatttcaaagagaaatggaaactttagaagaccatccagtatttaacccagccatgaagatttcacatcaacaaaatgaaaggaaaaagcctcctgtagccacagaaggagaaagtgcattgaattttaatttatttgaaaaatctgcagctgctactgaagaagagaaagataaaaagaaagaacctcatgatgtaagaaattttgactatactgctcgaagttggactggaaaatctcccaaacaatttctgattgattgggtcaggaagaatcttcccaagagtccaaatccttcctttgaaaaagttccagtaggtagatactggaaatgtagggttagggtaatcaagtctgaagatgatgtcctggtagtatgccctacaatcttaacagaagatggcatgcaagctcagcacctgggagctactttagccctttaccgtttagttaaagggcagtcagttcatcagttacttcctcccacttaccgagatgtttggctggagtggagtgatgcagaaaagaaaagggaagaattaaataaaatggaaaccaataaaccacgtgatctttttattgccaaacttctgaataaactgaaacagcagcaacagcagcaacaacagcattctgaaaataagagagaaaactctgaagatcccgaggaatcttgggaaaatttagtttcggatgaggatttttctgcactgtccttggaatcagcaaatgtggaagatttggaacctgttagaaacctctttagaaagttgcaaagcacacctaagtatcagaaacttctaaaggaaagacaacagctacctgtatttaaacatcgggactcaattgttgaaactcttaaaaggcatcgggtagtggttgtggcaggtgaaacagggagtggtaaaagtactcaggtaccacattttctattggaagatttgcttctaaatgagtgggaagcaagtaaatgtaacattgtctgtacccaaccccgaagaatctcagcagttagtttagccaacagagtatgtgatgaattgggctgtgaaaatggacctggaggaaggaattccttgtgtggatatcagatccggatggaatctcgagcttgtgaatctaccaggttactctattgtacaacaggggttttgctaaggaaacttcaagaagatggtcttctaagtaatgtgtctcatgttattgtagatgaggttcatgaaagaagtgtccagtcagacttcctactaattatcttgaaggaaattttacagaaacgttctgatctacacttgattctaatgagtgccactgtggacagcgaaaaattttctacatatttcacacactgccccattctcagaatttcaggaagaagttatcctgttgaggtttttcatcttgaagatataatagaagaaacaggctttgtactggaaaaagactcagaatattgtcagaaatttctggaagaggaagaagaagtaaccattaatgttacaagcaaagcagggggaataaaaaaatatcaggaatacatcccagttcagactggagcacatgctgatttaaatccattttaccaaaagtacagcagccgcactcagcatgctattctatacatgaatcctcataaaatcaacctggatctcattttggaacttcttgcatacttagataaaagtccccaattcagaaatattgaaggagcagtattgatctttttaccaggacttgctcatattcagcagttgtatgatcttctatcaaatgatagaagattttattctgaacgatataaagtgatagctctgcattctattctttcaacccaagatcaagctgcagcattcacacttccccctccaggagtcaggaagattgttttagcaaccaatattgcagagacgggtatcactattcctgatgttgtatttgtaattgatactggaagaacaaaagaaaataagtaccatgaaagcagtcagatgagttctttggtggagacgtttgtcagtaaagccagtgctttgcagcgccagggaagagctgggcgggtcagagatggcttctgtttccgaatgtacacaagagaaagatttgaaggctttatggattattctgttcctgaaatcttacgtgtacctttggaggaattatgccttcatattatgaaatgtaatcttggttctcctgaagatttcctctccaaagccttagatcctcctcagctccaagtgatcagcaatgcaatgaatttgctccgaaaaattggagcttgtgaattaaatgagcctaaactgactccgttgggccaacaccttgcagctttacctgtgaatgtcaagattggcaagatgcttatttttggtgccatatttggctgccttgacccagtggcaacactagctgcagttatgacagagaagtctccttttaccacaccaattggtcgaaaagatgaagcagatcttgcaaaatcagctttggccatggcggattcagaccacctgacgatctacaatgcatatctaggatggaagaaagcacgacaagaaggaggttatcgttctgaaatcacatactgccggaggaactttcttaatagaacatcactgttaaccctagaggatgtaaagcaggagttaataaagttggttaaggcagcaggattttcatcttccacaacttctaccagctgggaaggaaacagagcctcacagaccctctcattccaagaaattgcccttcttaaagctgtactggtggctggactgtatgacaatgtggggaagataatctatacaaagtcagtggatgttacagaaaaattggcttgcattgtggagacggcccaaggcaaagcacaagtacacccatcctcagtaaatcgagatttgcaaactcatggatggctcttataccaggagaagataaggtatgccagagtgtatttgagagaaactaccctaataaccccttttccagttttactttttggtggtgatatagaagttcagcaccgagaacgtcttctttctattgatggctggatctattttcaggcccctgtaaagatagctgtcattttcaagcagctgagagttctcattgattcagttttaagaaaaaagcttgaaaatccaaagatgtcccttgaaaatgacaagattctgcagatcattacggaattgataaaaacagagaataactgaaactgaaattcatggtcaactgctttaaaaattaagatgaagatacagtcatgaaattatctgaaaatgggtcatcacattaagtatttcattacttaaaatgttggtactagccattaacttaaaggtggtgggaaaaaagcacatactttaaacatgtataattttctagttcctttttaatgatgattattctgaatgtatttgccactacatttacaataaattctttggtattatgca

SEQ ID NO: 7924 - DNA, 2827 bp, Homo sapiens
  source 1..2827: mol_type = unassigned DNA
aggcagagagcacgaggcccagtgcagaatcattttctgaaccagccaggaaataccggaacccaccaaactttaaacaccagcctaaattattcctgttcttttaagcaggcagcagaaatgacagaaacccgttaacagaaaaaaaaaaaataatgcttttcatttgaactcctgtgcattttctttttaacttatatgtgttcctaattttccttactctttttgtttgtttgtttcttagtgtggtttattgacaatcatttacaatgccgaagagtgctgtagtgagccagcacagtgggtaacacagcaacggagaacagatgcaggtttgaggaatttaacttgctaaaaccttgaactgaagtcttagagattggaacatacgggtttgtataaataggcttttaagccctgtttgcaatgggttactgataggagaaacttgcttgtggaatgtcagctgcgtgagctcactgtcagacaagatggaagaagaagggctggagtgtccaaactcttcctctgaaaaacgctattttcctgaatccctggattccagcgatggggatgaggaagaggttttggcctgtgaggatttggaacttaacccctttgatggattgccatattcatcacgttattataaacttctgaaagaaagagaagatcttcctatatggaaagaaaaatactcctttatggagaacctgcttcaaaatcaaatcgtgattgtttcaggagatgctaaatgtggtaagagcgctcaggttcctcagtggtgtgctgaatattgtctttccatccactaccagcacgggggcgtgatatgcacacaggtccacaagcagactgtggtccagctcgccctgcgggtggcggatgaaatggatgttaacattggtcatgaggttggctacgtgatccctttcgagaactgctgtaccaacgaaacaatcctgaggtattgtactgatgatatgctgcaaagagaaatgatgtccaatccttttttgggtagctatggggtcatcatcttagatgatattcatgaaagaagcattgcaactgatgtgttacttggacttcttaaagatgttttactagcaagaccagaactgaagctcataattaactcctcacctcacctgatcagcaaactcaattcttattatggaaacgtgcctgtcatagaagtgaaaaataaacaccctgtggaggttgtgtaccttagtgaggctcaaaaggattcttttgagtctattttacgccttatctttgaaattcaccactcgggtgagaaaggtgacattgtagtctttctggcctgtgaacaagtgtacaacccgagaataagagcaaactcgctcgtcatgcagcccatcagccagagccaggcagagatacgcaagcagattcttggctcatcttcttcaggaaaatttttctgcctgtacactgaagaatttgcctccaaagacatgacgccactgaagccagcagaaatgcaggaagccaacctaacaagcatggtgctttttatgaagaggatagacattgcgggcctaggccactgtgacttcatgaacagaccagcaccagaaagtttgatgcaggcattggaagacttagattatctggcagcactggataatgatggaaatctttctgaatttggaatcatcatgtcagagtttcctcttgatccacaactctcgaagtctatcttagcgtcctgtgaatttgactgtgtagatgaagtgctaacaatcgcagccatggtaacagctccaaattgcttttcacatgtgccacatggagctgaagaggctgccttgacttgttggaagacatttttacatcccgaaggagatcactttaccctcatcagcatttacaaggcttaccaagacacaactctgaattctagcagtgagtactgtgtggaaaagtggtgtcgtgattacttcctcaactgttcagcactcagaatggcagatgttattcgagctgaactcttagaaattatcaagcgaatcgagcttccctatgcagaacctgcttttggctccaaggaaaacactctaaacataaagaaagctcttctgtccggttactttatgcagattgctcgggatgttgatggatcaggtaactacttaatgctgacacataagcaggttgctcagctgcatcccctgtctggttactcaatcaccaagaagatgccagagtgggtcctcttccataaattcagcatttctgagaacaactacatcaggattacctcagaaatctctcctgaactatttatgcagctggtaccacaatactatttcagtaatctgcctcctagtgaaagtaaggacattctacagcaagtagtggatcacctatcccctgtgtcaacaatgaataaggaacagcaaatgtgtgagacgtgccctgaaactgaacagagatgcactctccagtgactccccagcaaacacaaggtgcagcagggtcccaaaggtagctggatggctgaactgctggatatgggagatacatgacgcgaagacggatttcacatccacaggacggtcttgaagaaaataacactgtgtatattattttaaaataaaaaatagaagtttttattgagttctttaaattactactccatgcttttcttcttcttggaaaagtttttaaatcaaccactcataatttgaccaaaattttaaaaaactggtattttgtaaatgtgtcagagacacatgggacagaaccctactttttgtagaggaacttaatctgaataaagtctgagtttttcagt

SEQ ID NO: 7925 - DNA, 3070 bp, Homo sapiens
  source 1..3070: mol_type = unassigned DNA
aggcagagagcacgaggcccagtgcagaatcattttctgaaccagccaggaaataccggaacccaccaaactttaaacaccagcctaaattattcctgttcttttaagcaggcagcagaaatgacagaaacccgttaacagaaaaaaaaaaaataatgcttttcatttgaactcctgtgcattttctttttaacttatatgtgttcctaattttccttactctttttgtttgtttgtttcttagtgtggtttattgacaatcatttacaatgccgaagagtgctgtagtgagccagcacagtgggtaacacagcaacggagaacagatgcaggtttgaggaatttaacttgctaaaaccttgaactgaagtcttagagattggaacatacgggtttgtataaataggcttttaagccctgtttgcaatgggttactgataggagaaacttgcttgtggaatgtcagctgcgtgagctcactgtcagacaagatggaagaagaagggctggagtgtccaaactcttcctctgaaaaacgctattttcctgaatccctggattccagcgatggggatgaggaagaggttttggcctgtgaggatttggaacttaacccctttgatggattgccatattcatcacgttattataaacttctgaaagaaagagaagatcttcctatatggaaagaaaaatactcctttatggagaacctgcttcaaaatcaaatcgtgattgtttcaggagatgctaaatgtggtaagagcgctcaggttcctcagtggtgtgctgaatattgtctttccatccactaccagcacgggggcgtgatatgcacacaggtccacaagcagactgtggtccagctcgccctgcgggtggcggatgaaatggatgttaacattggtcatgaggttggctacgtgatccctttcgagaactgctgtaccaacgaaacaatcctgaggtattgtactgatgatatgctgcaaagagaaatgatgtccaatccttttttgggtagctatggggtcatcatcttagatgatattcatgaaagaagcattgcaactgatgtgttacttggacttcttaaagatgttttactagcaagaccagaactgaagctcataattaactcctcacctcacctgatcagcaaactcaattcttattatggaaacgtgcctgtcatagaagtgaaaaataaacaccctgtggaggttgtgtaccttagtgaggctcaaaaggattcttttgagtctattttacgccttatctttgaaattcaccactcgggtgagaaaggtgacattgtagtctttctggcctgtgaacaagatattgagaaagtctgtgaaactgtctatcaaggatctaacctaaacccagatcttggagaactggtggttgttcctttgtatccaaaagagaaatgttcattgttcaagccactcgatgaaacagaaaaaagatgccaagtttatcaaagaagagtggtgttaactactagctctggagagtttttgatctggagcaactcagtcagatttgttatcgatgtgggtgtggaaagaagaaaggtgtacaacccgagaataagagcaaactcgctcgtcatgcagcccatcagccagagccaggcagagatacgcaagcagattcttggctcatcttcttcaggaaaatttttctgcctgtacactgaagaatttgcctccaaagacatgacgccactgaagccagcagaaatgcaggaagccaacctaacaagcatggtgctttttatgaagaggatagacattgcgggcctaggccactgtgacttcatgaacagaccagcaccagaaagtttgatgcaggcattggaagacttagattatctggcagcactggataatgatggaaatctttctgaatttggaatcatcatgtcagagtttcctcttgatccacaactctcgaagtctatcttagcgtcctgtgaatttgactgtgtagatgaagtgctaacaatcgcagccatggtaacagctccaaattgcttttcacatgtgccacatggagctgaagaggctgccttgacttgttggaagacatttttacatcccgaaggagatcactttaccctcatcagcatttacaaggcttaccaagacacaactctgaattctagcagtgagtactgtgtggaaaagtggtgtcgtgattacttcctcaactgttcagcactcagaatggcagatgttattcgagctgaactcttagaaattatcaagcgaatcgagcttccctatgcagaacctgcttttggctccaaggaaaacactctaaacataaagaaagctcttctgtccggttactttatgcagattgctcgggatgttgatggatcaggtaactacttaatgctgacacataagcaggttgctcagctgcatcccctgtctggttactcaatcaccaagaagatgccagagtgggtcctcttccataaattcagcatttctgagaacaactacatcaggattacctcagaaatctctcctgaactatttatgcagctggtaccacaatactatttcagtaatctgcctcctagtgaaagtaaggacattctacagcaagtagtggatcacctatcccctgtgtcaacaatgaataaggaacagcaaatgtgtgagacgtgccctgaaactgaacagagatgcactctccagtgactccccagcaaacacaaggtgcagcagggtcccaaaggtagctggatggctgaactgctggatatgggagatacatgacgcgaagacggatttcacatccacaggacggtcttgaagaaaataacactgtgtatattattttaaaataaaaaatagaagtttttattgagttctttaaattactactccatgcttttcttcttcttggaaaagtttttaaatcaaccactcataatttgaccaaaattttaaaaaactggtattttgtaaatgtgtcagagacacatgggacagaaccctactttttgtagaggaacttaatctgaataaagtctgagtttttcagt

SEQ ID NO: 7926 - DNA, 2389 bp, Homo sapiens
  source 1..2389: mol_type = unassigned DNA
gttctcattattccaattggcaagttttcactcattaggatcaacagccatgctgtttgcttggtaaaaaatctgccccaagtaattcaattatatgtggaaaaaggaagtgcaagcaagggaccgtacctgtgtaccagctgatgtgggaccccctggagcggcctctgcccagcttcctgggagccacttagcagaccaggaaacgagcacagctcacctagttctcagtgacctgtgataccttgctatttttctagatggatctgtcttcctacaaaacccttgagttaattcaatcccattctacaaatggtatggaaaggaaagagacataagctagagacctagagaatggaattgagctgtaaaaactatggcagttgtgggaagtcatcttttttacttagatttttagtgaaatctaacaaaattaaatgggaaaacaatataaattatatttaacttccccaaagacgttttctcatttaggtgcatctttacttatttaaagatacatgtaggcagcaacacagggatttctttccctgtatctgttacgtagtattgcctaaaattttttgtaattcagacatttttttaatagtgatgttgtttgcattgtattttattttcatgggtttttttttctttaggatattgagaaagtctgtgaaactgtctatcaaggatctaacctaaacccagatcttggagaactggtggttgttcctttgtatccaaaagagaaatgttcattgttcaagccactcgatgaaacagaaaaaagatgccaagtttatcaaagaagagtggtgttaactactagctctggagagtttttgatctggagcaactcagtcagatttgttatcgatgtgggtgtggaaagaagaaaggtgtacaacccgagaataagagcaaactcgctcgtcatgcagcccatcagccagagccaggcagagatacgcaagcagattcttggctcatcttcttcaggaaaatttttctgcctgtacactgaagaatttgcctccaaagacatgacgccactgaagccagcagaaatgcaggaagccaacctaacaagcatggtgctttttatgaagaggatagacattgcgggcctaggccactgtgacttcatgaacagaccagcaccagaaagtttgatgcaggcattggaagacttagattatctggcagcactggataatgatggaaatctttctgaatttggaatcatcatgtcagagtttcctcttgatccacaactctcgaagtctatcttagcgtcctgtgaatttgactgtgtagatgaagtgctaacaatcgcagccatggtaacagctccaaattgcttttcacatgtgccacatggagctgaagaggctgccttgacttgttggaagacatttttacatcccgaaggagatcactttaccctcatcagcatttacaaggcttaccaagacacaactctgaattctagcagtgagtactgtgtggaaaagtggtgtcgtgattacttcctcaactgttcagcactcagaatggcagatgttattcgagctgaactcttagaaattatcaagcgaatcgagcttccctatgcagaacctgcttttggctccaaggaaaacactctaaacataaagaaagctcttctgtccggttactttatgcagattgctcgggatgttgatggatcaggtaactacttaatgctgacacataagcaggttgctcagctgcatcccctgtctggttactcaatcaccaagaagatgccagagtgggtcctcttccataaattcagcatttctgagaacaactacatcaggattacctcagaaatctctcctgaactatttatgcagctggtaccacaatactatttcagtaatctgcctcctagtgaaagtaaggacattctacagcaagtagtggatcacctatcccctgtgtcaacaatgaataaggaacagcaaatgtgtgagacgtgccctgaaactgaacagagatgcactctccagtgactccccagcaaacacaaggtgcagcagggtcccaaaggtagctggatggctgaactgctggatatgggagatacatgacgcgaagacggatttcacatccacaggacggtcttgaagaaaataacactgtgtatattattttaaaataaaaaatagaagtttttattgagttctttaaattactactccatgcttttcttcttcttggaaaagtttttaaatcaaccactcataatttgaccaaaattttaaaaaactggtattttgtaaatgtgtcagagacacatgggacagaaccctactttttgtagaggaacttaatctgaataaagtctgagtttttcagtaaa

SEQ ID NO: 7927 - DNA, 803 bp, Homo sapiens
  source 1..803: mol_type = unassigned DNA
ggccaggtcaccggctgaggacactgctcctgaagcccggtcaggcggtcgcgccctccctggcggcccccgcggccccgcaggacctgtgccccgacgtcgccgacccgcggtccccgctgtcgccgacccgcggcgtccgtcgggcgagtgggcctgcccgcgggtaaggcgccggccctgggccgccctcccgggaatcgggagccgccgctgcagtgtggtttattgacaatcatttacaatgccgaagagtgctgtagtgagccagcacagtgggtaacacagcaacggagaacagatgcaggtttgaggaatttaacttgctaaaaccttgaactgaagtcttagagattggaacatacgggtttgtataaataggcttttaagccctgtttgcaatgggttactgataggagaaacttgcttgtggaatgtcagctgcgtgagctcactgtcagacaagatggaagaagaagggctggagtgtccaaactcttcctctgaaaaacgctattttcctgaatccctggattccagcgatggggatgaggaagaggttttggcctgtgaggatttggaacttaacccctttgatggattgccatattcatcacgttattataaacttctgaaagaaagagaagatcttcctatatggaaagaaaaatactcctttatggagaacctgcttcaaaatcaaatcgtgattgtttcaggagatgctaaatgtggtaagagcgctcaggttcctcagtggtgtgctgaatattgtctttccatccactaccagcacgggggcg

SEQ ID NO: 7928 - DNA, 5419 bp, Homo sapiens
  source 1..5419: mol_type = unassigned DNA
acatgccggaggaggcgggcttcccgccggccaagagattccggccaggctctggacctccgagccgcgctgggtccttccctcccgggaggcaagtggtgatgctgctgactgcgggcagcggcggcagaggaggaggaggaggccggaggcagcagccgcccctggcccagccctcggccagtccctaccctgaagctgtggagctgcagcgccggagtctgcccatcttccaagcgcgggggcaactgttggcccagctccgaaacctggacaacgcggtcctcatcggggaaactggctctgggaagacaactcagatccctcagtacctgtatgaaggagggatcagccgccagggcatcattgctgtgacccagcctcgtcgagtagctgccatctctcttgctactagagtctcagatgagaagagaactgaacttgggaagctggttggctatacagtgcgctttgatgatgtcacctcagaagacaccaggatcaagtttctgacagatggcatgcttctgcgtgaagcaatttcagactctttgcttcggaaatacagctgtgtcattttggatgaagctcacgaacggactatccacacagatgtgctctttggagtggtgaaagctgcacagaagaggagaaaggaactcgggaaacttcctctgaaagtgattgtgatgtcagctacgatggatgtggacctgttctctcagtatttcaatggcgcccccgtcctctacctagagggtcggcagcatccgatccaggtgttttacaccaaacagcctcagaatgattacctgcacgccgcgcttgtctccgtcttccagatccaccaggaagccccttcttcacaggacatcctggtgttcctcactgggcaggaggagatcgaagccatgagcaagacgtgccgagacattgcaaagcacctcccagacggctgccctgcgatgctggtccttcctctgtacgcctccctgccctatgcacagcagctccgagtcttccaaggggccccaaagggctatcgcaaagtgatcatttcaaccaacatcgctgaaacctccataaccattacaggaataaaatatgtagttgacacgggcatggttaaagcaaagaagtataaccctgacagtggtcttgaggtgttagcagtgcagcgggtatcgaagacgcaggcttggcagcgcacagggagggctggcagagaggacagtggcatctgctaccggctctacacggaggacgagtttgagaagtttgataagatgaccgtgccagagatccagaggtgtaacctggccagtgtgatgcttcagcttctagcaatgaaagtcccaaatgtgctcacctttgacttcatgtcgaagccatctccagatcacattcaggcggccattgcccaactggacctgttaggtgctcttgaacataaggatgaccagcttaccctgactccaatgggaagaaagatggcagcatttcctttagaacccaaatttgccaaaaccatcctcatgtcccccaaattccactgtacagaggagatcctgaccattgtctccctgctgtctgtggacagcgtcctccacaaccctccttcccggcgagaggaagtgcaaggggtccgcaagaagttcatatccagcgagggggatcacatgaccctgctcaatatctatcggaccttcaaaaacctaggcggaaataaggattggtgcaaagagaattttgtcaacagcaagaatatgacgctggtagcagaagtcagagcacagctgagggacatctgcttaaagatgtcaatgccaatcgcatcatcccgaggagacgtggagagtgtccgccgctgcctggctcacagcctcttcatgagcaccgccgagcttcagccagatggcacctatgccaccacggacacccaccagccagtggccatccacccgtcgtctgtcctcttccactgcaagccggcctgcgtcgtgtacactgagctgctctacaccaacaagtgctacatgcgggacctctgcgtcatagatgcacagtggctgtacgaggctgcccctgagtactttaggaggaagctgagaaccgccagaaactgagccgccccaggatgccgccagaatcactggtccctgggagcttggactacagttgtccttacagcaggcttccaggttggcgcttagagaagccttggaatcagctgaaggtgcctgacttccaggagcgtgaaagcatctttgctcaactcctgggactgaaccatatagacatggacatatcatttgtacctggaaacctcaaaattatgcttttggttcttactgggtgactttgacttaatttaacacctgagcctcagttttctcatctgccaaatgggagtaataataataatccttataaaattgggttcataaagtttagagaaaaggaatggaaagtacccagaactatgcctggagcacgcacgacacacgtacagtgagttgggagccgttaggctgaatgttactgcttgccatatgatgtgaagtacagcaatatcccaagttcttgtgactgagggagattttctggaagggccacaggaggttgcggagcttggatgttgcccttagttcttgtttaatgtctctctgaatgcagttttaaaatagaaaacaaaactgacttctgtagaagtttccagagggaggtgctgttatctcgtacctcctgggatggcgatccctactgaacgcttgtgtctcagggtggaccactctgtgtctgtctccaagcagagaccagtaaaggagcctcctggtcctcagtgcgtgaccctgtcagtgctttcaggagacatgtaagcttcctgggtgaaggttgatttgtaccttctgaatcctgtcacgtgtagacatgggaaactgacctatcagtgttttgtgtgtgtaggtgactcccacatacacagttgccatttttctctctaactgggcaccagtgaacatgcgggcatgaggagtgactgtgtaccatttcagctgtttcttttcgggcagtcccctggtcagagggggtgggggtgggggaggggagaggggtacctagaacccagagaacattggcttatgccagataccacaccacatctgggcttacattcttgtatcttttttggtgtgtgggcggggggggtggggggcagttcagtgaagtctagaagacctgctggacaaattctaaaagagctagagctgtaacacttattcttgcatcttattaattttctatgatattttttccttcttcgtagggacttgggacaatctggctttgctgctttctaactgctaggcacctctctctaaccctcattgtcagagggaattggaggatatccacagtctgttcctgttctgatattctgagcagagaaaaggcactaacggttcctcttagctatttaattatcagaagcaagtaatctttccccagataatattttgccctagaagaagccgtgatttagctcttttattgtgcttacttggtccaaatacatctgtggggtgttttgtcatttcttaatgaatgaatcatagttataaccaggggccaagctgcccaagaggctcttcagagatcatggatgctctctttctggaagctgtggcctgatggagcagccccattccagggtcccatctgtccggagttgtgtatgtcaagtccggctcagtctttatttccaacactagccgtggtcctgtgcagtcaagctctcagctagtgtttagggctgtctgtcagaaatggttatacgtgggcaaaagaagatctgacagctcctatataccttatcttactgaattcttaaactttgaaccagttcttccacttactgacttgttaccactgctgactttctgaaaagttttccagtttttgttttttgttttttgttttccagtaggggattagaatgtttagtcctacttagtaagaaaaatattgtatttttaatcattcatagtgctggtaaaaaaaaaaaaaaaaaaaaaaaaattggggggtggccgggcgcagtggctcacacctgtaatcccagcactttgggaggccaaggcgggcggatcacctcatgcctgtaatcccagcattgggatgggaggctgaggtgggtggattgcttgagaagttcaagaccagcctggccaacatggcaaaaccccgtctctactaaaaatagaaaacttagctgggcatggtggcacacgcctgtaatcccagctaccggggaggctgaggcacaagaattgcttgaacttgggaggcagagtttgtagtgagccaagatcacgccactgcattccagcctggccgacagtgtgagacggtctcagaaaaaaaaagaaagaaagaaagaaaaagaaaaaacttggggtaatttatgtccagcttaagtacctgaacagtttccggaaatgtatattttttttctgagaggcaaaggatgtaaacagcttctaagtagctttaatgtttctgtacagaaataagtttatccctgtaacattgtggtagagttttaatacagtatttagttttttattgggcttttttaaaaagttaacttttaacatagctgctcagggattaaatcagattggaaaacccattctgactccacatactgctacaaagaaatacatcgttgtttatattgagctgcaggagatagtacactttaaacttaagaaagttaaatgtttcacaataacattgcaatataatcttcagctactctctttccattggtaaaatctctgatggtgtgataactctttgccaacctacgaaacccatatctggaagaatcaccagctcccgtgagcagcttcatgtaaatagatgcactccaagcagattgcatgcctcaggtgtttgtcttctagtaatcatggagtgtgcaacacccagagtaacactacaaggggcaggactgcaaacagcaggtcctggctaaaaacccttaatgctgcattgctgccagttgtaaagagatgcctgaatggaggcaagttctgccctgtgggtgaaactgatgatgtactgtactgtcatatataaatccactaaatccagctaccaggaactgcctggaactgtggccatgcatttttttttttctttaaagaccagtgtgatagtaggccatgcatctgagatacgatattccttggtaactagagggagaaaaaaaaatcaagtaggttcaggcttatgttgtattttgagagtctggttttatttgaacagaaataactctacagaaagctcttgtaaataatgctcaaatttgcacccgacgatcaaatccattaaaaatgaatcttgtatatga

SEQ ID NO: 7929 - DNA, 2224 bp, Homo sapiens
  source 1..2224: mol_type = unassigned DNA
ctgagagggggcaggagctctcggcgcttgcgcctcccgccgcggtgccctcccgacatgccggaggaggcgggcttcccgccggccaagagattccggccaggctctggacctccgagccgcgctgggtccttccctcccgggaggcaagtggtgatgctgctgactgcgggcagcggcggcagaggaggaggaggaggccggaggcagcagccgcccctggcccagccctcggccagtccctaccctgaagctgtggagctgcagcgccggagtctgcccatcttccaagcgcgggggcaactgttggcccagctccgaaacctggacaacgcggtcctcatcggaagccccttcttcacaggacatcctggtgttcctcactgggcaggaggagatcgaagccatgagcaagacgtgccgagacattgcaaagcacctcccagacggctgccctgcgatgctggtccttcctctgtacgcctccctgccctatgcacagcagctccgagtcttccaaggggccccaaagacagtggtcttgaggtgttagcagtgcagcgggtatcgaagacgcaggcttggcagcgcacagggagggctggcagagaggacagtggcatctgctaccggctctacacggaggacgagtttgagaagtttgataagatgaccgtgccagagatccagaggtgtaacctggccagtgtgatgcttcagcttctagcaatgaaagtcccaaatgtgctcacctttgacttcatgtcgaagccatctccagatcacattcaggcggccattgcccaactggacctgttaggtgctcttgaacataaggatgaccagcttaccctgactccaatgggaagaaagatggcagcatttcctttagaacccaaatttgccaaaaccatcctcatgtcccccaaattccactgtacagaggagatcctgaccattgtctccctgctgtctgtggacagcgtcctccacaaccctccttcccggcgagaggaagtgcaaggggtccgcaagaagttcatatccagcgagggggatcacatgaccctgctcaatatctatcggaccttcaaaaacctaggcggaaataaggattggtgcaaagagaattttgtcaacagcaagaatatgacgctggtagcagaagtcagagcacagctgagggacatctgcttaaagatgtcaatgccaatcgcatcatcccgaggagacgtggagagtgtccgccgctgcctggctcacagcctcttcatgagcaccgccgagcttcagccagatggcacctatgccaccacggacacccaccagccagtggccatccacccgtcgtctgtcctcttccactgcaagccggcctgcgtcgtgtacactgagctgctctacaccaacaagtgctacatgcgggacctctgcgtcatagatgcacagtggctgtacgaggctgcccctgagtactttaggaggaagctgagaaccgccagaaactgagccgccccaggatgccgccagaatcactggtccctgggagcttggactacagttgtccttacagcaggcttccaggttggcgcttagagaagccttggaatcagctgaaggtgcctgacttccaggagcgtgaaagcatctttgctcaactcctgggactgaaccatatagacatggacatatcatttgtacctggaaacctcaaaattatgcttttggttcttactgggtgactttgacttaatttaacacctgagcctcagttttctcatctgccaaatgggagtaataataataatccttataaaattgggttcataaagtttagagaaaaggaatggaaagtacccagaactatgcctggagcacgcacgacacacgtacagtgagttgggagccgttaggctgaatgttactgcttgccatatgatgtgaagtacagcaatatcccaagttcttgtgactgagggagattttctggaagggccacaggaggttgcggagcttggatgttgcccttagttcttgtttaatgtctctctgaatgcagttttaaaatagaaaacaaaactgacttctgtagaagtttccagagggaggtgctgttatctcgtacctcctgggatggcgatccctactgaacgcttgtgtctcagggtggaccactctgtgtctgtctccaagcagagaccagtaaaggagcctcctggtcctc

SEQ ID NO: 7930 - DNA, 3487 bp, Homo sapiens
  source 1..3487: mol_type = unassigned DNA
ttccagcggttgctggttctgacgggttgtagtctgccaggacaatgagttatgactaccatcagaactggggccgtgatgggggtccccgcagctccggtgggggctatggaggggggccagcagggggtcatggaggtaaccgaggctccggaggaggcggcggcggcggagggggtggtcgaggcggcaggggccggcatcccgggcacctgaaaggccgcgaaatcggcatgtggtacgcgaaaaaacaggggcagaagaacaaggaagcggagaggcaagagagagctgtagtacacatggatgaacgacgagaagaacaaattgtacagttactgaattctgttcaagcgaagaatgataaagagtcagaagcacagatatcctggtttgctcctgaggatcatggatacggtactgaagtttctactaagaacacaccatgctcagagaacaaacttgacatccaggaaaagaagttgataaatcaagaaaaaaaaatgtttagaatcaggaacagatcatatattgaccgagattctgagtatctcttgcaagaaaatgaaccagatggaactttagaccaaaaattattggaagatttacaaaagaaaaaaaatgaccttcggtatattgaaatgcagcatttcagagaaaagctgccttcgtatggaatgcaaaaggaattggtaaatttaattgataaccatcaggtaacagtaataagtggtgaaactggttgtggcaaaaccactcaagttactcagttcattttggataactacattgaaagaggaaaaggatctgcttgcagaatagtttgtactcagccaagaagaattagtgccatttcagttgcggaaagagtagctgcagaaagggcagaatcttgtggcagtggtaatagtactggatatcaaattcgtctccagagtcggttgccaaggaaacagggttctatcttatactgtacaacaggaatcatccttcagtggctccagtcagacccgtatttgtccagtgttagtcatatcgtacttgatgaaatccatgaaagaaatctgcagtcagatgttttaatgactgttgttaaagaccttctcaattttcgatctgacttgaaagtaatattgatgagtgcaacattgaatgcagaaaagttttcagaatattttggtaactgtccaatgatacatatacctggttttacctttccggttgtggaatatcttttggaagatgtaattgaaaaaataaggtatgttccagaacaaaaagaacacagatcccagtttaagaggggtttcatgcaagggcatgtaaatagacaagaaaaagaagaaaaagaagcaatatataaagaacgttggccagattatgtaagggaactgcgaagaaggtattctgcaagtactgtagatgttatagaaatgatggaggatgataaagttgatctgaatttgattgttgccctcatccgatacattgttttggaagaagaggatggtgcgatactggtctttctgccaggctgggacaatatcagcactttacatgatctcttgatgtcacaagtaatgtttaaatcagataaatttttaattatacctttacattcactgatgcctacagttaaccagacacaggtgtttaaaagaacccctcctggtgttcggaaaatagtaattgctaccaacattgcggagactagcattaccatagatgatgtcgtttatgtgatagatggaggaaaaataaaagagacgcattttgatactcagaacaatatcagtacaatgtccgctgagtgggttagtaaagctaatgccaaacagagaaaaggtcgagctggaagagttcaacctggtcattgctatcatctgtataatggtcttagagcaagtcttctagatgactatcaactgccagaaattttgagaactcctttggaagaactttgtttacaaataaagattttaaggctaggtggaattgcttattttctgagtagattaatggacccaccatcaaatgaggcagtgttactctccataagacacctgatggagctgaacgctttggataaacaagaagaattgacacctcttggagtccacttggcacgattacccgttgagccacatattggaaaaatgattctttttggagcactgttctgctgcttagacccagtactcactattgctgctagtctcagtttcaaagatccatttgtcattccactgggctgggaagaggctaggcgacgtggtttcagatacgaaaaggactattgctgggaatattttctgtcttcaaacacactgcagatgctgcataacatgaaaggacagtttgctgagcatcttcttggagctggatttgtaagcagtagaaatcctaaagatccagaatctaatataaattcagataatgagaagataattaaagctgtcatctgtgctggtttatatcccaaagttgctaaaattcgactaaatttgggtaaaaaaagaaaaatggtaaaagtttacacaaaaaccgatggcctggttgctgttcatcctaaatctgttaatgtggagcaaacagactttcactacaactggcttatctatcacctaaagatgagaacaagcagtatatacttgtatgactgcacagaggtttccccatactgtctcttgttttttggaggtgacatttccatccagaaggataacgatcaggaaactattgctgtagatgagtggattgtatttcagtctccagcaagaattgcccatcttgttaaggaattaagaaaggaactagatattcttctgcaagagaagattgaaagtcctcatcctgtagactggaatgacactaaatccagagactgtgcagtactgtcagctattatagacttgatcaaaacacaggaaaaggcaactcccaggaactttccgccacgattccaggatggatattacagctgacagcttttcaggggtggtctgaaaagccagtttgacagccattcttcatcattgtttaaattttggctggatgccaaaccctgggacatgaacaattttcatgtgtaaggtagaagccttcagtaggtagtaaagacttaatgtgcatgacttgatgttatatgtagagatatatatatatatatatatataccataaaagcaatatgttctctgatcatatactctgctgtggtcatgcccactctttgggagtatattccctttatatatattgagtattgtaccacttgagaaattcctttgttctgttatacaaaattaatctttctgctcataatgattgatgataccaccagtaaaaataggatgtttaccccaaaacaagtgtcaattaagaatttgaacacaaccacattttttaaaatgaaacttctatcggaagtaaattaatttgttgtaataaagtccagtatttaataaaatgtacaatgttaaatctca

SEQ ID NO: 7931 - DNA, 2985 bp, Homo sapiens
  source 1..2985: mol_type = unassigned DNA
atgagttatgactaccatcagaactggggccgtgatgggggtccccgcagctccggtgggggctatggaggggggccagcagggggtcatggaggtaaccgaggctccggaggaggcggcggcggcggagggggtggtcgaggcggcaggggccggcatcccgggcacctgaaaggccgcgaaatcggcatgtggtacgcgaaaaaacaggggcagaagaacaaggaagcggagaggcaagagagagctgtagtacacatggatgaacgacgagaagaacaaattgtacagttactgaattctgttcaagcgaagaatgataaagagtcagaagcacagatatcctggtttgctcctgaggatcatggatacggtactgaagtttctactaagaacacaccatgctcagagaacaaacttgacatccaggaaaagaagttgataaatcaagaaaaaaaaatgtttagaatcaggaacagatcatatattgaccgagattctgagtatctcttgcaagaaaatgaaccagatggaactttagaccaaaaattattggaagatttacaaaagaaaaaaaatgaccttcggtatattgaaatgcagcatttcagagaaaagctgccttcgtatggaatgcaaaaggaattggtaaatttaattgataaccatcaggtaacagtaataagtggtgaaactggttgtggcaaaaccactcaagttactcagttcattttggataactacattgaaagaggaaaaggatctgcttgcagaatagtttgtactcagccaagaagaattagtgccatttcagttgcggaaagagtagctgcagaaagggcagaatcttgtggcagtggtaatagtactggatatcaaattcgtctccagagtcggttgccaaggaaacagggttctatcttatactgtacaacaggaatcatccttcagtggctccagtcagacccgtatttgtccagtgttagtcatatcgtacttgatgaaatccatgaaagaaatctgcagtcagatgttttaatgactgttgttaaagaccttctcaattttcgatctgacttgaaagtaatattgatgagtgcaacattgaatgcagaaaagttttcagaatattttggtaactgtccaatgatacatatacctggttttacctttccggttgtggaatatcttttggaagatgtaattgaaaaaataaggtatgttccagaacaaaaagaacacagatcccagtttaagaggggtttcatgcaagggcatgtaaatagacaagaaaaagaagaaaaagaagcaatatataaagaacgttggccagattatgtaagggaactgcgaagaaggtattctgcaagtactgtagatgttatagaaatgatggaggatgataaagttgatctgaatttgattgttgccctcatccgatacattgttttggaagaagaggatggtgcgatactggtctttctgccaggctgggacaatatcagcactttacatgatctcttgatgtcacaagtaatgtttaaatcagttaaccagacacaggtgtttaaaagaacccctcctggtgttcggaaaatagtaattgctaccaacattgcggagactagcattaccatagatgatgtcgtttatgtgatagatggaggaaaaataaaagagacgcattttgatactcagaacaatatcagtacaatgtccgctgagtgggttagtaaagctaatgccaaacagagaaaaggtcgagctggaagagttcaacctggtcattgctatcatctgtataatggtcttagagcaagtcttctagatgactatcaactgccagaaattttgagaactcctttggaagaactttgtttacaaataaagattttaaggctaggtggaattgcttattttctgagtagattaatggacccaccatcaaatgaggcagtgttactctccataagacacctgatggagctgaacgctttggataaacaagaagaattgacacctcttggagtccacttggcacgattacccgttgagccacatattggaaaaatgattctttttggagcactgttctgctgcttagacccagtactcactattgctgctagtctcagtttcaaagatccatttgtcattccactgggaaaagaaaagattgcagatgcaagaagaaaggaattggcaaaggatactagaagtgatcacttaacagttgtgaatgcgtttgagggctgggaagaggctaggcgacgtggtttcagatacgaaaaggactattgctgggaatattttctgtcttcaaacacactgcagatgctgcataacatgaaaggacagtttgctgagcatcttcttggagctggatttgtaagcagtagaaatcctaaagatccagaatctaatataaattcagataatgagaagataattaaagctgtcatctgtgctggtttatatcccaaagttgctaaaattcgactaaatttgggtaaaaaaagaaaaatggtaaaagtttacacaaaaaccgatggcctggttgctgttcatcctaaatctgttaatgtggagcaaacagactttcactacaactggcttatctatcacctaaagatgagaacaagcagtatatacttgtatgactgcacagaggtttccccatactgtctcttgttttttggaggtgacatttccatccagaaggataacgatcaggaaactattgctgtagatgagtggattgtatttcagtctccagcaagaattgcccatcttgttaaggaattaagaaaggaactagatattcttctgcaagagaagattgaaagtcctcatcctgtagactggaatgacactaaatccagagactgtgcagtactgtcagctattatagacttgatcaaaacacaggaaaaggcaactcccaggaactttccgccacgattccaggatggatattacagctga

SEQ ID NO: 7932 - DNA, 6733 bp, Homo sapiens
  source 1..6733: mol_type = unassigned DNA
aagtgggcgcacagtggcttccgggcccggacgccatttccagcggttgctggttctgacgggttgtagtctgccaggacaatgagttatgactaccatcagaactggggccgtgatgggggtccccgcagctccggtgggggctatggaggggggccagcagggggtcatggaggtaaccgaggctccggaggaggcggcggcggcggagggggtggtcgaggcggcaggggccggcatcccgggcacctgaaaggccgcgaaatcggcatgtggtacgcgaaaaaacaggggcagaagaacaaggaagcggagaggcaagagagagctgtagtacacatggatgaacgacgagaagaacaaattgtacagttactgaattctgttcaagcgaagaatgataaagagtcagaagcacagatatcctggtttgctcctgaggatcatggatacggtactgaagtttctactaagaacacaccatgctcagagaacaaacttgacatccaggaaaagaagttgataaatcaagaaaaaaaaatgtttagaatcaggaacagatcatatattgaccgagattctgagtatctcttgcaagaaaatgaaccagatggaactttagaccaaaaattattggaagatttacaaaagaaaaaaaatgaccttcggtatattgaaatgcagcatttcagagaaaagctgccttcgtatggaatgcaaaaggaattggtaaatttaattgataaccatcaggtaacagtaataagtggtgaaactggttgtggcaaaaccactcaagttactcagttcattttggataactacattgaaagaggaaaaggatctgcttgcagaatagtttgtactcagccaagaagaattagtgccatttcagttgcggaaagagtagctgcagaaagggcagaatcttgtggcagtggtaatagtactggatatcaaattcgtctccagagtcggttgccaaggaaacagggttctatcttatactgtacaacaggaatcatccttcagtggctccagtcagacccgtatttgtccagtgttagtcatatcgtacttgatgaaatccatgaaagaaatctgcagtcagatgttttaatgactgttgttaaagaccttctcaattttcgatctgacttgaaagtaatattgatgagtgcaacattgaatgcagaaaagttttcagaatattttggtaactgtccaatgatacatatacctggttttacctttccggttgtggaatatcttttggaagatgtaattgaaaaaataaggtatgttccagaacaaaaagaacacagatcccagtttaagaggggtttcatgcaagggcatgtaaatagacaagaaaaagaagaaaaagaagcaatatataaagaacgttggccagattatgtaagggaactgcgaagaaggtattctgcaagtactgtagatgttatagaaatgatggaggatgataaagttgatctgaatttgattgttgccctcatccgatacattgttttggaagaagaggatggtgcgatactggtctttctgccaggctgggacaatatcagcactttacatgatctcttgatgtcacaagtaatgtttaaatcagataaatttttaattatacctttacattcactgatgcctacagttaaccagacacaggtgtttaaaagaacccctcctggtgttcggaaaatagtaattgctaccaacattgcggagactagcattaccatagatgatgtcgtttatgtgatagatggaggaaaaataaaagagacgcattttgatactcagaacaatatcagtacaatgtccgctgagtgggttagtaaagctaatgccaaacagagaaaaggtcgagctggaagagttcaacctggtcattgctatcatctgtataatggtcttagagcaagtcttctagatgactatcaactgccagaaattttgagaactcctttggaagaactttgtttacaaataaagattttaaggctaggtggaattgcttattttctgagtagattaatggacccaccatcaaatgaggcagtgttactctccataagacacctgatggagctgaacgctttggataaacaagaagaattgacacctcttggagtccacttggcacgattacccgttgagccacatattggaaaaatgattctttttggagcactgttctgctgcttagacccagtactcactattgctgctagtctcagtttcaaagatccatttgtcattccactgggaaaagaaaagattgcagatgcaagaagaaaggaattggcaaaggatactagaagtgatcacttaacagttgtgaatgcgtttgagggctgggaagaggctaggcgacgtggtttcagatacgaaaaggactattgctgggaatattttctgtcttcaaacacactgcagatgctgcataacatgaaaggacagtttgctgagcatcttcttggagctggatttgtaagcagtagaaatcctaaagatccagaatctaatataaattcagataatgagaagataattaaagctgtcatctgtgctggtttatatcccaaagttgctaaaattcgactaaatttgggtaaaaaaagaaaaatggtaaaagtttacacaaaaaccgatggcctggttgctgttcatcctaaatctgttaatgtggagcaaacagactttcactacaactggcttatctatcacctaaagatgagaacaagcagtatatacttgtatgactgcacagaggtttccccatactgtctcttgttttttggaggtgacatttccatccagaaggataacgatcaggaaactattgctgtagatgagtggattgtatttcagtctccagcaagaattgcccatcttgttaaggaattaagaaaggaactagatattcttctgcaagagaagattgaaagtcctcatcctgtagactggaatgacactaaatccagagactgtgcagtactgtcagctattatagacttgatcaaaacacaggaaaaggcaactcccaggaactttccgccacgattccaggatggatattacagctgacagcttttcaggggtggtctgaaaagccagtttgacagccattcttcatcattgtttaaattttggctggatgccaaaccctgggacatgaacaattttcatgtgtaaggtagaagccttcagtaggtagtaaagacttaatgtgcatgacttgatgttatatgtagagatatatatatatatatatatataccataaaagcaatatgttctctgatcatatactctgctgtggtcatgcccactctttgggagtatattccctttatatatattgagtattgtaccacttgagaaattcctttgttctgttatacaaaattaatctttctgctcataatgattgatgataccaccagtaaaaataggatgtttaccccaaaacaagtgtcaattaagaatttgaacacaaccacattttttaaaatgaaacttctatcggaagtaaattaatttgttgtaataaagtccagtatttaataaaatgtacaatgttaaatctcagccaacctcttggattggtttctacattttcacctatggcttggttcatttgatatttttactatttttaaaacacgtgccctttttatatcaccctgtgcctcataatacagcaattgagagcacggtctggagcctgattacctcagttccagtctcagctctgtcagttagtcagtgtcttggcttctctcctttttccttatcttgtaagatacagttggcccttcatatccatgcattccacatctgtggattcaaacaactgtggatagaagatatttggggaaaaaaaggatggttgtgtctatactgaacatgtgcagacttttttccttgtcattccctaaacaatacagtttaacagctatttatatagtatttacattgtattaggtattataaataatctagagatgacttaaagaatatgggaggttgtgcctaggtaacatgcaaatactacgccattttattataaaagacttgagcatccatggatttaggtatttgaggggttggggttggaaaccagtcccccacagatactgagggacaactgtacatgtaacagttgtgaggatgaagtacattaatacatgtaaagcacataggctagtgcctgtactctctgaatcttagttgttatttgtccctgaaatattttcgtaaatgtctaacaatctattatattacactttttattttattgctacttatcttcttcgccaaggaatagtgtaacaacacatgctgtacattttcagccctatcagattgtgataaatactgttggttgccggccagcaactattttgtccctcccttcttgcttgcttattctggtgttcccttctgtgcagctctgtgtccaggtatgttggaccctttccctaagggtgaatcctgctgttctaaatgaatcacatgtggtcttatcccccttataagtaattgataaggcatgagtacataaacatgtcctagtgaatggcagctgagaagtgatcttcaagggggtgtctgaaaaatgttttactcactaataggcttagaggaggaaatcctgctctctctggacattgtcttttctgactctgatagttggaactgctgcagccaactaatgatcacaaggagacacggactcagactgaggttagctcagtggaaagatagaactcaccagagcctttgataatgccggtaagcttcagaattaacccattctagagctgctttacatgtggacttatgttgatataataaaaacccttcaattgtttaagccacttttaataggatattgttagttttttgttggttttttgttttgttttgttttgttttttgttttttggagacagtgtcttgccctgtcacccaggctggagtgcagtggtgtgatcttggttcactgcagcctcgacttcctgggttcaagtgatccttctgcctcagcctcccaaatagctgggactataggcatgcatcaccacacccagctaatttctgtattttttgtagagacaccgtttcaccatgttgcccaggctggtctcaaaactcctgtgctcaagcagtctgcccgccttggcttcccaaagtgctgacattacaggtatgagccactgcacccggtccctagtagggtatttttaacttggcaaaaagggtattaatcagaaacatacactatccatcactgagtattatactcttgattttgcaatgtaagagttttaacctatttgtctgacagaaggtgtaaaagtgctggacatgctgcagaaagaaacaggaaaagcatcttgctgcactccaaagaatgcaaattttaatgtgccttccaataaatgcaaggaaaccgaaagagttaatagtatcatacaatgactgggatgtattgataatgctacagtgatccattaacagcacttgttcaggtactgctcccaatcctgggaatgtgtgttacctgttatgtctcaaatcctttatcttggctgttcttctaaaagtgatctgtctgtcattgaatgctggcattagagtcatgtcacaatattagagcatactggttttgcctctaacgtcgaggtgaccatctggtctttcttgctctgtaagagtttctgtttgtgcttttttttcccttacttttattatccagtttaaatccagtcagttggccaaaatggtcttggaagaaaggatttagagattctgtaaaaaagattattagttggttctgtgtttgcaaaccagtatgtaattcccatatgaatggggaaaatgttcctgaggaattatttaattgatgaggcattcacagagattaaagcagttattgttacctccaatttatgtcttctgcacagctgattaggttggacattttaatccaaggtgctacttacattctgtttcttttgtttacaaaatagggcattactgagtagaaaatacattccaggtctaagaactgtttgttctttagtggattttaaagaataagacattaaattaagaaggaaaatctgtttgattcatcattttgagtaatgcagagaataactcttaaaaaaaaaacctgaaacagaaactttcaggaaaaaaacaaaagaaattaaactactgaataatctttcaaaagcatcgttgaacagtgagcacatgtgatgccttcccaattaattaatttgggcaaaagctctagataaacttacaccaattgttgcaaggcattctctattactgcatttttaaaacaaagtcctcccctaaaagttatgaattatacaaaagctttaggaggaattttagtactcctttacccaaaataaatagtggtaaatttccttctgttcttagctctgagtttgtatttatttataagtcattgtgatcatgtatacttatatatttttaatatgctaattgcttttaaatgggatttttgttctgattttaaaataatacatcctccctggacaatatttggaaatgtagcaaagtaaatcatgttaccattgttccattttgatatatataaactttaggtattattttatatataataaattttaagatattatatacaataaaattaaccaatttaa

SEQ ID NO: 7933 - DNA, 3568 bp, Homo sapiens
  source 1..3568: mol_type = unassigned DNA
aagtgggcgcacagtggcttccgggcccggacgccatttccagcggttgctggttctgacgggttgtagtctgccaggacaatgagttatgactaccatcagaactggggccgtgatgggggtccccgcagctccggtgggggctatggaggggggccagcagggggtcatggaggtaaccgaggctccggaggaggcggcggcggcggagggggtggtcgaggcggcaggggccggcatcccgggcacctgaaaggccgcgaaatcggcatgtggtacgcgaaaaaacaggggcagaagaacaaggaagcggagaggcaagagagagctgtagtacacatggatgaacgacgagaagaacaaattgtacagttactgaattctgttcaagcgaagaatgataaagagtcagaagcacagatatcctggtttgctcctgaggatcatggatacggtactgaagtttctactaagaacacaccatgctcagagaacaaacttgacatccaggaaaagaagttgataaatcaagaaaaaaaaatgtttagaatcaggaacagatcatatattgaccgagattctgagtatctcttgcaagaaaatgaaccagatggaactttagaccaaaaattattggaagatttacaaaagaaaaaaaatgaccttcggtatattgaaatgcagcatttcagagaaaagctgccttcgtatggaatgcaaaaggaattggtaaatttaattgataaccatcaggtaacagtaataagtggtgaaactggttgtggcaaaaccactcaagttactcagttcattttggataactacattgaaagaggaaaaggatctgcttgcagaatagtttgtactcagccaagaagaattagtgccatttcagttgcggaaagagtagctgcagaaagggcagaatcttgtggcagtggtaatagtactggatatcaaattcgtctccagagtcggttgccaaggaaacagggttctatcttatactgtacaacaggaatcatccttcagtggctccagtcagacccgtatttgtccagtgttagtcatatcgtacttgatgaaatccatgaaagaaatctgcagtcagatgttttaatgactgttgttaaagaccttctcaattttcgatctgacttgaaagtaatattgatgagtgcaacattgaatgcagaaaagttttcagaatattttggtaactgtccaatgatacatatacctggttttacctttccggttgtggaatatcttttggaagatgtaattgaaaaaataaggtatgttccagaacaaaaagaacacagatcccagtttaagaggggtttcatgcaagggcatgtaaatagacaagaaaaagaagaaaaagaagcaatatataaagaacgttggccagattatgtaagggaactgcgaagaaggtattctgcaagtactgtagatgttatagaaatgatggaggatgataaagttgatctgaatttgattgttgccctcatccgatacattgttttggaagaagaggatggtgcgatactggtctttctgccaggctgggacaatatcagcactttacatgatctcttgatgtcacaagtaatgtttaaatcaggtactatgtcacaggtgtttaaaagaacccctcctggtgttcggaaaatagtaattgctaccaacattgcggagactagcattaccatagatgatgtcgtttatgtgatagatggaggaaaaataaaagagacgcattttgatactcagaacaatatcagtacaatgtccgctgagtgggttagtaaagctaatgccaaacagagaaaaggtcgagctggaagagttcaacctggtcattgctatcatctgtataatggtcttagagcaagtcttctagatgactatcaactgccagaaattttgagaactcctttggaagaactttgtttacaaataaagattttaaggctaggtggaattgcttattttctgagtagattaatggacccaccatcaaatgaggcagtgttactctccataagacacctgatggagctgaacgctttggataaacaagaagaattgacacctcttggagtccacttggcacgattacccgttgagccacatattggaaaaatgattctttttggagcactgttctgctgcttagacccagtactcactattgctgctagtctcagtttcaaagatccatttgtcattccactgggaaaagaaaagattgcagatgcaagaagaaaggaattggcaaaggatactagaagtgatcacttaacagttgtgaatgcgtttgagggctgggaagaggctaggcgacgtggtttcagatacgaaaaggactattgctgggaatattttctgtcttcaaacacactgcagatgctgcataacatgaaaggacagtttgctgagcatcttcttggagctggatttgtaagcagtagaaatcctaaagatccagaatctaatataaattcagataatgagaagataattaaagctgtcatctgtgctggtttatatcccaaagttgctaaaattcgactaaatttgggtaaaaaaagaaaaatggtaaaagtttacacaaaaaccgatggcctggttgctgttcatcctaaatctgttaatgtggagcaaacagactttcactacaactggcttatctatcacctaaagatgagaacaagcagtatatacttgtatgactgcacagaggtttccccatactgtctcttgttttttggaggtgacatttccatccagaaggataacgatcaggaaactattgctgtagatgagtggattgtatttcagtctccagcaagaattgcccatcttgttaaggaattaagaaaggaactagatattcttctgcaagagaagattgaaagtcctcatcctgtagactggaatgacactaaatccagagactgtgcagtactgtcagctattatagacttgatcaaaacacaggaaaaggcaactcccaggaactttccgccacgattccaggatggatattacagctgacagcttttcaggggtggtctgaaaagccagtttgacagccattcttcatcattgtttaaattttggctggatgccaaaccctgggacatgaacaattttcatgtgtaaggtagaagccttcagtaggtagtaaagacttaatgtgcatgacttgatgttatatgtagagatatatatatatatatatatataccataaaagcaatatgttctctgatcatatactctgctgtggtcatgcccactctttgggagtatattccctttatatatattgagtattgtaccacttgagaaattcctttgttctgttatacaaaattaatctttctgctcataatgattgatgataccaccagtaaaaataggatgtttaccccaaaacaagtgtcaattaagaatttgaacacaaccacattttttaaaatgaaacttctatcggaagtaaattaatttgttgtaataaagtccagtatttaataaaatgtacaatgttaaatctc

SEQ ID NO: 7934 - DNA, 4454 bp, Homo sapiens
  source 1..4454: mol_type = unassigned DNA
cttttcctgcccccagactagaggcgggatgtagtctcttaggctaagagtgattggtcacaaggagactcggaagtgtctgatcagagccccagaggaggccttgagagcctgttggcgtaccgttccacacttggatccaggaatcgggcgtgttccaggctgctctctatggtagctttgggcggatagagggggcgcgcaaagtattaagggacaataatggccgctttcaaggtgtggattttggctccttgagcctgtctgagcgaggggtggcagcgccggcgccccagaatccgggacagaagggtcccaagagtcgcgcttggtgagagaaatcccagatcctgtgatgggggacaccagtgaggatgcctcgatccatcgattggaaggcactgatctggactgtcaggttggtggtcttatttgcaagtccaaaagtgcggccagcgagcagcatgtcttcaaggctcctgctccccgcccttcattactcggactggacttgctggcttccctgaaacggagagagcgagaggagaaggacgatggggaggacaagaagaagtccaaagtctcctcctacaaggactgggaagagagcaaggatgaccagaaggatgctgaggaagagggcggtgaccaggctggccaaaatatccggaaagacagacattatcggtctgctcgggtagagactccatcccatccgggtggtgtgagcgaagagttttgggaacgcagtcggcagagagagcgggagcggcgggaacatggtgtctatgcctcgtccaaagaagaaaaggattggaagaaggagaaatcgcgggatcgagactatgaccgcaagagggacagagatgagcgggatagaagtaggcacagcagcagatcagagcgagatggagggtcagagcgtagcagcagaagaaatgaacccgagagcccacgacatcgacctaaagatgcagccaccccttcaaggtctacctgggaggaagaggacagtggctatggctcctcaaggcgctcacagtgggaatcgccctccccgacgccttcctatcgggattctgagcggagccatcggctgtccactcgagatcgagacaggtctgtgaggggcaagtactcggatgacacgcctctgccaactccctcctacaaatataacgagtgggccgatgacagaagacacttggggtccaccccgcgtctgtccaggggccgaggaagacgtgaggagggcgaagaaggaatttcatttgacacggaggaggagcggcagcagtgggaagatgaccagaggcaagccgatcgggattggtacatgatggacgagggctatgacgagttccacaacccgctggcctactcctccgaggactacgtgaggaggcgggagcagcacctgcataaacagaagcagaagcgcatttcagctcagcggagacagatcaatgaggataacgagcgctgggagacaaaccgcatgctcaccagtggggtggtccatcggctggaggtggatgaggactttgaagaggacaacgcggccaaggtgcatctgatggtgcacaatctggtgcctccctttctggatgggcgcattgtcttcaccaagcagccggagccggtgattccagtgaaggatgctacttctgacctggccatcattgctcggaaaggcagccagacagtgcggaagcacagggagcagaaggagcgcaagaaggctcagcacaaacactgggaactggcggggaccaaactgggagatataatgggcgtcaagaaggaggaagagccagataaagctgtgacggaggatgggaaggtggactacaggacagagcagaagtttgcagatcacatgaagagaaagagcgaagccagcagtgaatttgcaaagaagaagtccatcctggagcagaggcagtacctgcccatctttgcagtgcagcaggagctgctcactattatcagagacaacagcatcgtgatcgtggttggggagacggggagtggtaagaccactcagctgacgcagtacctgcatgaagatggttacacggactatgggatgattgggtgtacccagccccggcgtgtagctgccatgtcagtggccaagagagtcagtgaagagatggggggaaaccttggcgaggaggtgggctatgccatccgctttgaagactgcacttcagagaacaccttgatcaaatacatgactgacgggatcctgctccgagagtccctccgggaagccgacctggatcactacagtgccatcatcatggacgaggcccacgagcgctccctcaacactgacgtgctctttgggctgctccgggaggtagtggctcggcgctcagacctgaagctcatcgtcacatcagccacgatggatgcggagaagtttgctgccttttttgggaatgtccccatcttccacatccctggccgtaccttccctgttgacatcctcttcagcaagaccccacaggaggattacgtggaggctgcagtgaagcagtccttgcaggtgcacctgtcgggggcccctggagacatccttatcttcatgcctggccaagaggacattgaggtgacctcagaccagattgtggagcatctggaggaactggagaacgcgcctgccctggctgtgctgcccatctactctcagctgccttctgacctccaggccaaaatcttccagaaggctccagatggcgttcggaagtgcatcgttgccaccaatattgccgagacgtctctcactgttgacggcatcatgtttgttatcgattctggttattgcaaattaaaggtcttcaaccccaggattggcatggatgctctgcagatctatcccattagccaggccaatgccaaccagcggtcagggcgagccggcaggacgggcccaggtcagtgtttcaggctctacacccagagcgcctacaagaatgagctcctgaccaccacagtgcccgagatccagaggactaacctggccaacgtggtgctgctgctcaagtccctcggggtgcaggacctgctgcagttccacttcatggacccgcccccggaggacaacatgctcaactctatgtatcagctctggatcctcggggccctggacaacacaggtggtctgacctctaccgggcggctgatggtggagttcccgctggaccctgccctgtccaagatgctcatcgtgtcctgtgacatgggctgcagctccgagatcctgctcatcgtttccatgctctcggtcccagccatcttctacaggcccaagggtcgagaggaggagagtgatcaaatccgggagaagttcgctgttcctgagagcgatcatttgacctacctgaatgtttacctgcagtggaagaacaataattactccaccatctggtgtaacgatcatttcatccatgctaaggccatgcggaaggtccgggaggtgcgagctcaactcaaggacatcatggtgcagcagcggatgagcctggcctcgtgtggcactgactgggacatcgtcaggaagtgcatctgtgctgcctatttccaccaagcagccaagctcaagggaatcggggagtacgtgaacatccgcacagggatgccctgccacttgcaccccaccagctccctttttggaatgggctacaccccagattacatagtgtatcacgagttggtcatgaccaccaaggagtatatgcagtgtgtgaccgctgtggacggggagtggctggcggagctgggccccatgttctatagcgtgaaacaggcgggcaagtcacggcaggagaaccgtcgtcgggccaaagaggaagcctctgccatggaggaggagatggcgctggccgaggagcagctgcgagcccggcggcaggagcaggagaagcgcagccccctgggcagtgtcaggtctacgaagatctacactccaggccggaaagagcaaggggagcccatgacccctcgccgcacgccagcccgctttggtctgtgagctgaggctgtccccagagaggatggcagcaggtattgggtcctcagccttctggcgggagccctgaggctgcggacaaagccctttcatctgaggactttcatctgtgcatatcacggccccccagggcagttcctgctggaccagactctctggcagaggaggtggagttcttccatgcaggagcacggcatggcgggagcggggctgcagagtatccgaggtgctgccggggcagcgggaggtggctggacccatcgcatctaaaactggcccaggacacttggtgtatgcgtgacttggctgtggctgtcttttttaatccttgtgtaaagcagcaaaaaagacctaaagggaattgtaatttggttataattcaggatttggaaataaatttattatttgtaaaacatga

SEQ ID NO: 7935 - DNA, 2250 bp, Homo sapiens
  source 1..2250: mol_type = unassigned DNA
acttggatccaggaatcgggcgtgttccaggctgctctctatggtagctttgggcggatagagggggcgcgcaaagtattaagggacaataatggccgctttcaaggtgtggattttggctccttgagcctgtctgagcgaggggtggcagcgccggcgccccagaatccgggacagaagggtcccaagagtcgcgcttggtgagagaaatcccagatcctgtgatgggggacaccagtgaggatgcctcgatccatcgattggaaggcactgatctggactgtcaggttggtggtcttatttgcaagtccaaaagtgcggccagcgagcagcatgtcttcaaggctcctgctccccgcccttcattactcggactggacttgctggcttccctgaaacggagagagcgagaggagaaggacgatggggaggacaagaagaagtccaaagtctcctcctacaaggactgggaagagagcaaggatgaccagaaggatgctgaggaagagggcggtgaccaggccaaaatcttccagaaggctccagatggcgttcggaagtgcatcgttgccaccaatattgccgagacgtctctcactgttgacggcatcatgtttgttatcgattctggttattgcaaattaaaggtcttcaaccccaggattggcatggatgctctgcagatctatcccattagccaggccaatgccaaccagcggtcagggcgagccggcaggacgggcccaggtcagtgtttcaggctctacacccagagcgcctacaagaatgagctcctgaccaccacagtgcccgagatccagaggactaacctggccaacgtggtgctgctgctcaagtccctcggggtgcaggacctgctgcagttccacttcatggacccgcccccggaggacaacatgctcaactctatgtatcagctctggatcctcggggccctggacaacacaggtggtctgacctctaccgggcggctgatggtggagttcccgctggaccctgccctgtccaagatgctcatcgtgtcctgtgacatgggctgcagctccgagatcctgctcatcgtttccatgctctcggtcccagccatcttctacaggcccaagggtcgagaggaggagagtgatcaaatccgggagaagttcgctgttcctgagagcgatcatttgacctacctgaatgtttacctgcagtggaagaacaataattactccaccatctggtgtaacgatcatttcatccatgctaaggccatgcggaaggtccgggaggtgcgagctcaactcaaggacatcatggtgcagcagcggatgagcctggcctcgtgtggcactgactgggacatcgtcaggaagtgcatctgtgctgcctatttccaccaagcagccaagctcaagggaatcggggagtacgtgaacatccgcacagggatgccctgccacttgcaccccaccagctccctttttggaatgggctacaccccagattacatagtgtatcacgagttggtcatgaccaccaaggagtatatgcagtgtgtgaccgctgtggacggggagtggctggcggagctgggccccatgttctatagcgtgaaacaggcgggcaagtcacggcaggagaaccgtcgtcgggccaaagaggaagcctctgccatggaggaggagatggcgctggccgaggagcagctgcgagcccggcggcaggagcaggagaagcgcagccccctgggcagtgtcaggtctacgaagatctacactccaggccggaaagagcaaggggagcccatgacccctcgccgcacgccagcccgctttggtctgtgagctgaggctgtccccagagaggatggcagcaggtattgggtcctcagccttctggcgggagccctgaggctgcggacaaagccctttcatctgaggactttcatctgtgcatatcacggccccccagggcagttcctgctggaccagactctctggcagaggaggtggagttcttccatgcaggagcacggcatggcgggagcggggctgcagagtatccgaggtgctgccggggcagcgggaggtggctggacccatcgcatctaaaactggcccaggacacttggtgtatgcgtgacttggctgtggctgtcttttttaatccttgtgtaaagcagcaaaaaagacctaaagggaattgtaatttggttataattcaggatttggaaataaatttattatttgt

SEQ ID NO: 7936 - DNA, 3666 bp, Homo sapiens
  source 1..3666: mol_type = unassigned DNA
ccacgtcatcgagcagctccccctccccttgctacaagtcgcacgcgcggaagtaaacacctctacgtcatcagggcgcgtcctcgtctttcccctcccatctcctcagatcggtggacgtgctcgcctccactcggggccaggtctatgtcccggtttcccgcagtcgcgggcagggcgccaaggcggcaggaggagggtgagcggtcaagagacctccaggaagagcggctctcggctgtttgcatcgccgatagagaagagaaaggatgcacgtcccaggagggaggaactactccaacttttcctattcagaaacaaagaaaaaagattattcaagctgtgagggacaattcattccttattgttactggaaatacaggaagtggtaaaacaactcaactcccaaaatatctatatgaagcagggttttcacaacatggtatgattggtgtaactcaaccacgaaaagtagctgctatatcagttgctcagagagtagctgaagaaatgaaatgcactttgggatccaaagtaggataccaagttcgttttgatgattgcagttctaaggagacagcaatcaaatatatgactgatggatgtttactgaaacatattctgggagacccaaatcttaccaaattcagtgtcattattttggatgaagcccatgaaagaactctaactacagatatcttatttggtttattgaagaagctatttcaggagaagtctcctaataggaaggagcatttaaaagtggtggtaatgtcagcaactatggaattagccaagctctctgcattctttggaaattgtccaatatttgatatacctggaaggctttatccagtcagagagaaattctgcaatttgattggtccacgagacagagaaaatactgcgtatattcaagcgattgtgaaagtcaccatggatatccatttgaatgaaatggctggagacatcttggtttttctgactggccagtttgaaatagaaaaaagttgtgagttactttttcagatggcagagtctgttgattatgattatgatgttcaagataccaccctcgatggcttgttaatattgccgtgttatggatcaatgacaacagatcaacagaggaggatatttttgccaccaccacctggaattagaaaatgtgtcatatccaccaatatttctgcaacgtctttgacaatagatggaatcagatatgtggtagatggtggcttcgtgaagcagttaaatcacaaccccagattagggttggacatcctggaggtggttccaatttcaaagagcgaggcattacagcgaagtggccgagctggcaggacttcttcaggaaaatgctttcggatctatagtaaagatttttggaaccagtgtatgcctgaccatgtgatccctgaaattaagagaactagtttgacatctgtagttctgaccttaaagtgccttgccatacacgatgtcataaggtttccctatttggatccacctaatgagagacttattttagaagctcttaaacaactttaccagtgtgatgctattgacaggagtggccatgtcaccagattgggtttgtctatggtggagtttcctttgcctccacatctgacatgtgcagtaataaaagctgcttccctggattgtgaagatctactacttccaatagcagcaatgttgtctgtggaaaacgtcttcattagacctgttgatccagagtaccagaaggaagcagaacagagacatcgagaattggcagctaaagctggaggatttaatgactttgcaactttagctgtcatctttgaacaatgcaaatcaagtggagctccagcttcatggtgccaaaaacactggattcattggaggtgcttattttctgcatttcgtgtggaagctcaacttcgagaactaatcaggaagcttaaacagcaaagtgatttcccaaaagagacctttgaaggccctaaacatgaagtactacgaagatgtctttgtgcgggctatttcaaaaatgtagctcgaagatctgttgggagaacgttttgcacaatggatggtcgtggaagcccagttcacattcatccttcctcagcacttcatgaacaggaaaccaaacttgaatggatcatttttcatgaggtattggttaccaccaaagtctacgcaagaattgtatgcccaatccgttatgaatgggtaagagacttgttacccaagttgcatgaatttaatgcacatgatttgagcagtgtggcccgacgtgaagtgagagaagatgcaagaaggagatggacaaataaggaaaatgtaaagcagctaaaggatggaatatcgaaagacgtcttaaagaaaatgcaaagaagaaatgatgacaaatccatatctgatgcacgggctcgtttccttgagagaaagcagcagaggacccaggaccacagtgacacacgaaaggaaacaggctaaggtggtgaaccctccaattcaggaagtgggaaaaggagccaggaaatgtgcttctactttgccagttatttcagacagcactaccaagaggaggtggtcagcacttgttattggcctatgaactaaaagcaaatcaaagctcataaatcaaagctcatcagttcccataaatgcagttgtcaaagaaaagatttggttgccatagtcataagcaatgatacatgaaaccaatgaaagacagtacatgtaataatattttcctcagtacaattttgctggccttaactggtatcaaacgctgtcattgagatgttttcaaagaacattgagttgtatttaatcagcgtgtactccatttgcattgaagcattaaaaattatttttcttaaaatctctttaaggccttcttgttgctgttagaatagtgctatatatcaggtatgtgaccatttatttcagaaggctgaacataagaggtttctactcagcaatacttagatgtctaactgtttaattgctacagagctttatagatatttagagaaaagacttaatcaattagtaaataaaattgcctatggcaggattctttcttgaattaatattaatccttaaattgatttttctgggattatacaaattcctttttatataaaagtatattgtttaaaacagtagctatagccattaaccaaaggacagatgatatatatatatatgatatatatatatatataagttcttttttagctgtacctacgtacttatatcagcaccatgtatgtaggtgtgatagtactttcaaacagcgcctccacctggcctactctgttatttccacctgtttgggtagggccatttaacttccattatgccaaacttgggatgggattttcgaagcagacaacactatttcatcgtgtttcaaattggaaccttgaggctagttagtatcacactcaggccacactcagcacttgcccactcttgtttactgccttgtattctagttatttgtgtatttgtctccctcactagattatacgctccttgtgggcagggactgtgtcttttttcatctttgtatctttcatgcacctagcatagtgctttgcacatagtagtcactcagtgtttgttaaataaagctattagtgtcattaaaattcaaaagacagt

SEQ ID NO: 7937 - DNA, 2228 bp, Homo sapiens
  source 1..2228: mol_type = unassigned DNA
gtctttcccctcccatctcctcagatcggtggacgtgctcgcctccactcggggccaggtctatgtcccggtttcccgcagtcgcgggcagggcgccaaggcggcaggaggagggtgagcggtcaagagacctccaggaagagcggctctcggctgtttgcatcgccgatagagaagagaaaggatgcacgtcccaggagggaggaactactccaacttttcctattcagaaacaaagaaaaaagattattcaagctgtgagggacaattcattccttattgttactggaaatacaggaagtggtaaaacaactcaactcccaaaatatctatatgaagcagggttttcacaacatggtatgattggtgtaactcaaccacgaaaagtagctgctatatcagttgctcagagagtagctgaagaaatgaaatgcactttgggatccaaagtaggataccaagttcgttttgatgattgcagttctaaggagacagcaatcaaatatatgactgatggatgtttactgaaacatattctgggagacccaaatcttaccaaattcagtgtcattattttggatgaagcccatgaaagaactctaactacagatatcttatttggtttattgaagaagctatttcaggagaagtctcctaataggaaggagcatttaaaagtggtggtaatgtcagcaactatggaattagccaagctctctgcattctttggaaattgtccaatatttgatatacctggaaggctttatccagtcagagagaaattctgcaatttgattggtccacgagacagagaaaatactgcgtatattcaagcgattgtgaaagtcaccatggatatccatttgaatgaaatggctggagacatcttggtttttctgactggccagtttgaaatagaaaaaagttgtgagttactttttcagatggcagagtctgttgattatgattatgatgttcaagataccaccctcgatggcttgttaatattgccgtgttatggatcaatgacaacagatcaacagaggaggatatttttgccaccaccacctggaattagaaaatgtgtcatatccaccaatatttctgcaacgtctttgacaatagatggaatcagatatgtggtagatggtggcttcgtgaagcagttaaatcacaaccccagattagggttggacatcctggaggtggttccaatttcaaagagcgaggcattacagcgaagtggccgagctggcaggacttcttcaggaaaatgctttcggatctatagtaaagatttttggaaccagtgtatgcctgaccatgtgatccctgaaattaagagaactagtttgacatctgtagttctgaccttaaagtgccttgccatacacgatgtcataaggtttccctatttggatccacctaatgagagacttattttagaagctcttaaacaactttaccagtgtgatgctattgacaggagtggccatgtcaccagattgggtttgtctatggtggagtttcctttgcctccacatctgacatgtgcagtaataaaagctgcttccctggattgtgaagatctactacttccaatagcagcaatgttgtctgtggaaaacgtcttcattagacctgttgatccagagtaccagaaggaagcagaacagagacatcgagaattggcagctaaagctggaggatttaatgactttgcaactttagctgtcatctttgaacaatgcaaatcaagtggagctccagcttcatggtgccaaaaacactggattcattggaggtgcttattttctgcatttcgtgtggaagctcaacttcgagaactaatcaggaagcttaaacagcaaagtgatttcccaaaagagacctttgaaggccctaaacatgaagtactacgaagatgtctttgtgcgggctatttcaaaaatgtagctcgaagatctgttgggagaacgttttgcacaatggatggtcgtggaagcccagttcacattcatccttcctcagcacttcatgaacaggaaaccaaacttgaatggatcatttttcatgaggtattggttaccaccaaagtctacgcaagaattgtatgcccaatccgttatgaatgggtaagagacttgttacccaagttgcatgaatttaatgcacatgatttgagcagtgtggcccgacgtgaagtgagcaaaataaaattatttcag

SEQ ID NO: 7938 - DNA, 3724 bp, Homo sapiens
  source 1..3724: mol_type = unassigned DNA
gtctttcccctcccatctcctcagatcggtggacgtgctcgcctccactcggggccaggtctatgtcccggtttcccgcagtcgcgggcagggcgccaaggcggcaggaggagggtgagcggtcaagagacctccaggaagagcggctctcggctgtttgcatcgccgatagagaagagaaaggatgcacgtcccaggagggaggaactactccaacttttcctattcagaaacaaagaaaaaagattattcaagctgtgagggacaattcattccttattgttactggaaatacaggaagtggtaaaacaactcaactcccaaaatatctatatgaagcagggttttcacaacatggtatgattggtgtaactcaaccacgaaaagtagctgctatatcagttgctcagagagtagctgaagaaatgaaatgcactttgggatccaaagtaggataccaagttcgttttgatgattgcagttctaaggagacagcaatcaaatatatgactgatggatgtttactgaaacatattctgggagacccaaatcttaccaaattcagtgtcattattttggatgaagcccatgaaagaactctaactacagatatcttatttggtttattgaagaagctatttcaggagaagtctcctaataggaaggagcatttaaaagtggtggtaatgtcagcaactatggaattagccaagctctctgcattctttggaaattgtccaatatttgatatacctggaaggctttatccagtcagagagaaattctgcaatttgattggtccacgagacagagaaaatactgcgtatattcaagcgattgtgaaagtcaccatggatatccatttgaatgaaatggctggagacatcttggtttttctgactggccagtttgaaatagaaaaaagttgtgagttactttttcagatggcagagtctgttgattatgattatgatgttcaagataccaccctcgatggcttgttaatattgccgtgttatggatcaatgacaacagtttcacaaaccagtctcacctttgtaacccacatccagatcatgaaacaaatcagtgagaaccagcattccttgacaggtctcaccattgctgggattacaggcgtgagtcaccacgcccggcctagaaacatgacttgtaatgaaaaattaaatcaacagaggaggatatttttgccaccaccacctggaattagaaaatgtgtcatatccaccaatatttctgcaacgtctttgacaatagatggaatcagatatgtggtagatggtggcttcgtgaagcagttaaatcacaaccccagattagggttggacatcctggaggtggttccaatttcaaagagcgaggcattacagcgaagtggccgagctggcaggacttcttcaggaaaatgctttcggatctatagtaaagatttttggaaccagtgtatgcctgaccatgtgatccctgaaattaagagaactagtttgacatctgtagttctgaccttaaagtgccttgccatacacgatgtcataaggtttccctatttggatccacctaatgagagacttattttagaagctcttaaacaactttaccagtgtgatgctattgacaggagtggccatgtcaccagattgggtttgtctatggtggagtttcctttgcctccacatctgacatgtgcagtaataaaagctgcttccctggattgtgaagatctactacttccaatagcagcaatgttgtctgtggaaaacgtcttcattagacctgttgatccagagtaccagaaggaagcagaacagagacatcgagaattggcagctaaagctggaggatttaatgactttgcaactttagctgtcatctttgaacaatgcaaatcaagtggagctccagcttcatggtgccaaaaacactggattcattggaggtgcttattttctgcatttcgtgtggaagctcaacttcgagaactaatcaggaagcttaaacagcaaagtgatttcccaaaagagacctttgaaggccctaaacatgaagtactacgaagatgtctttgtgcgggctatttcaaaaatgtagctcgaagatctgttgggagaacgttttgcacaatggatggtcgtggaagcccagttcacattcatccttcctcagcacttcatgaacaggaaaccaaacttgaatggatcatttttcatgaggtattggttaccaccaaagtctacgcaagaattgtatgcccaatccgttatgaatgggtaagagacttgttacccaagttgcatgaatttaatgcacatgatttgagcagtgtggcccgacgtgaagtgagagaagatgcaagaaggagatggacaaataaggaaaatgtaaagcagctaaaggatggaatatcgaaagacgtcttaaagaaaatgcaaagaagaaatgatgacaaatccatatctgatgcacgggctcgtttccttgagagaaagcagcagaggacccaggaccacagtgacacacgaaaggaaacaggctaaggtggtgaaccctccaattcaggaagtgggaaaaggagccaggaaatgtgcttctactttgccagttatttcagacagcactaccaagaggaggtggtcagcacttgttattggcctatgaactaaaagcaaatcaaagctcataaatcaaagctcatcagttcccataaatgcagttgtcaaagaaaagatttggttgccatagtcataagcaatgatacatgaaaccaatgaaagacagtacatgtaataatattttcctcagtacaattttgctggccttaactggtatcaaacgctgtcattgagatgttttcaaagaacattgagttgtatttaatcagcgtgtactccatttgcattgaagcattaaaaattatttttcttaaaatctctttaaggccttcttgttgctgttagaatagtgctatatatcaggtatgtgaccatttatttcagaaggctgaacataagaggtttctactcagcaatacttagatgtctaactgtttaattgctacagagctttatagatatttagagaaaagacttaatcaattagtaaataaaattgcctatggcaggattctttcttgaattaatattaatccttaaattgatttttctgggattatacaaattcctttttatataaaagtatattgtttaaaacagtagctatagccattaaccaaaggacagatgatatatatatatatgatatatatatatatataagttcttttttagctgtacctacgtacttatatcagcaccatgtatgtaggtgtgatagtactttcaaacagcgcctccacctggcctactctgttatttccacctgtttgggtagggccatttaacttccattatgccaaacttgggatgggattttcgaagcagacaacactatttcatcgtgtttcaaattggaaccttgaggctagttagtatcacactcaggccacactcagcacttgcccactcttgtttactgccttgtattctagttatttgtgtatttgtctccctcactagattatacgctccttgtgggcagggactgtgtcttttttcatctttgtatctttcatgcacctagcatagtgctttgcacatagtagtcactcagtgtttgttaaataaagctattagtgtcattaaaattc

SEQ ID NO: 7939 - DNA, 3435 bp, Homo sapiens
  source 1..3435: mol_type = unassigned DNA
ccacgtcatcgagcagctccccctccccttgctacaagtcgcacgcgcggaagtaaacacctctacgtcatcagggcgcgtcctcgtctttcccctcccatctcctcagatcggtggacgtgctcgcctccactcggggccaggtctatgtcccggtttcccgcagtcgcgggcagggcgccaaggcggcaggaggagggtgagcggtcaagagacctccaggaagagcggctctcggctgtttgcatcgccgatagagaagagaaaggatgcacgtcccaggagggaggaactactccaacttttcctattcagaaacaaagaaaaaagattattcaagctgagacagcaatcaaatatatgactgatggatgtttactgaaacatattctgggagacccaaatcttaccaaattcagtgtcattattttggatgaagcccatgaaagaactctaactacagatatcttatttggtttattgaagaagctatttcaggagaagtctcctaataggaaggagcatttaaaagtggtggtaatgtcagcaactatggaattagccaagctctctgcattctttggaaattgtccaatatttgatatacctggaaggctttatccagtcagagagaaattctgcaatttgattggtccacgagacagagaaaatactgcgtatattcaagcgattgtgaaagtcaccatggatatccatttgaatgaaatggctggagacatcttggtttttctgactggccagtttgaaatagaaaaaagttgtgagttactttttcagatggcagagtctgttgattatgattatgatgttcaagataccaccctcgatggcttgttaatattgccgtgttatggatcaatgacaacagatcaacagaggaggatatttttgccaccaccacctggaattagaaaatgtgtcatatccaccaatatttctgcaacgtctttgacaatagatggaatcagatatgtggtagatggtggcttcgtgaagcagttaaatcacaaccccagattagggttggacatcctggaggtggttccaatttcaaagagcgaggcattacagcgaagtggccgagctggcaggacttcttcaggaaaatgctttcggatctatagtaaagatttttggaaccagtgtatgcctgaccatgtgatccctgaaattaagagaactagtttgacatctgtagttctgaccttaaagtgccttgccatacacgatgtcataaggtttccctatttggatccacctaatgagagacttattttagaagctcttaaacaactttaccagtgtgatgctattgacaggagtggccatgtcaccagattgggtttgtctatggtggagtttcctttgcctccacatctgacatgtgcagtaataaaagctgcttccctggattgtgaagatctactacttccaatagcagcaatgttgtctgtggaaaacgtcttcattagacctgttgatccagagtaccagaaggaagcagaacagagacatcgagaattggcagctaaagctggaggatttaatgactttgcaactttagctgtcatctttgaacaatgcaaatcaagtggagctccagcttcatggtgccaaaaacactggattcattggaggtgcttattttctgcatttcgtgtggaagctcaacttcgagaactaatcaggaagcttaaacagcaaagtgatttcccaaaagagacctttgaaggccctaaacatgaagtactacgaagatgtctttgtgcgggctatttcaaaaatgtagctcgaagatctgttgggagaacgttttgcacaatggatggtcgtggaagcccagttcacattcatccttcctcagcacttcatgaacaggaaaccaaacttgaatggatcatttttcatgaggtattggttaccaccaaagtctacgcaagaattgtatgcccaatccgttatgaatgggtaagagacttgttacccaagttgcatgaatttaatgcacatgatttgagcagtgtggcccgacgtgaagtgagagaagatgcaagaaggagatggacaaataaggaaaatgtaaagcagctaaaggatggaatatcgaaagacgtcttaaagaaaatgcaaagaagaaatgatgacaaatccatatctgatgcacgggctcgtttccttgagagaaagcagcagaggacccaggaccacagtgacacacgaaaggaaacaggctaaggtggtgaaccctccaattcaggaagtgggaaaaggagccaggaaatgtgcttctactttgccagttatttcagacagcactaccaagaggaggtggtcagcacttgttattggcctatgaactaaaagcaaatcaaagctcataaatcaaagctcatcagttcccataaatgcagttgtcaaagaaaagatttggttgccatagtcataagcaatgatacatgaaaccaatgaaagacagtacatgtaataatattttcctcagtacaattttgctggccttaactggtatcaaacgctgtcattgagatgttttcaaagaacattgagttgtatttaatcagcgtgtactccatttgcattgaagcattaaaaattatttttcttaaaatctctttaaggccttcttgttgctgttagaatagtgctatatatcaggtatgtgaccatttatttcagaaggctgaacataagaggtttctactcagcaatacttagatgtctaactgtttaattgctacagagctttatagatatttagagaaaagacttaatcaattagtaaataaaattgcctatggcaggattctttcttgaattaatattaatccttaaattgatttttctgggattatacaaattcctttttatataaaagtatattgtttaaaacagtagctatagccattaaccaaaggacagatgatatatatatatatgatatatatatatatataagttcttttttagctgtacctacgtacttatatcagcaccatgtatgtaggtgtgatagtactttcaaacagcgcctccacctggcctactctgttatttccacctgtttgggtagggccatttaacttccattatgccaaacttgggatgggattttcgaagcagacaacactatttcatcgtgtttcaaattggaaccttgaggctagttagtatcacactcaggccacactcagcacttgcccactcttgtttactgccttgtattctagttatttgtgtatttgtctccctcactagattatacgctccttgtgggcagggactgtgtcttttttcatctttgtatctttcatgcacctagcatagtgctttgcacatagtagtcactcagtgtttgttaaataaagctattagtgtcattaaaattcaaaagacagt

SEQ ID NO: 7940 - DNA, 4200 bp, Homo sapiens
  source 1..4200: mol_type = unassigned DNA
gaaagctggaacccggccggagtagctctgagcgccggctgtgaggaaggaggttctgggcaagctatagccatggctgtggctgtagccatggcgggagccttaatcgggtcggagccaggccccgcggaagaacttgccaaactcgagtacctgtctttggtgtcaaaggtttgcactgagctggacaatcacttggggatcaacgacaaggaccttgctgaatttgtgatcagtcttgctgagaaaaataccacctttgatacttttaaggcttctctcgtcaaaaatggtgcagaatttacggattctcttattagtaacttgctgcgtctcatacaaaccatgcggcctccagcgaagccttccactagcaaagatccagttgttaaacctaaaacagaaaaagaaaagctgaaggaactcttcccagtcctttgccaaccggacaacccttctgttcggaccatgttggatgaagatgatgtgaaagttgctgtggatgtcctgaaagaactggaagctttaatgcccagcgcagcaggccaggagaagcaaagagatgctgaacaccgggacaggacaaagaagaagaagcggagtcgaagccgagatcgaaaccgagatcgagacagagatagggaacgaaaccgagatagagaccacaagcggagacaccgatcccgctctcgatcacgttccaggacccgggagaggaataaagtgaagtctagatatcggtccaggagcaggagtcagagtccccccaaagaccggaaggaccgggacaaatatggagagcggaatctggatagatggcgggataagcatgtggaccgccctcctccagaagagcccaccattggtgacatttataatggcaaagttaccagcatcatgcagtttggttgctttgtgcagctggaaggactaaggaagcggtgggaaggcctggtgcacatctctgagctccggcgggagggtcgtgtggccaatgtagctgatgtcgtgagcaaaggccagagggtcaaagtcaaagtgctgtccttcactgggaccaagaccagcctgagcatgaaggatgtggatcaagagactggagaagatctaaacccaaatagacggcgaaatcttgtcggggagaccaatgaggagacctcaatgcggaatcctgatagacccactcacttgtcccttgtcagtgctcctgaagtagaggacgactcactggaacgcaagcgcctcacccgaatctctgacccagagaagtgggagatcaaacagatgattgctgccaatgtcctttccaaagaagaatttccagactttgatgaagagactggcattctccctaaggtggatgatgaagaagatgaggaccttgagattgaattggttgaggaagagcctccattcctgagagggcacactaagcaaagcatggacatgagccccattaaaattgtcaagaacccagacggctccctctcccaagcagcaatgatgcagagtgccttggccaaagaaaggcgggaactcaaacaggcccagcgggaagctgagatggattctattcccatgggactcaacaaacactgggttgaccctctgcctgatgcggaaggcagacagattgctgccaacatgaggggtattgggatgatgcccaatgatattcctgagtggaagaagcatgcctttgggggcaacaaagcctcttacggaaaaaagacccagatgtcaatccttgagcagagggagagcctgcccatctacaaactgaaggagcaattggtccaggccgtccatgacaatcagatcctgattgtcattggtgagacaggatctggaaagacaacacagatcacccagtacctggcggaggcaggctacacttccaggggcaagattgggtgtacccagcccagaagagtggcagctatgtcggtggccaaaagagtgtcagaggagtttggttgttgcttaggccaagaggtgggctacaccattcgatttgaggactgcactagccctgaaacagtcatcaagtacatgacagatgggatgttgcttagagagtgcttgattgaccctgacctcactcagtacgcgatcatcatgttggacgaggcacatgagaggacaattcacactgatgtgctctttggattgttgaaaaagacagttcagaaacggcaggacatgaagctgattgtcacctcagccaccttggatgcagtgaagttttctcaatacttctatgaagctcccattttcaccatcccaggtcgaacatatccagtggaaatactgtacacaaaggaacctgagacagattatctggatgccagcctgattactgttatgcagattcatttaacagaaccaccaggtgatatcctggtcttcctgactggtcaggaagaaattgatactgcttgtgagatcctgtatgaaagaatgaaatccctgggacctgatgttccagagttaattatcctcccagtgtactctgctcttcccagtgagatgcagacccgaatctttgacccagctccaccaggcagcagaaaggttgtgattgccaccaatatcgcagagacatcgctgactattgatggtatctactatgtggtggacccaggattcgtgaaacagaaagtttacaattccaagacagggattgaccagctcgtggtgacgcctatttctcaggctcaggcaaagcaacgagctggcagagctgggagaacaggcccagggaagtgttacaggttgtacacagaacgtgcctaccgagatgaaatgctgaccaccaacgtgccggaaatccagagaaccaacttagcaagcacagtgctgtcactcaaggccatgggtatcaatgatctgctgtcctttgatttcatggatgccccacctatggaaactttgatcacagccatggagcagctgtacacactgggggccctggatgacgagggcctgctcactcgcttgggccgccggatggcagagttccctctggagccaatgctatgcaaaatgctcatcatgtctgtgcatctgggctgcagtgaggaaatgctgaccattgtatccatgctgtctgtgcagaacgtcttctataggcccaaggataaacaagcccttgcagatcagaagaaggccaaattccaccagactgaaggggaccacctcaccctgctagctgtgtacaactcctggaagaacaacaagttctccaacccatggtgctatgagaactttatccaggctcgttccctgcgccgggcccaggacattcgcaagcagatgttaggcataatggacagacacaagctggatgttgtttcctgtggcaagtccacagtccgagtgcagaaggccatctgcagtgggttcttccgtaatgctgccaagaaagacccgcaggagggttaccggacactgatcgaccagcaggtggtctatatccatccttccagtgccctcttcaacagacagccagaatgggtggtgtaccatgagctggtgctcaccaccaaggaatacatgcgtgaagttaccaccatcgaccctcggtggcttgtggagtttgccccagccttcttcaaggtctcagacccaactaagctaagcaaacagaagaagcaacagcgtcttgaacccttgtacaaccgctatgaggaacccaatgcctggagaatatctcgagctttccgacggcgctgaaaggcaagattgttcctttgcctctccagcagcagtagccagggcttggacttatcgatgacaggctggtcctgaggatacagctgtcccgtgactgactgtcttaactgagcattttctcaactcgactctcatttcttccctgctggtaaaatagaaacagggatttaaacctggctttggcaagagcctgcagcctccatcaccccaagtccttgggcccagttgggagctcatatctaacacagagacacattgcatcaacttcaagaaagggacaatttgtgcagctccaggatgggaaggtggagtgggtgagcatcttgtgcagggacatggtgagtgccctgatgccccagctagcaggagctactgtgctcatctaaagtgtttgccccacttcccaccccgtctccagcccctgtactttggcttgacctcgtggaaatatttattttcttaagg

SEQ ID NO: 7941 - DNA, 3809 bp, Homo sapiens
  source 1..3809: mol_type = unassigned DNA
agtgaaagctggaacccggccggagtagctctgagcgccggctgtgaggaaggaggttctgggcaagctatagccatggctgtggctgtagccatggcgggagccttaatcgggtcggagccaggccccgcggaagaacttgccaaactcgagtacctgtctttggtgtcaaaggtttgcactgagctggacaatcacttggggatcaacgacaaggaccttgctgaatttgtgatcagtcttgctgagaaaaataccacctttgatacttttaaggcttctctcgtcaaaaatggtgcagaatttacggattctcttattagtaacttgctgcgtctcatacaaaccatgcggcctccagcgaagccttccactagcaaagatccagttgttaaacctaaaacagaaaaagaaaagctgaaggaactcttcccagtcctttgccaaccggacaacccttctgttcggaccatgttggatgaagatgatgtgaaagttgctgtggatgtcctgaaagaactggaagctttaatgcccagcgcagcaggccaggagaagcaaagagatgctgaacaccgggacaggacaaagaagaagaagcggagtcgaagccgagatcgaaaccgagatcgagacagagatagggaacgaaaccgagatagagaccacaagcggagacaccgatcccgctctcgatcacgttccaggacccgggagaggaataaagtgaagtctagatatcggtccaggagcaggagtcagagtccccccaaagaccggaaggaccgggacaaatatggagagcggaatctggatagatggcgggataagcatgtggaccgccctcctccagaagagcccaccattggtgacatttataatggcaaagttaccagcatcatgcagtttggttgctttgtgcagctggaaggactaaggaagcggtgggaaggcctggtgcacatctctgagctccggcgggagggtcgtgtggccaatgtagctgatgtcgtgagcaaaggccagagggtcaaagtcaaagtgctgtccttcactgggaccaagaccagcctgagcatgaaggatgtggatcaagagactggagaagatctaaacccaaatagacggcgaaatcttgtcggggagaccaatgaggagacctcaatgcggaatcctgatagacccactcacttgtcccttgtcagtgctcctgaagtagaggacgactcactggaacgcaagcgcctcacccgaatctctgacccagagaagtgggagatcaaacagatgattgctgccaatgtcctttccaaagaagaatttccagactttgatgaagagactggcattctccctaaggtggatgatgaagaagatgaggaccttgagattgaattggttgaggaagagcctccattcctgagagggcacactaagcaaagcatggacatgagccccattaaaattgtcaagaacccagacggctccctctcccaagcagcaatgatgcagagtgccttggccaaagaaaggcgggaactcaaacaggcccagcgggaagctgagatggattctattcccatgggactcaacaaacactgggttgaccctctgcctgatgcggaaggcagacagattgctgccaacatgaggggtattgggatgatgcccaatgatattcctgagtggaagaagcatgcctttgggggcaacaaagcctcttacggaaaaaagacccagatgtcaatccttgagcagagggagagcctgcccatctacaaactgaaggagcaattggtccaggccgtccatgacaatcagatcctgattgtcattggtgagacaggatctggaaagacaacacagatcacccagtacctggcggaggcaggctacacttccaggggcaagattgggtgtacccagcccagaagagtggcagctatgtcggtggccaaaagagtgtcagaggagtttggttgttgcttaggccaagaggtgggctacaccattcgatttgaggactgcactagccctgaaacagtcatcaagtacatgacagatgggatgttgcttagagagtgcttgattgaccctgacctcactcagtacgcgatcatcatgttggacgaggcacatgagaggacaattcacactgatgtgctctttggattgttgaaaaagacagttcagaaacggcaggacatgaagctgattgtcacctcagccaccttggatgcagtgaagttttctcaatacttctatgaagctcccattttcaccatcccaggtcgaacatatccagtggaaatactgtacacaaaggaacctgagacagattatctggatgccagcctgattactgttatgcagattcatttaacagaaccaccaggtgatatcctggtcttcctgactggtcaggaagaaattgatactgcttgtgagatcctgtatgaaagaatgaaatccctgggacctgatgttccagagttaattatcctcccagtgtactctgctcttcccagtgagatgcagacccgaatctttgacccagctccaccaggcagcagaaaggttgtgattgccaccaatatcgcagagacatcgctgactattgatggtatctactatgtggtggacccaggattcgtgaaacagaaagtttacaattccaagacagggattgaccagctcgtggtgacgcctatttctcaggctcaggcaaagcaacgagctggcagagctgggagaacaggcccagggaagtgttacaggttgtacacagaacgtgcctaccgagatgaaatgctgaccaccaacgtgccggaaatccagagaaccaacttagcaagcacagtgctgtcactcaaggccatgggtatcaatgatctgctgtcctttgatttcatggatgccccacctatggaaactttgatcacagccatggagcagctgtacacactgggggccctggatgacgagggcctgctcactcgcttgggccgccggatggcagagttccctctggagccaatgctatgcaaaatgctcatcatgtctgtgcatctgggctgcagtgaggaaatgctgaccattgtatccatgctgtctgtgcagaacgtcttctataggcccaaggataaacaagcccttgcagatcagaagaaggccaaattccaccagactgaaggggaccacctcaccctgctagctgtgtacaactcctggaagaacaacaagttctccaacccatggtgctatgagaactttatccaggctcgttccctgcgccgggcccaggacattcgcaagcagatgttaggcataatggacagacacaagctggatgttgtttcctgtggcaagtccacagtccgagtgcagaaggccatctgcagtgggttcttccgtaatgctgccaagaaagacccgcaggagggttaccggacactgatcgaccagcaggtggtctatatccatccttccagtgccctcttcaacagacagccagaatgcccaaagcacttcctccctgtggttgctgtagctgtctcattggagcagtgcctctccaagtttgaggatttgaacaaagaactgggactggtgacttgttaatgaacagttcagagggcagagggccatcatctcagcttgtggagacctttctttccctggatgctgcttctcagctaactccctctctcttcgtgtgtgtactcggccttcagggtttccaccgatttttacaccttcttcccaccacgatagcttggctttaatgtggaattaaattatatattttt

SEQ ID NO: 7942 - DNA, 4240 bp, Homo sapiens
  source 1..4240: mol_type = unassigned DNA
gcgagttgctgtgcgtttctctgttgtctcggtagaaggccagagtcacacacggtcctaagagctgggcaccaggaagcgaaggctgatctgaagaagacacttgaatcatgggtgacgttaaaaattttctgtatgcctggtgtggcaaaaggaagatgaccccatcctatgaaattagagcagtggggaacaaaaacaggcagaaattcatgtgtgaggttcaggtggaaggttataattacactggcatgggaaattccaccaataaaaaagatgcacaaagcaatgctgccagagactttgttaactatttggttcgaataaatgaaataaagagtgaagaagttccagcttttggggtagcatctccgcccccacttactgatactcctgacactacagcaaatgctgaaggagatttaccaacaaccatgggaggacctcttcctccacatctggctctcaaagcagaaaataattctgaggtaggggcctctggctatggtgttcctgggcccacctgggaccgaggagccaacttgaaggattactactcaagaaaggaagaacaagaagtgcaagcgactctagaatcagaagaagtggatttaaatgctgggcttcatggaaactggaccttggaaaatgctaaagctcgtctaaaccaatattttcagaaagaaaagatccaaggagaatataagtacacccaagtgggtcctgatcacaacaggagctttattgcagaaatgaccatttatatcaagcagctgggcagaaggatttttgcacgagaacatggatcaaataagaaattggcagcacagtcctgtgccctgtcacttgtcagacaactgtaccatcttggagtggttgaagcttactccggacttacaaagaagaaggaaggagagacagtggagccttacaaagtaaacctctctcaagatttagagcatcagctgcaaaacatcattcaagagctaaatcttgagattttgcccccgcctgaagatccttctgtgccagttgcactcaacattggcaaattggctcagttcgaaccatctcagcgacaaaaccaagtgggtgtggttccttggtcacctccacaatccaactggaatccttggactagtagcaacattgatgaggggcctctggcttttgctactccagagcaaataagcatggacctcaagaatgaattgatgtaccagttggaacaggatcatgatttgcaagcaatcttgcaggagagagagttactgcctgtgaagaaatttgaaagtgagattctggaagcaatcagccaaaattcagttgtcattattagaggggctactggatgtgggaaaaccacacaggttccccagttcattctagatgactttatccagaatgaccgagcagcagagtgtaacatcgtagtaactcagcccagaagaatcagtgcggtttctgtggcagagcgagttgcatttgaaagaggagaagagcctggaaaaagctgtggctacagcgttcgatttgagtctatacttcctcgtcctcatgccagtataatgttttgtactgtaggtgtgctcctgagaaaattagaagcaggcattcgaggaatcagtcatgtaattgtagatgaaatacatgaaagagatattaatactgacttccttttggtagtactgcgtgatgttgttcaggcttatcctgaagttcgcattgttcttatgtctgctactattgataccagcatgttttgtgaatatttcttcaattgccccatcattgaagtttatgggaggacttacccagttcaagaatattttctggaagactgcattcagatgacccactttgttcctccaccaaaagacaaaaagaagaaggataaggatgatgatggtggtgaggatgatgatgcaaattgcaacttgatctgtggtgatgaatatggtccagaaacaaggttgagcatgtctcaattgaacgaaaaggaaactccttttgaactcatcgaggctctacttaagtacattgaaacccttaatgttcctggagctgtgttggtttttttgcctggctggaatctgatttatactatgcagaagcatttggaaatgaatccacattttggaagccatcggtatcagattctacccctgcattctcagattcctcgagaggaacagcgcaaagtgtttgatccagtaccagttggagtaaccaaggttattttgtccacaaatattgctgaaacaagcattaccataaacgatgttgtttatgtcattgactcctgcaagcagaaagtgaaactcttcactgctcacaacaatatgaccaactatgctaccgtatgggcatcaaaaacaaaccttgagcaacggaaagggcgagctggccgagtacggcctggattctgctttcacctgtgcagccgagctcgttttgagagacttgaaacccacatgacaccagagatgttccgaacaccattgcatgaaattgctcttagcataaaacttctgcgtctaggaggaattggccaatttctggccaaagcaattgaacctccccctttggatgctgtgattgaagcagaacacactcttagagagcttgatgcattagatgccaatgatgagttgactcctttgggacgaatcctggctaaactccccattgagcctcgttttggcaaaatgatgataatggggtgtattttctacgtgggagatgctatctgtaccattgctgctgctacctgctttccagagcctttcatcaatgaaggaaagcggctgggctatatccatcgaaattttgctggaaacagattttctgatcacgtagcccttttatcagtattccaagcctgggatgatgctagaatgggtggagaagaagcagagatacgtttttgtgagcacaaaagacttaatatggctacactaagaatgacttgggaagccaaagttcagctcaaagagattttgattaattctgggtttccagaagattgtttgttgacacaagtgtttactaacactggaccagataataatttggatgttgttatctccctcctggcctttggtgtgtaccccaatgtatgctatcataaggaaaagaggaagattctcaccactgaagggcgtaatgcacttatccacaaatcatctgttaattgtccttttagtagccaagacatgaagtacccatctcccttctttgtatttggtgaaaagattcgaactcgagccatctctgctaaaggcatgactttagtcacccccctgcagttgcttctctttgcctccaagaaagtccaatctgatgggcagattgtgcttgtagatgactggattaaactgcaaatatctcatgaagctgctgcctgtatcactggtctccgggcagccatggaggctttggttgttgaagtaaccaaacaacctgctatcatcagccagttggaccccgtaaatgaacgtatgctgaacatgatccgtcagatctctagaccctcagctgctggtatcaaccttatgattggcagtacacggtatggagatggtccacgtcctcccaagatggcccgatacgacaatggaagcggatatagaaggggaggttctagttacagtggtggaggctatggcggtggctatagcagtggaggctatggtagcggaggctatggtggcagcgccaactcctttcgggcaggatatggtgcaggtgttggtggaggctatagaggagtttcccgaggtggctttagaggcaactctggaggagactacagagggcctagtggaggctacagaggatctgggggattccagcgaggaggtggtaggggggcctatggaactggctactttggacagggaagaggaggtggcggctattaaaacttggttatgtcagttcctgtgtgtagacagtaaggaaaaaaaggcatgctatgtgttacgtgttttttccagtatgtttatttgccaccaaaaagtaaatgcattttcacccattctgtggttcattgtagtttaaggaaaccaagcatatagatgcattagtgattttgtttatattatgtaaaatataacgatctcttaaaaataccacagtttgtattttttctttaaggagtaaagatttgcctttaaataacttggtattttcctggctttcgtttaatacaatagaaaataaagtattacaccgaata

SEQ ID NO: 7943 - DNA, 1972 bp, Homo sapiens
  source 1..1972: mol_type = unassigned DNA
atgcgtacgctcgctggccccgccccctagcgccgcggtcggagccatttcgccgattcctccatgcgagttgctgtgcgtttctctgttgtctcggtagaaggccagagtcacacacggtcctaagagctgggcaccaggaagcgaaggctgatctgaagaagacacttgaatcatgggtgacgttaaaaattttctgtatgcctggtgtggcaaaaggaagatgaccccatcctatgaaattagagcagtggggaacaaaaacaggcagaaattcatgtgtgaggttcaggtggaaggttataattacactggcatgggaaattccaccaataaaaaagatgcacaaagcaatgctgccagagactttgttaactatttggttcgaataaatgaaataaagagtgaagaagttccagcttttggggtagcatctccgcccccacttactgatactcctgacactacagcaaatgctgaaggagatttaccaacaaccatgggaggacctcttcctccacatctggctctcaaagcagaaaataattctgaggtaggggcctctggctatggtgttcctgggcccacctgggaccgaggagccaacttgaaggattactactcaagaaaggaagaacaagaagtgcaagcgactctagaatcagaagaagtggatttaaatgctgggcttcatggaaactggaccttggaaaatgctaaagctcgtctaaaccaatattttcagaaagaaaagatccaaggagaatataagtacacccaagtgggtcctgatcacaacaggagctttattgcagaaatgaccatttatatcaagcagctgggcagaaggatttttgcacgagaacatggatcaaataagaaattggcagcacagtcctgtgccctgtcacttgtcagacaactgtaccatcttggagtggttgaagcttactccggacttacaaagaagaaggaaggagagacagtggagccttacaaagtaaacctctctcaagatttagagcatcagctgcaaaacatcattcaagagctaaatcttgagattttgcccccgcctgaagatccttctgtgccagttgcactcaacattggcaaattggctcagttcgaaccatctcagcgacaaaaccaagtgggtgtggttccttggtcacctccacaatccaactggaatccttggactagtagcaacattgatgaggggcctctggcttttgctactccagagcaaataagcatggacctcaagaatgaattgatgtaccagttggaacaggatcatgatttgcaagcaatcttgcaggagagagagttactgcctgtgaagaaatttgaaagtgagattctggaagcaatcagccaaaattcagttgtcattattagaggggctactggatgtgggaaaaccacacaggttccccagttcattctagatgactttatccagaatgaccgagcagcagagtgtaacatcgtagtaactcagcccagaagaatcagtgcggtttctgtggcagagcgagttgcatttgaaagaggagaagagcctggaaaaagctgtggctacagcgttcgatttgagtctatacttcctcgtcctcatgccagtataatgttttgtactgtaggtgtgctcctgagaaaattagaagcaggcattcgaggaatcagtcatgtaattgtagatgaaatacatgaaagagatattaatactgacttccttttggtagtactgcgtgatgttgttcaggcttatcctgaagttcgcattgttcttatgtctgctactattgataccagcatgttttgtgaatatttcttcaattgccccatcattgaagtttatgggaggacttacccagttcaagaatattttctggaagactgcattcagatgacccactttgttcctccaccaaaagacaaaaagaagaaggataagaaaaagaag

SEQ ID NO: 7944 - DNA, 1649 bp, Homo sapiens
  source 1..1649: mol_type = unassigned DNA
ccttttttgcagtctcaggacgggcgctttggagccggccccaggcagcgtgtgtcggtcgcctagtctggagaactagtcctcgactcacggtgagggaatggaccgacacgggtattgtaccgctgagggaaaggagcgggactccggacctccaggagtgcaaggatgatgctgaaaggaataacaaggcttatctctaggatccataagttggaccctgggcgttttttacacatggggacccaggctcgccaaagcattgctgctcacctagataaccaggttccagttgagagtccgagagctatttcccgcaccaatgagaatgacccggccaagcatggggatcagcacgagggtcagcactacaacatctccccccaggatttggagactgtatttccccatggccttcctcctcgctttgtgatgcaggtgaagacattcagtgaagcttgcctgatggtaaggaaaccagccctagaacttctgcattacctgaaaaacaccagttttgcttatccagctatacgatatcttctgtatggagagaagggaacaggaaaaaccctaagtctttgccatgttattcatttctgtgcaaaacaggactggctgatactacatattccagatgctcatctttgggtgaaaaattgtcgggatcttctgcagtccagctacaacaaacagcgctttgatcaacctttagaggcttcaacctggctgaagaatttcaaaactacaaatgagcgcttcctgaaccagataaaagttcaagagaagtatgtctggaataagagagaaagcactgagaaagggagtcctctgggagaagtggttgaacagggcataacacgggtgaggaacgccacagatgcagttggaattgtgctgaaagagctaaagaggcaaagttctttgggtatgtttcacctcctagtggccgtggatggaatcaatgctctttggggaagaaccactctgaaaagagaagataaaagcccgattgcccccgaggaattagcacttgttcacaacttgaggaaaatgatgaaaaatgattggcatggaggcgccattgtgtcggctttgagccagactgggtctctctttaagccccggaaagcctatctgccccaggagttgctgggaaaggaaggatttgatgccctggatccctttattcccatcctggtttccaactataacccaaaggaatttgaaagttgtattcagtattatttggaaaacaattggcttcaacatgagaaagctcctacagaagaagggaaaaaagagctgctgttcctaagtaacgcgaacccctcgctgctggagcggcactgtgcctacctctaagccaagatcacagcatgtgaggaagacagtggacatctgctttatgctggacccagtaagatgaggaagtcgggcagtacacaggaagaggagccaggcccttgtacctatgggattggacaggactgcagttggctctggacctgcattaaaatgggtttcactgtgaatgcgtgacaataagatattcccttgttcctaaaactttatatcagtttattggatgtggtttttcacatttaagataattatggctcttttcctaaaaaataaaatatctttct

SEQ ID NO: 7945 - DNA, 2089 bp, Homo sapiens
  source 1..2089: mol_type = unassigned DNA
gtcgtttcctgccggatgacccgacccttttttgcagtctcaggacgggcgctttggagccggccccaggcagcgtgtgtcggtcgcctagtctggagaactagtcctcgactcacgtgcaaggatgatgctgaaaggaataacaaggcttatctctaggatccataagttggaccctgggcgttttttacacatggggacccaggctcgccaaagcattgctgctcacctagataaccaggttccagttgagagtccgagagctatttcccgcaccaatgagaatgacccggccaagcatggggatcagcacgagggtcagcactacaacatctccccccaggatttggagactgtatttccccatggccttcctcctcgctttgtgatgcaggtgaagacattcagtgaagcttgcctgatggtaaggaaaccagccctagaacttctgcattacctgaaaaacaccagttttgcttatccagctatacgatatcttctgtatggagagaagggaacaggaaaaaccctaagtctttgccatgttattcatttctgtgcaaaacaggactggctgatactacatattccagatgctcatctttgggtgaaaaattgtcgggatcttctgcagtccagctacaacaaacagcgctttgatcaacctttagaggcttcaacctggctgaagaatttcaaaactacaaatgagcgcttcctgaaccagataaaagttcaagagaagtatgtctggaataagagagaaagcactgagaaagggagtcctctgggagaagtggttgaacagggcataacacgggtgaggaacgccacagatgcagttggaattgtgctgaaagagctaaagaggcaaagttctttgggtatgtttcacctcctagtggccgtggatggaatcaatgctctttggggaagaaccactctgaaaagagaagataaaagcccgattgcccccgaggaattagcacttgttcacaacttgaggaaaatgatgaaaaatgattggcatggaggcgccattgtgtcggctttgagccagactgggtctctctttaagccccggaaagcctatctgccccaggagttgctgggaaaggaaggatttgatgccctggatccctttattcccatcctggtttccaactataacccaaaggaatttgaaagttgtattcagtattatttggaaaacaattggcttcaacatgagaaagctcctacagaagaagggaaaaaagagctgctgttcctaagtaacgcgaacccctcgctgctggagcggcactgtgcctacctctaagccaagatcacagcatgtgaggaagacagtggacatctgctttatgctggacccagtaagatgaggaagtcgggcagtacacaggaagaggagccaggcccttgtacctatgggattggacaggactgcagttggctctggacctgcattaaaatgggtttcactgtgaatgcgtgacaataagatattcccttgttcctaaaactttatatcagtttattggatgtggtttttcacatttaagataattatggctcttttcctaaaaaataaaatatctttctaaagtgttgtgttagattaataatatggaaggagtctttagattggccaaattgcatttctctgatattcctcttgttgcaggtcagaagagatcaattctacagaaatttccagtggttctgttgaggctttatggaattcagcatgtcaaaattcacagctggctgggcacagtggctcatgcctgtaatcccagcactttggaagcccaaggcgggcagactgcttgagttcaggagtttgcaaccagcctgggcaacatggtgaaaacctgtctctactaaaaatacaaaaattagccgggcacggtggcatgcgcctgtaatccaagctacttgggaggctgaggcaggagaattgcttcaacttgggaggcggatgttgcagtgagccaaaattgcaccactgcactccagcctgggcagcagagcaagactccgtctcaaaataaataaataaataaataaataaataaataataaa

SEQ ID NO: 7946 - DNA, 1470 bp, Homo sapiens
  source 1..1470: mol_type = unassigned DNA
gcagtctcaggacgggcgctttggagccggccccaggcagcgtgtgtcggtcgcctagtctggagaactagtcctcgactcacgtgcaaggatgatgctgaaaggaataacaaggcttatctctaggatccataagttggaccctgggcgttttttacacatggggacccaggctcgccaaagcattgctgctcacctagataaccaggttccagttgagagtccgagagctatttcccgcaccaatgagaatgacccggtgaagacattcagtgaagcttgcctgatggtaaggaaaccagccctagaacttctgcattacctgaaaaacaccagttttgcttatccagctatacgatatcttctgtatggagagaagggaacaggaaaaaccctaagtctttgccatgttattcatttctgtgcaaaacaggactggctgatactacatattccagatgctcatctttgggtgaaaaattgtcgggatcttctgcagtccagctacaacaaacagcgctttgatcaacctttagaggcttcaacctggctgaagaatttcaaaactacaaatgagcgcttcctgaaccagataaaagttcaagagaagtatgtctggaataagagagaaagcactgagaaagggagtcctctgggagaagtggttgaacagggcataacacgggtgaggaacgccacagatgcagttggaattgtgctgaaagagctaaagaggcaaagttctttgggtatgtttcacctcctagtggccgtggatggaatcaatgctctttggggaagaaccactctgaaaagagaagataaaagcccgattgcccccgaggaattagcacttgttcacaacttgaggaaaatgatgaaaaatgattggcatggaggcgccattgtgtcggctttgagccagactgggtctctctttaagccccggaaagcctatctgccccaggagttgctgggaaaggaaggatttgatgccctggatccctttattcccatcctggtttccaactataacccaaaggaatttgaaagttgtattcagtattatttggaaaacaattggcttcaacatgagaaagctcctacagaagaagggaaaaaagagctgctgttcctaagtaacgcgaacccctcgctgctggagcggcactgtgcctacctctaagccaagatcacagcatgtgaggaagacagtggacatctgctttatgctggacccagtaagatgaggaagtcgggcagtacacaggaagaggagccaggcccttgtacctatgggattggacaggactgcagttggctctggacctgcattaaaatgggtttcactgtgaatgcgtgacaataagatattcccttgttcctaaaactttatatcagtttattggatgtggtttttcacatttaagataattatggctcttttcctaaaaaataaaatatctttct

SEQ ID NO: 7947 - DNA, 1449 bp, Homo sapiens
  source 1..1449: mol_type = unassigned DNA
gcagtctcaggacgggcgctttggagccggccccaggcagcgtgtgtcggtcgcctagtctggagaactagtcctcgactcacgtgcaaggatgatgctgaaaggaataacaaggcttatctctaggatccataaggccaagcatggggatcagcacgagggtcagcactacaacatctccccccaggatttggagactgtatttccccatggccttcctcctcgctttgtgatgcaggtgaagacattcagtgaagcttgcctgatggtaaggaaaccagccctagaacttctgcattacctgaaaaacaccagttttgcttatccagctatacgatatcttctgtatggagagaagggaacaggaaaaaccctaagtctttgccatgttattcatttctgtgcaaaacaggactggctgatactacatattccagatgctcatctttgggtgaaaaattgtcgggatcttctgcagtccagctacaacaaacagcgctttgatcaacctttagaggcttcaacctggctgaagaatttcaaaactacaaatgagcgcttcctgaaccagataaaagttcaagagaagtatgtctggaataagagagaaagcactgagaaagggagtcctctgggagaagtggttgaacagggcataacacgggtgaggaacgccacagatgcagttggaattgtgctgaaagagctaaagaggcaaagttctttgggtatgtttcacctcctagtggccgtggatggaatcaatgctctttggggaagaaccactctgaaaagagaagataaaagcccgattgcccccgaggaattagcacttgttcacaacttgaggaaaatgatgaaaaatgattggcatggaggcgccattgtgtcggctttgagccagactgggtctctctttaagccccggaaagcctatctgccccaggagttgctgggaaaggaaggatttgatgccctggatccctttattcccatcctggtttccaactataacccaaaggaatttgaaagttgtattcagtattatttggaaaacaattggcttcaacatgagaaagctcctacagaagaagggaaaaaagagctgctgttcctaagtaacgcgaacccctcgctgctggagcggcactgtgcctacctctaagccaagatcacagcatgtgaggaagacagtggacatctgctttatgctggacccagtaagatgaggaagtcgggcagtacacaggaagaggagccaggcccttgtacctatgggattggacaggactgcagttggctctggacctgcattaaaatgggtttcactgtgaatgcgtgacaataagatattcccttgttcctaaaactttatatcagtttattggatgtggtttttcacatttaagataattatggctcttttcctaaaaaataaaatatctttct

SEQ ID NO: 7948 - DNA, 1256 bp, Homo sapiens
  source 1..1256: mol_type = unassigned DNA
gggaaattaagtttcttgcggagtacggtggggattgcagctgctgagcagggattctggaaagcattgcgtacctgagcccccagcatggcgggcctaaagcggcgggcaagccaggtgtggccagaagagcatggtgagcaggaacatgggctgtacagcctgcaccgcatgtttgacatcgtgggcactcatctgacacacagagatgtgcgcgtgctttctttcctctttgttgatgtcattgatgaccacgagcgtggactcatccgaaatggacgtgacttcttattggcactggagcgccagggccgctgtgatgaaagtaactttcgccaggtgctgcagctgctgcgcatcatcactcgccacgacctgctgccctacgtcaccctcaagaggagacgggctgtgtgccctgatcttgtagacaagtatctggaggagacatcaattcgctatgtgacccccagagccctcagtgatccagaaccaaggcctccccagccctctaaaacagtgcctccccactatcctgtggtgtgttgccccacttcgggtcctcagatgtgtagcaagcggccagcccgagggagagccacacttgggagccagcgaaaacgccggaagtcagtgacaccagatcccaaggagaagcagacatgtggtgaggaagttcaagggttccagagatggagcagacttgaaggagaatataaagaactgctgggacactgggcagtttatgctattcagtacatcagactgcgggttcgggctgaatactgccagcatgagactgctctgcagggcaatgtcttctctaacaagcaggacccacttgagcgccagtttgagcgctttaaccaggccaacaccatcctcaagtcccgggacctgggctccatcatctgtgacatcaagttctctgagctcacctacctcgatgcattctggcgtgactacatcaatggctctttattagaggcacttaaaggtgtcttcatcacagactccctcaagcaagctgtgggccatgaagccatcaagctgctggtaaatgtagacgaggaggactatgagctgggccgacagaaactcctgaggaacttgatgctgcaagcattgccctgacctattccctcttctcactttggggactgttcccatcacccacctctggagcttacactgttctggggtttgttctctacccttccaaccaatcacacccctgccttttttttttttttttt

SEQ ID NO: 7949 - DNA, 2345 bp, Homo sapiens
  source 1..2345: mol_type = unassigned DNA
cacggccgcggcggcggcggcggcggcggctgctggagcccggatgcggcgccgtgaggcaggcccgggagagcggcgcggatggatccaacatggcggcgccgagcctgagccgagagaagagacctgggaaattaagtttcttgcggagtacggtggggattgcagctgctgagcagggattctggaaagcattgcgtacctgagcccccagcatggcgggcctaaagcggcgggcaagccaggtgtggccagaagagcatggtgagcaggaacatgggctgtacagcctgcaccgcatgtttgacatcgtgggcactcatctgacacacagagatgtgcgcgtgctttctttcctctttgttgatgtcattgatgaccacgagcgtggactcatccgaaatggacgtgacttcttattggcactggagcgccagggccgctgtgatgaaagtaactttcgccaggtgctgcagctgctgcgcatcatcactcgccacgacctgctgccctacgtcaccctcaagaggagacgggctgtgtgccctgatcttgtagacaagtatctggaggagacatcaattcgctatgtgacccccagagccctcagtgatccagaaccaaggcctccccagccctctaaaacagtgcctccccactatcctgtggtgtgttgccccacttcgggtcctcagatgtgtagcaagcggccagcccgagggagagccacacttgggagccagcgaaaacgccggaagtcagtgacaccagatcccaaggagaagcagacatgtgacatcagactgcgggttcgggctgaatactgccagcatgagactgctctgcagggcaatgtcttctctaacaagcaggacccacttgagcgccagtttgagcgctttaaccaggccaacaccatcctcaagtcccgggacctgggctccatcatctgtgacatcaagttctctgagctcacctacctcgatgcattctggcgtgactacatcaatggctctttattagaggcacttaaaggtgtcttcatcacagactccctcaagcaagctgtgggccatgaagccatcaagctgctggtaaatgtagacgaggaggactatgagctgggccgacagaaactcctgaggaacttgatgctgcaagcattgccctgacctattccctcttctcactttggggactgttcccatcacccacctctggagcttacactgttctggggtttgttctctacccttccaaccaatcacacccctgcctttttttttttttttttaaagaaaaagacaaaagaaagtggaagtggtattccccacccctccctgcacccatgtgcctgggcttcccctttatttcccttttccatttaccccgtaatgtgtctctacagctaccttaccactgagccgtaagacaaatgtataggaagaagcaaagtctacagcacatagtctttgtaagggattgatgtgaacacttttttttggatgcactaaggagttatcaatacttctggctttatgagagctcttaaattttgtctaaaaaaccaaagggctgtgagtaagggagctatgtggaaagtgggactctgaagtgtattttgaaaattaatcgccaccctcttccaaattatagaattttttaaaaacaagctgtggccctttccactctctcctggcctctggtgctgctcctctctgccgcctttcctccattccatggcttgaaacctctgcctgatgtggctccttcctttttcccatttgtcaaaccctcttcaaaggaggaacagataagactgggtcagcctagtcatgcctcccaactgtggtggtatatgtgtacacacatacacagggtggatggagaagaggttgctgattaaaatacactccccctataaaggggaagggggagtgtgacactttctttccatgttcaagtgaaaataaataatgtaccctgcagcccttttcccctttgctttcttctggcttgggcaaagggcatcataggtgtaagtgaagtaattcctttttccttccccctcctccactcctacgcccactcccatgcttgggagaatggggctgggacatgcactgagtgttgcacttttatttaggtagggaggcatgttgaatgagccaggaggtctagaactggagcttagtccagctggtacaataccaactccccttctagttcccaaaggcgatgtccagacacagactttatgattattatatttttcaatgccagtgctgctcagccctcagcagaacttcagtttccatgaaataaacaatgactatataaaattc

SEQ ID NO: 7950 - DNA, 2452 bp, Homo sapiens
  source 1..2452: mol_type = unassigned DNA
cgcccgcctgtcccctcccccacggccgcggcggcggcggcggcggcggctgctggagcccggatgcggcgccgtgaggcaggcccgggagagcggcgcggatggatccaacatggcggcgccgagcctgagccgagagaagagacctgggaaattaagtttcttgcggagtacggtggggattgcagctgctgagcagggattctggaaagcattgcgtacctgagcccccagcatggcgggcctaaagcggcgggcaagccaggtgtggccagaagagcatggtgagcaggaacatgggctgtacagcctgcaccgcatgtttgacatcgtgggcactcatctgacacacagagatgtgcgcgtgctttctttcctctttgttgatgtcattgatgaccacgagcgtggactcatccgaaatggacgtgacttcttattggcactggagcgccagggccgctgtgatgaaagtaactttcgccaggtgctgcagctgctgcgcatcatcactcgccacgacctgctgccctacgtcaccctcaagaggagacgggctgtgtgccctgatcttgtagacaagtatctggaggagacatcaattcgctatgtgacccccagagccctcagtgatccagaaccaaggcctccccagccctctaaaacagtgcctccccactatcctgtggtgtgttgccccacttcgggtcctcagatgtgtagcaagcggccagcccgagggagagccacacttgggagccagcgaaaacgccggaagtcagtgacaccagatcccaaggagaagcagacatgtggtgaggaagttcaagggttccagagatggagcagacttgaaggagaatataaagaactgctgggacactgggcagtttatgctattcagtacatcagactgcgggttcgggctgaatactgccagcatgagactgctctgcagggcaatgtcttctctaacaagcaggacccacttgagcgccagtttgagcgctttaaccaggccaacaccatcctcaagtcccgggacctgggctccatcatctgtgacatcaagttctctgagctcacctacctcgatgcattctggcgtgactacatcaatggctctttattagaggcacttaaaggtgtcttcatcacagactccctcaagcaagctgtgggccatgaagccatcaagctgctggtaaatgtagacgaggaggactatgagctgggccgacagaaactcctgaggaacttgatgctgcaagcattgccctgacctattccctcttctcactttggggactgttcccatcacccacctctggagcttacactgttctggggtttgttctctacccttccaaccaatcacacccctgcctttttttttttttttttaaagaaaaagacaaaagaaagtggaagtggtattccccacccctccctgcacccatgtgcctgggcttcccctttatttcccttttccatttaccccgtaatgtgtctctacagctaccttaccactgagccgtaagacaaatgtataggaagaagcaaagtctacagcacatagtctttgtaagggattgatgtgaacacttttttttggatgcactaaggagttatcaatacttctggctttatgagagctcttaaattttgtctaaaaaaccaaagggctgtgagtaagggagctatgtggaaagtgggactctgaagtgtattttgaaaattaatcgccaccctcttccaaattatagaattttttaaaaacaagctgtggccctttccactctctcctggcctctggtgctgctcctctctgccgcctttcctccattccatggcttgaaacctctgcctgatgtggctccttcctttttcccatttgtcaaaccctcttcaaaggaggaacagataagactgggtcagcctagtcatgcctcccaactgtggtggtatatgtgtacacacatacacagggtggatggagaagaggttgctgattaaaatacactccccctataaaggggaagggggagtgtgacactttctttccatgttcaagtgaaaataaataatgtaccctgcagcccttttcccctttgctttcttctggcttgggcaaagggcatcataggtgtaagtgaagtaattcctttttccttccccctcctccactcctacgcccactcccatgcttgggagaatggggctgggacatgcactgagtgttgcacttttatttaggtagggaggcatgttgaatgagccaggaggtctagaactggagcttagtccagctggtacaataccaactccccttctagttcccaaaggcgatgtccagacacagactttatgattattatatttttcaatgccagtgctgctcagccctcagcagaacttcagtttccatgaaataaacaatgactatataaaa

SEQ ID NO: 7951 - DNA, 2300 bp, Homo sapiens
  source 1..2300: mol_type = unassigned DNA
aggaaagtggagggggaggcggtggcgacgtccagcctgagaacctcaagagagggaggtgacgggacgctgagaggaagagacctgggaaattaagtttcttgcggagtacggtggggattgcagctgctgagcagggattctggaaagcattgcgtacctgagcccccagcatggcgggcctaaagcggcgggcaagccaggtgtggccagaagagcatggtgagcaggaacatgggctgtacagcctgcaccgcatgtttgacatcgtgggcactcatctgacacacagagatgtgcgcgtgctttctttcctctttgttgatgtcattgatgaccacgagcgtggactcatccgaaatggacgtgacttcttattggcactggagcgccagggccgctgtgatgaaagtaactttcgccaggtgctgcagctgctgcgcatcatcactcgccacgacctgctgccctacgtcaccctcaagaggagacgggctgtgtgccctgatcttgtagacaagtatctggaggagacatcaattcgctatgtgacccccagagccctcagtgatccagaaccaaggcctccccagccctctaaaacagtgcctccccactatcctgtggtgtgttgccccacttcgggtcctcagatgtgtagcaagcggccagcccgagggagagccacacttgggagccagcgaaaacgccggaagtcagtgacaccagatcccaaggagaagcagacatgtgacatcagactgcgggttcgggctgaatactgccagcatgagactgctctgcagggcaatgtcttctctaacaagcaggacccacttgagcgccagtttgagcgctttaaccaggccaacaccatcctcaagtcccgggacctgggctccatcatctgtgacatcaagttctctgagctcacctacctcgatgcattctggcgtgactacatcaatggctctttattagaggcacttaaaggtgtcttcatcacagactccctcaagcaagctgtgggccatgaagccatcaagctgctggtaaatgtagacgaggaggactatgagctgggccgacagaaactcctgaggaacttgatgctgcaagcattgccctgacctattccctcttctcactttggggactgttcccatcacccacctctggagcttacactgttctggggtttgttctctacccttccaaccaatcacacccctgcctttttttttttttttttaaagaaaaagacaaaagaaagtggaagtggtattccccacccctccctgcacccatgtgcctgggcttcccctttatttcccttttccatttaccccgtaatgtgtctctacagctaccttaccactgagccgtaagacaaatgtataggaagaagcaaagtctacagcacatagtctttgtaagggattgatgtgaacacttttttttggatgcactaaggagttatcaatacttctggctttatgagagctcttaaattttgtctaaaaaaccaaagggctgtgagtaagggagctatgtggaaagtgggactctgaagtgtattttgaaaattaatcgccaccctcttccaaattatagaattttttaaaaacaagctgtggccctttccactctctcctggcctctggtgctgctcctctctgccgcctttcctccattccatggcttgaaacctctgcctgatgtggctccttcctttttcccatttgtcaaaccctcttcaaaggaggaacagataagactgggtcagcctagtcatgcctcccaactgtggtggtatatgtgtacacacatacacagggtggatggagaagaggttgctgattaaaatacactccccctataaaggggaagggggagtgtgacactttctttccatgttcaagtgaaaataaataatgtaccctgcagcccttttcccctttgctttcttctggcttgggcaaagggcatcataggtgtaagtgaagtaattcctttttccttccccctcctccactcctacgcccactcccatgcttgggagaatggggctgggacatgcactgagtgttgcacttttatttaggtagggaggcatgttgaatgagccaggaggtctagaactggagcttagtccagctggtacaataccaactccccttctagttcccaaaggcgatgtccagacacagactttatgattattatatttttcaatgccagtgctgctcagccctcagcagaacttcagtttccatgaaataaacaatgactatataaaa

SEQ ID NO: 7952 - DNA, 1042 bp, Homo sapiens
  source 1..1042: mol_type = unassigned DNA
atggatccaacatggcggcgccgagcctgagccgagagaagagacctgggaaattaagtttcttgcggagtacggtggggattgcagctgctgagcagggattctggaaagcattgcgtacctgagcccccagcatggcgggcctaaagcggcgggcaagccaggtgtggccagaagagcatggtgagcaggaacatgggctgtacagcctgcaccgcatgtttgacatcgtgggcactcatctgacacacagagatgtgctgcagctgctgcgcatcatcactcgccacgacctgctgccctacgtcaccctcaagaggagacgggctgtgtgccctgatcttgtagacaagtatctggaggagacatcaattcgctatgtgacccccagagccctcagtgatccagaaccaaggcctccccagccctctaaaacagtgcctccccactatcctgtggtgtgttgccccacttcgggtcctcagatgtgtagcaagcggccagcccgagggagagccacacttgggagccagcgaaaacgccggaagtcagtgacaccagatcccaaggagaagcagacatgtgacatcagactgcgggttcgggctgaatactgccagcatgagactgctctgcagggcaatgtcttctctaacaagcaggacccacttgagcgccagtttgagcgctttaaccaggccaacaccatcctcaagtcccgggacctgggctccatcatctgtgacatcaagttctctgagctcacctacctcgatgcattctggcgtgactacatcaatggctctttattagaggcacttaaaggtgtcttcatcacagactccctcaagcaagctgtgggccatgaagccatcaagctgctggtaaatgtagacgaggaggactatgagctgggccgacagaaactcctgaggaacttgatgctgcaagcattgccctgacctattccctcttctcactttggggactgttcccatcacccacctctggagcttacactgttctggggtttgttctctac

SEQ ID NO: 7953 - DNA, 1828 bp, Homo sapiens
  source 1..1828: mol_type = unassigned DNA
gcgatccgctcgtattgaagggggaagagacctgggaaattaagtttcttgcggagtacggtggggattgcagctgctgagcagggattctggaaagcattgcgtacctgagcccccagcatggcgggcctaaagcggcgggcaagccaggtgtggccagaagagcatggtgagcaggaacatgggctgtacagcctgcaccgcatgtttgacatcgtgggcactcatctgacacacagagatgtgcgcgtgctttctttcctctttgttgatgtcattgatgaccacgagcgtggactcatccgaaatggacgtgacttcttattggcactggagcgccagggccgctgtgatgaaagtaactttcgccaggtgctgcagctgctgcgcatcatcactcgccacgacctgctgccctacgtcaccctcaagaggagacgggctgtgtgccctgatcttgtagacaagtatctggaggagacatcaattcgctatgtgacccccagagccctcagtgatccagaaccaaggcctccccagccctctaaaacagtgcctccccactatcctgtggtgtgttgccccacttcgggtcctcagatgtgtagcaagcggccagcccgagggagagccacacttgggagccagcgaaaacgccggaagtcagtgacaccagatcccaaggagaagcagacatgtgacatcagactgcgggttcgggctgaatactgccagcatgagactgctctgcagggcaatgtcttctctaacaagcaggacccacttgagcgccagtttgagcgctttaaccaggccaacaccatcctcaagtcccgggacctgggctccatcatctgtgacatcaagttctctgagctcacctacctcgatgcattctggcgtgactacatcaatggctctttattagaggcacttaaaggtgtcttcatcacagactccctcaagcaagctgtgggccatgaagccatcaagctgctggtaaatgtagacgaggaggactatgagctgggccgacagaaactcctgaggaacttgatgctgcaagcattgccctgacctattccctcttctcactttggggactgttcccatcacccacctctggagcttacactgttctggggtttgttctctacccttccaaccaatcacacccctccctgcacccatgtgcctgggcttcccctttatttcccttttccatttaccccgtaatgtgtctctacagctaccttaccactgagccgtaagacaaatgtataggaagaagcaaagtctacagcacatagtctttgtaagggattgatgtgaacacttttttttggatgcactaaggagttatcaatacttctggctttatgagagctcttaaattttgtctaaaaaaccaaagggctgtgagtaagggagctatgtggaaagtgggactctgaagtgtattttgaaaattaatcgccaccctcttccaaattatagaattttttaaaaacaagctgtggccctttccactctctcctggcctctggtgctgctcctctctgccgcctttcctccattccatggcttgaaacctctgcctgatgtggctccttcctttttcccatttgtcaaaccctcttcaaaggaggaacagataagactgggtcagcctagtcatgcctcccaactgtggtggtatatgtgtacacacatacacagggtggatggagaagaggttgctgattaaaatacactccccctataaaggggaagggggagtgtgacactttctttccatgttcaagtgaaaataaataatgtaccctgc

SEQ ID NO: 7954 - DNA, 2329 bp, Homo sapiens
  source 1..2329: mol_type = unassigned DNA
cgcccgcctgtcccctcccccacggccgcggcggcggcggcggcggcggctgctggagcccggatgcggcgccgtgaggcaggcccgggagagcggcgcggatggatccaacatggcggcgccgagcctgagccgagatacggtggggattgcagctgctgagcagggattctggaaagcattgcgtacctgagcccccagcatggcgggcctaaagcggcgggcaagccaggtgtggccagaagagcatggtgagcaggaacatgggctgtacagcctgcaccgcatgtttgacatcgtgggcactcatctgacacacagagatgtgcgcgtgctttctttcctctttgttgatgtcattgatgaccacgagcgtggactcatccgaaatggacgtgacttcttattggcactggagcgccagggccgctgtgatgaaagtaactttcgccaggtgctgcagctgctgcgcatcatcactcgccacgacctgctgccctacgtcaccctcaagaggagacgggctgtgtgccctgatcttgtagacaagtatctggaggagacatcaattcgctatgtgacccccagagccctcagtgatccagaaccaaggcctccccagccctctaaaacagtgcctccccactatcctgtggtgtgttgccccacttcgggtcctcagatgtgtagcaagcggccagcccgagggagagccacacttgggagccagcgaaaacgccggaagtcagtgacaccagatcccaaggagaagcagacatgtgacatcagactgcgggttcgggctgaatactgccagcatgagactgctctgcagggcaatgtcttctctaacaagcaggacccacttgagcgccagtttgagcgctttaaccaggccaacaccatcctcaagtcccgggacctgggctccatcatctgtgacatcaagttctctgagctcacctacctcgatgcattctggcgtgactacatcaatggctctttattagaggcacttaaaggtgtcttcatcacagactccctcaagcaagctgtgggccatgaagccatcaagctgctggtaaatgtagacgaggaggactatgagctgggccgacagaaactcctgaggaacttgatgctgcaagcattgccctgacctattccctcttctcactttggggactgttcccatcacccacctctggagcttacactgttctggggtttgttctctacccttccaaccaatcacacccctgcctttttttttttttttttaaagaaaaagacaaaagaaagtggaagtggtattccccacccctccctgcacccatgtgcctgggcttcccctttatttcccttttccatttaccccgtaatgtgtctctacagctaccttaccactgagccgtaagacaaatgtataggaagaagcaaagtctacagcacatagtctttgtaagggattgatgtgaacacttttttttggatgcactaaggagttatcaatacttctggctttatgagagctcttaaattttgtctaaaaaaccaaagggctgtgagtaagggagctatgtggaaagtgggactctgaagtgtattttgaaaattaatcgccaccctcttccaaattatagaattttttaaaaacaagctgtggccctttccactctctcctggcctctggtgctgctcctctctgccgcctttcctccattccatggcttgaaacctctgcctgatgtggctccttcctttttcccatttgtcaaaccctcttcaaaggaggaacagataagactgggtcagcctagtcatgcctcccaactgtggtggtatatgtgtacacacatacacagggtggatggagaagaggttgctgattaaaatacactccccctataaaggggaagggggagtgtgacactttctttccatgttcaagtgaaaataaataatgtaccctgcagcccttttcccctttgctttcttctggcttgggcaaagggcatcataggtgtaagtgaagtaattcctttttccttccccctcctccactcctacgcccactcccatgcttgggagaatggggctgggacatgcactgagtgttgcacttttatttaggtagggaggcatgttgaatgagccaggaggtctagaactggagcttagtccagctggtacaataccaactccccttctagttcccaaaggcgatgtccagacacagactttatgattattatatttttcaatgccagtgctgctcagccctcagcagaacttcagtttccatgaaataaacaatgactatataaaa

SEQ ID NO: 7955 - DNA, 2339 bp, Homo sapiens
  source 1..2339: mol_type = unassigned DNA
ggctgcgccacgtcggcgcgcggcggccgcgcccccttaacggcagtggcactcacccggctcgcgcggccccggcgccccacgcgcgcgcgtcgttctcccgcccgctcgctccccggcgctcacacctgagctcactcgcgcacgcccgcccggcccgagaaccgcgccgccgcctcggccccgcggaagccccgccgcgtcatgtcttcgcctcccgaagggaaactagagactaaagctggacacccgcccgccgtgaaagctggtggaatgcgaattgtgcagaaacacccacatacaggagacaccaaagaagagaaagacaaggatgaccaggaatgggaaagccccagtccacctaaacccactgtgttcatctctggggtcatcgcccggggtgacaaagatttccccccggcggctgcgcaggtggctcaccagaagccgcatgcctccatggacaagcatccttccccaagaacccagcacatccagcagccacgcaagtgagcctggagtccaccagcctgccccatggccccggctctgctgcacttggtatttccctgacagagagaaccagcagtttcgcccaaatcctactctgctgggaaatctaaggcaaaaccaagtgctctgtcctttgccttacatttccatatttaaaactagaaacagctccagcccaaaccttgtttatggggagtctggttggatgtcatttgaggatcattgtgcccctagaggtgccattagcagaatttgccaagatccgagaaaaattttagctttagttctatttcagcagtcacctgacgtccttgtctatggtcttaaaaacaagaaggcacacatttgagaagatgagattaaggttaggagaaaacctcagtcattgcatgctttttagtatgggccaataaaatctcaacacctgtgggagagtaagaactaagggaatgagtttgggcggcccctcataaaggaccttagaggcagggaacagcaatgccaaatttccctctctcgtgagatgggggatcctgtgcaggctgatgaggcacccatgagaaaagccgaaaaagcatgcatcttagaaatagcccctcaattccaggagtcaacatgccaaagaatgaggctggagacaggtagctccgagggaggacttctggcatgagatctcggcacggcaagcccagcatcgcctcagcccagacaggctccaccaggagatcaagcaagggctgcctttcaggagtcacctcctgagccacttcagagttctggaagtgaccacggaccagggtggaggaatagacttctagttcattctgggacacttgagccagagagttgaaagcttggaaagaccagataagaaacctgccctttgtctccctagggacatgagacaccacattccatttgtgctagaaaaacctatccactgatgagtctaactgttccaaacgcctcccacctggtgtgcacagctgcctgggtccattgtcacttgggtgcatcaggttgtcctccgatttttagatgagtttcctgtctagagatgtcctagtctgctcactggctggtggcagtagggtaccctgcgtcctcgaaaagccagagggttcacctagtcagacgaaactccagaacagtgcttgtggagggcctgactgtcctgctcacccacagccgatctgctgcaggtcagcaactgtgtcgtgagcagctgccaaccaccagcctttctggtgctgttctccagttcacgtctgccagctggtgagggcagaggcagacctggtcagacccagcgcccctcctccctgagggagcatggcacagcctcacacttgaaagacggtgtttggtttcccatctaatcaacttaagggaagccggcatgtacccttcaaggccctgtcaccacctatttcctgatcagttggtataaactgagggtggcttttagagacccagacttggttggcagcgctgccatggaacaccccagcaagcacctcccagcctgcctttcggagcagcacccaggaggggatgccgcgctccagcaacaccaggtcaggcctgtgcagacccctgccctgccgctgcagaaatccagaagcatccttaatgcttctcagtcttcagccagagggagggctgttatttccagaggtgcgctttttatgtacttttagctagatgtggcatgcatctgtgagctttagatcattaaatccaaaatgtttgcctaaatgagtttatcagttgttaacttcaagaatattaaatgatttataataaagctcctgcatttctctcca

SEQ ID NO: 7956 - DNA, 2603 bp, Homo sapiens
  source 1..2603: mol_type = unassigned DNA
gattgtatgttccaggcctcaatgaggagtccaaacatggagccattcaagcagcagaaggtggaggacttttatgacatcggagaggagctggggagtggccagtttgccatcgtgaagaagtgccgggagaagagcacggggcttgagtatgcagccaagttcatcaagaagcggcagagccgggcgagccggcgcggtgtgagccgggaggagatcgagcgggaggtgagcatcctgcggcaggtgctgcaccacaatgtcatcacgctgcacgacgtctatgagaaccgcaccgacgtggtgctcatccttgagctagtgtctggaggagagctcttcgatttcctggcccagaaggagtcactgagtgaggaggaggccaccagcttcattaagcagatcctggatggggtgaactaccttcacacaaagaaaattgctcactttgatctcaagccagaaaacattatgttgttagacaagaatattcccattccacacatcaagctgattgactttggtctggctcacgaaatagaagatggagttgaatttaagaatatttttgggacgccggaatttgttgctccagaaattgtgaactacgagcccctgggtctggaggctgacatgtggagcataggcgtcatcacctacatcctcttaagtggagcatcccctttcctgggagacacgaagcaggaaacactggcaaatatcacagcagtgagttacgactttgatgaggaattcttcagccagacgagcgagctggccaaggactttattcggaagcttctggttaaagagacccggaaacggctcacaatccaagaggctctcagacacccctggatcacgccggtggacaaccagcaagccatggtgcgcagggagtctgtggtcaatctggagaacttcaggaagcagtatgtccgcaggcggtggaagctttccttcagcatcgtgtccctgtgcaaccacctcacccgctcgctgatgaagaaggtgcacctgaggccggatgaggacctgaggaactgtgagagtgacactgaggaggacatcgccaggaggaaagccctccacccacggaggaggagcagcacctcctaactggcctgacctgcagtggccgccagggaggtctgggcccagcggggctcccttctgtgcagacttttggacccagctcagcaccagcacccgggcgtcctgagcactttgcaagagagatgggcccaaggaattcagaagagcttgcaggcaagccaggagaccctgggagctgtggctgtcttctgtggaggaggctccagcattcccaaagctcttaattctccataaaatgggctttcctctgtctgccatcctcagagtctggggtgggagtgtggacttaggaaaacaatataaaggacatcctcatcatcacggggtgaaggtcagactaaggcagccttcttcacaggctgagggggttcagaaccagcctggccaaaaattacaccagagagacagagtcctccccattgggaacagggtgattgaggaaagtgaaccttgggtgtgagggaccaatcctgtgacctcccagaaccatggaagccaggacgtcaggctgaccaacacctcagaccttctgaagcagcccattgctggcccgccatgttgtaattttgctcatttttattaaacttctggtttacctgatgcttggcttcttttagggctacccccatctcatttcctttagcccgtgtgcctgtaactctgagggggggcacccagtggggtgctgagtgggcagaatctcagaaggtcctcctgaaccgtccgcgcaggcctgcagtgggcctgcctcctccttgcttccctaacaggaaggtgtccagttcaagagaacccacccagagactgggagtggtggctcacgcctataatccctgcgctttggcagtccgaggcaggggaattgcttgaactcaggagttggagaccagcctgggcaacatggcaaaacgcagtctgtacaaaaaatacaaaaaattagccaggtgtaggggtaggcacctggcatcccagctactccaggggctgaggtgacagcattgcttaagcccagaaggtcgaggctgcagtgagctgagatcacgccactgcactccagtctgggtgacagagagagaccatatccaaaaaaaaaaaaagttgccagagacgagtatgcccatgctccctctacctcactgccaccactcctgctgttaggagctgagtgtgtctccctaaaatttctatgttgaagtcttaacccttggtaccacagaatatcactgtatttggagatggggtctttagaaaggcacttaaattaaaatgagctcactgatatgggccccgatgcaatataattggtgtccttataagaaggggaggttaggacacgcaggaaagaccacatgaaggcccaggagtgggagggggaatagccatcgacaaactaagggggcctcagaggaaaccaaccctgctgacacctcaatcttagactctggcctcaaaaattgtaagaaaataaacttctgtcttttaagcca

SEQ ID NO: 7957 - DNA, 1741 bp, Homo sapiens
  source 1..1741: mol_type = unassigned DNA
gaccgcggcagctcagcctcccgccgattgtatgttccaggcctcaatgaggagtccaaacatggagccattcaagcagcagaaggtggaggacttttatgacatcggagaggagctggggagtggccagtttgccatcgtgaagaagtgccgggagaagagcacggggcttgagtatgcagccaagttcatcaagaagcggcagagccgggcgagccggcgcggtgtgagccgggaggagatcgagcgggaggtgagcatcctgcggcaggtgctgcaccacaatgtcatcacgctgcacgacgtctatgagaaccgcaccgacgtggtgctcatccttgagctagtgtctggaggagagctcttcgatttcctggcccagaaggagtcactgagtgaggaggaggccaccagcttcattaagcagatcctggatggggtgaactaccttcacacaaagaaaattgctcactttgatctcaagccagaaaacattatgttgttagacaagaatattcccattccacacatcaagctgattgactttggtctggctcacgaaatagaagatggagttgaatttaagaatatttttgggacgccggaatttgttgctccagaaattgtgaactacgagcccctgggtctggaggctgacatgtggagcataggcgtcatcacctacatcctcttaagtggagcatcccctttcctgggagacacgaagcaggaaacactggcaaatatcacagcagtgagttacgactttgatgaggaattcttcagccagacgagcgagctggccaaggactttattcggaagcttctggttaaagagacccggaaacggctcacaatccaagaggctctcagacacccctggatcacgccggtggacaaccagcaagccatggtgcgcagggagtctgtggtcaatctggagaacttcaggaagcagtatgtccgcaggcggtggaagctttccttcagcatcgtgtccctgtgcaaccacctcacccgctcgctgatgaagaaggtgcacctgaggccggatgaggacctgaggaactgtgagagtgacactgaggaggacatcgccaggaggaaagccctccacccacggaggaggagcagcacctcctaactggcctgacctgcagtggccgccagggaggtctgggcccagcggggctcccttctgtgcagacttttggacccagctcagcaccagcacccgggcgtcctgagcactttgcaagagagatgggcccaaggaattcagaagagcttgcaggcaagccaggagaccctgggagctgtggctgtcttctgtggaggaggctccagcattcccaaagctcttaattctccataaaatgggctttcctctgtctgccatcctcagagtctggggtgggagtgtggacttaggaaaacaatataaaggacatcctcatcatcacggggtgaaggtcagactaaggcagccttcttcacaggctgagggggttcagaaccagcctggccaaaaattacaccagagagacagagtcctccccattgggaacagggtgattgaggaaagtgaaccttgggtgtgagggaccaatcctgtgacctcccagaaccatggaagccaggacgtcaggctgaccaacacctcagaccttctgaagcagcccattgctggcccgccatgttgtaattttgctcatttttattaaacttctggtttacctga

SEQ ID NO: 7958 - DNA, 724 bp, Homo sapiens
  source 1..724: mol_type = unassigned DNA
gaatccagctgctatgtcacgagaactcaagccaccctgtggagaattccacacggagtgcagctgaggcctcccaacaacaaccagcagcaatttgcaaaccatgtgtctcctacagctactggtgtgttttttgcatattggccttccaacatttcttgttgaattatttcaggctcaccttggtcataatgagtggatctggctttacccagggcttcagcctttagcatttcacatgaggaatatccactgagctgggggtcaagaggcctgacctttaatcttggctctgccccaggcaagtgtgaacttgggtaagaacactgaggccaggaaatgttgagtgacgtgtccatactcacatagcatggaagaatcagaggccatggggtcaggacctatgggcttaggatataccggaagaggcctgatttccagtcgagcatttgccaaaaatcagcagcgtgatttgggattgtatgttccaggcctcaatgaggagtccaaacatggagccattcaagcagcagaaggtggaggacttttatgacatcggagaggagctggggagtggccagtttgccatcgtgaagaagtgccgggagaagagcacggggcttgagtatgcagccaagttcatcaagaagcggcagagccgggcgagccggcgcggtgtgagccgggaggagatcgagcgggaggtgagcatcctgcggcaggt

SEQ ID NO: 7959 - DNA, 2615 bp, Homo sapiens
  source 1..2615: mol_type = unassigned DNA
gacaatatggcggcgcttagttgcatgaaggcggaaactctgtgacttccggtccgtagtggggcctgcggtgggagtgggaaggaaggcggagggaaccatgcgaggttctgagaattgcggcgagggtcgcctcgagagacggtttctgagcaggaattctgaaatccccaccacttcctccctccgggggatttgatcccctatggccaccgctaacagcatcatcgtgctggatgatgatgacgaagatgaagcagctgctcagccagggccctcccacccactccccaatgcggcctcacctggggcagaagcccctagctcctctgagcctcatggggccagaggaagcagtagttcgggcggcaagaaatgctacaagctggagaatgagaagctgttcgaagagttccttgaactttgtaagatgcagacagcagaccaccctgaggtggtcccattcctctataaccggcagcaacgtgcccactctctgtttttggcctcggcggagttctgcaacatcctctctagggtcctgtctcgggcccggagccggccagccaagctctatgtctacatcaatgagctctgcactgttctcaaggcccactcagccaaaaagaagctgaacttggcccctgccgccaccacctccaatgagccctctgggaataaccctcccacacacctctccttggaccccacaaatgctgaaaacactgcctctcagtctccaaggacccgtggttcccggcggcagatccagcgtttggagcagctgctggcgctctatgtggcagagatccggcggctgcaggaaaaggagttggatctctcagaattggatgacccagactccgcatacctgcaggaggcacggttgaagcgtaagctgatccgcctctttgggcgactatgtgagctgaaagactgctcttcactgaccggccgtgtcatagagcagcgcatcccctaccgtggcacccgctacccagaggttaacaggcgcattgagcggctcatcaacaagccagggcctgataccttccctgactatggggatgtgcttcgggctgtagagaaggcagctgcccgacacagccttggcctcccccgacagcagctccagctcatggctcaggatgccttccgagatgtgggcatcaggttacaggagcgacgtcacctcgatctcatctacaactttggctgccacctcacagatgactataggccaggcgttgaccctgcactatcagatcctgtgttggcccggcgccttcgggaaaaccggagtttggccatgagtcggctggatgaggtcatctccaaatacgcaatgttgcaagacaaaagtgaggagggcgagagaaaaaagagaagagctcggctccaaggcacctcttcccactctgcagacacccccgaagcctccttggattctggtgagggccctagtggaatggcatcccaggggtgcccttctgcctccagagctgagacagatgacgaagacgatgaggagagtgatgaggaagaggaggaggaggaggaagaagaagaggaggaggccacagattctgaagaggaggaggatctggaacagatgcaggagggtcaggaggatgatgaagaggaggacgaagaggaagaagcagcagcaggtaaagatggagacaagagccccatgtcctcactacagatctccaatgaaaagaacctggaacctggcaaacagatcagcagatcttcaggggagcagcaaaacaaaggacgcatagtgtcaccatcgttactgtcagaagaacccctggccccctccagcatagatgctgaaagcaatggagaacagcctgaggagctgaccctggaggaagaaagccctgtgtctcagctctttgagctagagattgaagctttgcccctggataccccttcctctgtggagacggacatttcctcttccaggaagcaatcagaggagcccttcaccactgtcttagagaatggagcaggcatggtctcttctacttccttcaatggaggcgtctctcctcacaactggggagattctggtcccccctgcaaaaaatctcggaaggagaagaagcaaacaggatcagggccattaggaaacagctatgtggaaaggcaaaggtcagtgcatgagaagaatgggaaaaagatatgtaccctgcccagcccaccttcccccttggcttccttggccccagttgctgattcctccacgagggtggactctcccagccatggcctggtgaccagctccctctgcatcccttctccagcccggctgtcccaaaccccccattcacagcctcctcggcctggtacttgcaagacaagtgtggccacacaatgcgatccagaagagatcatcgtgctctcagactctgattagctgcctccccttctccctgcctccagaatgttctgggataacatttggaggaaggtgggaagcagatgactgaggaagggatggactaagctaatccccttttggtggtgtttctttaaaaaaaaaaaaaaaagcttaagttttacacagaaacattaataaacaataaagttcttttcttactgta

SEQ ID NO: 7960 - DNA, 2614 bp, Homo sapiens
  source 1..2614: mol_type = unassigned DNA
gacaatatggcggcgcttagttgcatgaaggcggaaactctgtgacttccggtccgtagtggggcctgcggtgggagtgggaaggaaggcggagggaaccatgcgaggttctgagaattgcggcgagggtcgcctcgagagacggtttctgagcaggaattctgaaatccccaccacttcctccctccgggggatttgatcccctatggccaccgctaacagcatcatcgtgctggatgatgatgacgaagatgaagcagctgctcagccagggccctcccacccactccccaatgcggcctcacctggggcagaagcccctagctcctctgagcctcatggggccagaggaagcagtagttcgggcggcaagaaatgctacaagctggagaatgagaagctgttcgaagagttccttgaactttgtaagatgcagacagcagaccaccctgaggtggtcccattcctctataaccggcagcaacgtgcccactctctgtttttggcctcggcggagttctgcaacatcctctctagggtcctgtctcgggcccggagccggccagccaagctctatgtctacatcaatgagctctgcactgttctcaaggcccactcagccaaaaagaagctgaacttggcccctgccgccaccacctccaatgagccctctgggaataaccctcccacacacctctccttggaccccacaaatgctgaaaacactgcctctcagtctccaaggacccgtggttcccggcggcagatccagcgtttggagcagctgctggcgctctatgtggcagagatccggcggctgcaggaaaaggagttggatctctcagaattggatgacccagactccgcatacctgcaggaggcacggttgaagcgtaagctgatccgcctctttgggcgactatgtgagctgaaagactgctcttcactgaccggccgtgtcatagagcagcgcatcccctaccgtggcacccgctacccagaggttaacaggcgcattgagcggctcatcaacaagccagggcctgataccttccctgactatggggatgtgcttcgggctgtagagaaggcagctgcccgacacagccttggcctcccccgacagcagctccagctcatggctcaggatgccttccgagatgtgggcatcaggttacaggagcgacgtcacctcgatctcatctacaactttggctgccacctcacagatgactataggccaggcgttgaccctgcactatcagatcctgtgttggcccggcgccttcgggaaaaccggagtttggccatgagtcggctggatgaggtcatctccaaatatgcaatgttgcaagacaaaagtgaggagggcgagagaaaaaagagaagagctcggctccaaggcacctcttcccactctgcagacacccccgaagcctccttggattctggtgagggccctagtggaatggcatcccaggggtgcccttctgcctccagagctgagacagatgacgaagacgatgaggagagtgatgaggaagaggaggaggaggaggaagaagaagaggaggaggccacagattctgaagaggaggaggatctggaacagatgcaggagggtcaggaggatgatgaagaggaggacgaagaggaagaagcagcagcaggtaaagatggagacaagagccccatgtcctcactacagatctccaatgaaaagaacctggaacctggcaaacagatcagcagatcttcaggggagcagcaaaacaaaggacgcatagtgtcaccatcgttactgtcagaagaacccctggccccctccagcatagatgctgaaagcaatggagaacagcctgaggagctgaccctggaggaagaaagccctgtgtctcagctctttgagctagagattgaagctttgcccctggataccccttcctctgtggagacggacatttcctcttccaggaagcaatcagaggagcccttcaccactgtcttagagaatggagcaggcatggtctcttctacttccttcaatggaggcgtctctcctcacaactggggagattctggtcccccctgcaaaaaatctcggaaggagaagaagcaaacaggatcagggccattaggaaacagctatgtggaaaggcaaaggtcagtgcatgagaagaatgggaaaaagatatgtaccctgcccagcccaccttcccccttggcttccttggccccagttgctgattcctccacgagggtggactctcccagccatggcctggtgaccagctccctctgcatcccttctccagcccggctgtcccaaaccccccattcacagcctcctcggcctggtacttgcaagacaagtgtggccacacaatgcgatccagaagagatcatcgtgctctcagactctgattagctgcctccccttctccctgcctccagaatgttctgggataacatttggaggaaggtgggaagcagatgactgaggaagggatggactaagctaatccccttttggtggtgtttctttaaaaaaaaaaaaaaagcttaagttttacacagaaacattaataaacaataaagttcttttcttactgta

SEQ ID NO: 7961 - DNA, 2608 bp, Homo sapiens
  source 1..2608: mol_type = unassigned DNA
atatggcggcgcttagttgcatgaaggcggaaactctgtgacttccggtccgtagtggggcctgcggtgggagtgggaaggaaggcggagggaaccatgcgaggttctgagaattgcggcgagggtcgcctcgagagacggtttctgaggaattctgaaatccccaccacttcctccctccgggggatttgatcccctatggccaccgctaacagcatcatcgtgctggatgatgatgacgaagatgaagcagctgctcagccagggccctcccacccactccccaatgcggcctcacctggggcagaagcccctagctcctctgagcctcatggggccagaggaagcagtagttcgggcggcaagaaatgctacaagctggagaatgagaagctgttcgaagagttccttgaactttgtaagatgcagacagcagaccaccctgaggtggtcccattcctctataaccggcagcaacgtgcccactctctgtttttggcctcggcggagttctgcaacatcctctctagggtcctgtctcgggcccggagccggccagccaagctctatgtctacatcaatgagctctgcactgttctcaaggcccactcagccaaaaagaagctgaacttggcccctgccgccaccacctccaatgagccctctgggaataaccctcccacacacctctccttggaccccacaaatgctgaaaacactgcctctcagtctccaaggacccgtggttcccggcggcagatccagcgtttggagcagctgctggcgctctatgtggcagagatccggcggctgcaggaaaaggagttggatctctcagaattggatgacccagactccgcatacctgcaggaggcacggttgaagcgtaagctgatccgcctctttgggcgactatgtgagctgaaagactgctcttcactgaccggccgtgtcatagagcagcgcatcccctaccgtggcacccgctacccagaggttaacaggcgcattgagcggctcatcaacaagccagggcctgataccttccctgactatggggatgtgcttcgggctgtagagaaggcagctgcccgacacagccttggcctcccccgacagcagctccagctcatggctcaggatgccttccgagatgtgggcatcaggttacaggagcgacgtcacctcgatctcatctacaactttggctgccacctcacagatgactataggccaggcgttgaccctgcactatcagatcctgtgttggcccggcgccttcgggaaaaccggagtttggccatgagtcggctggatgaggtcatctccaaatacgcaatgttgcaagacaaaagtgaggagggcgagagaaaaaagagaagagctcggctccaaggcacctcttcccactctgcagacacccccgaagcctccttggattctggtgagggccctagtggaatggcatcccaggggtgcccttctgcctccagagctgagacagatgacgaagacgatgaggagagtgatgaggaagaggaggaggaggaggaagaagaagaggaggaggccacagattctgaagaggaggaggatctggaacagatgcaggagggtcaggaggatgatgaagaggaggacgaagaggaagaagcagcagcaggtaaagatggagacaagagccccatgtcctcactacagatctccaatgaaaagaacctggaacctggcaaacagatcagcagatcttcaggggagcagcaaaacaaaggacgcatagtgtcaccatcgttactgtcagaagaacccctggccccctccagcatagatgctgaaagcaatggagaacagcctgaggagctgaccctggaggaagaaagccctgtgtctcagctctttgagctagagattgaagctttgcccctggataccccttcctctgtggagacggacatttcctcttccaggaagcaatcagaggagcccttcaccactgtcttagagaatggagcaggcatggtctcttctacttccttcaatggaggcgtctctcctcacaactggggagattctggtcccccctgcaaaaaatctcggaaggagaagaagcaaacaggatcagggccattaggaaacagctatgtggaaaggcaaaggtcagtgcatgagaagaatgggaaaaagatatgtaccctgcccagcccaccttcccccttggcttccttggccccagttgctgattcctccacgagggtggactctcccagccatggcctggtgaccagctccctctgcatcccttctccagcccggctgtcccaaaccccccattcacagcctcctcggcctggtacttgcaagacaagtgtggccacacaatgcgatccagaagagatcatcgtgctctcagactctgattagctgcctccccttctccctgcctccagaatgttctgggataacatttggaggaaggtgggaagcagatgactgaggaagggatggactaagctaatccccttttggtggtgtttctttaaaaaaaaaaaaaaaagcttaagttttacacagaaacattaataaacaataaagttcttttcttactgta

SEQ ID NO: 7962 - DNA, 2607 bp, Homo sapiens
  source 1..2607: mol_type = unassigned DNA
atatggcggcgcttagttgcatgaaggcggaaactctgtgacttccggtccgtagtggggcctgcggtgggagtgggaaggaaggcggagggaaccatgcgaggttctgagaattgcggcgagggtcgcctcgagagacggtttctgaggaattctgaaatccccaccacttcctccctccgggggatttgatcccctatggccaccgctaacagcatcatcgtgctggatgatgatgacgaagatgaagcagctgctcagccagggccctcccacccactccccaatgcggcctcacctggggcagaagcccctagctcctctgagcctcatggggccagaggaagcagtagttcgggcggcaagaaatgctacaagctggagaatgagaagctgttcgaagagttccttgaactttgtaagatgcagacagcagaccaccctgaggtggtcccattcctctataaccggcagcaacgtgcccactctctgtttttggcctcggcggagttctgcaacatcctctctagggtcctgtctcgggcccggagccggccagccaagctctatgtctacatcaatgagctctgcactgttctcaaggcccactcagccaaaaagaagctgaacttggcccctgccgccaccacctccaatgagccctctgggaataaccctcccacacacctctccttggaccccacaaatgctgaaaacactgcctctcagtctccaaggacccgtggttcccggcggcagatccagcgtttggagcagctgctggcgctctatgtggcagagatccggcggctgcaggaaaaggagttggatctctcagaattggatgacccagactccgcatacctgcaggaggcacggttgaagcgtaagctgatccgcctctttgggcgactatgtgagctgaaagactgctcttcactgaccggccgtgtcatagagcagcgcatcccctaccgtggcacccgctacccagaggttaacaggcgcattgagcggctcatcaacaagccagggcctgataccttccctgactatggggatgtgcttcgggctgtagagaaggcagctgcccgacacagccttggcctcccccgacagcagctccagctcatggctcaggatgccttccgagatgtgggcatcaggttacaggagcgacgtcacctcgatctcatctacaactttggctgccacctcacagatgactataggccaggcgttgaccctgcactatcagatcctgtgttggcccggcgccttcgggaaaaccggagtttggccatgagtcggctggatgaggtcatctccaaatatgcaatgttgcaagacaaaagtgaggagggcgagagaaaaaagagaagagctcggctccaaggcacctcttcccactctgcagacacccccgaagcctccttggattctggtgagggccctagtggaatggcatcccaggggtgcccttctgcctccagagctgagacagatgacgaagacgatgaggagagtgatgaggaagaggaggaggaggaggaagaagaagaggaggaggccacagattctgaagaggaggaggatctggaacagatgcaggagggtcaggaggatgatgaagaggaggacgaagaggaagaagcagcagcaggtaaagatggagacaagagccccatgtcctcactacagatctccaatgaaaagaacctggaacctggcaaacagatcagcagatcttcaggggagcagcaaaacaaaggacgcatagtgtcaccatcgttactgtcagaagaacccctggccccctccagcatagatgctgaaagcaatggagaacagcctgaggagctgaccctggaggaagaaagccctgtgtctcagctctttgagctagagattgaagctttgcccctggataccccttcctctgtggagacggacatttcctcttccaggaagcaatcagaggagcccttcaccactgtcttagagaatggagcaggcatggtctcttctacttccttcaatggaggcgtctctcctcacaactggggagattctggtcccccctgcaaaaaatctcggaaggagaagaagcaaacaggatcagggccattaggaaacagctatgtggaaaggcaaaggtcagtgcatgagaagaatgggaaaaagatatgtaccctgcccagcccaccttcccccttggcttccttggccccagttgctgattcctccacgagggtggactctcccagccatggcctggtgaccagctccctctgcatcccttctccagcccggctgtcccaaaccccccattcacagcctcctcggcctggtacttgcaagacaagtgtggccacacaatgcgatccagaagagatcatcgtgctctcagactctgattagctgcctccccttctccctgcctccagaatgttctgggataacatttggaggaaggtgggaagcagatgactgaggaagggatggactaagctaatccccttttggtggtgtttctttaaaaaaaaaaaaaaagcttaagttttacacagaaacattaataaacaataaagttcttttcttactgta

SEQ ID NO: 7963 - DNA, 751 bp, Homo sapiens
  source 1..751: mol_type = unassigned DNA
ggatgtgttcctggcatttgcccagggtccctcccctcccaggggtcccgtgcgacgtgccttggacaaggctttctttatcttcctggccctcttcctgacactgctgatgctggaggctgcttataagctgctgtggttactactatgggcaaagttaggggactggctcctggggacacctcagaaggaggaggagctggaattgtgaccacctttcctataaacatcttctttccccaccaaggagctcacctctggacccagccttgcctccacgagtccctccagcctccctaaacacaacgagcaggaattctgaaatccccaccacttcctccctccgggggatttgatcccctatggccaccgctaacagcatcatcgtgctggatgatgatgacgaagatgaagcagctgctcagccagggccctcccacccactccccaatgcggcctcacctggggcagaagcccctagctcctctgagcctcatggggccagaggaagcagtagttcgggcggcaagaaatgctacaagctggagaatgagaagctgttcgaagagttccttgaactttgtaagatgcagacagcagaccaccctgaggtggtcccattcctctataaccggcagcaacgtgcccactctctgtttttggcctcggcggagttctgcaacatcctctctagggtcctgtctcgggcccggagccggccagccaagctctatgtctacatcaatgagct

SEQ ID NO: 7964 - DNA, 371 bp, Homo sapiens
  source 1..371: mol_type = unassigned DNA
ttggggagagctgggcgctgagtctgaggggaatgctgtggtaccttcctgtccctgaaagggagtggagcggccgggggctgaactgggggagggggatttggcgggaagcgcatctagcggaccggccggacccacggttgggatctaagaggaatcgcgagagcgtagcgcgcaggaattctgaaatccccaccacttcctccctccgggggatttgatcccctatggccaccgctaacagcatcatcgtgctggatgatgatgacgaagatgaagcagctgctcagccagggccctcccacccactccccaatgcggcctcacctggggcagaagcccctagctcctctgagcctcatggggccaga

SEQ ID NO: 7965 - DNA, 751 bp, Homo sapiens; identical to SEQ ID NO: 7963
  source 1..751: mol_type = unassigned DNA

SEQ ID NO: 7966 - DNA, 371 bp, Homo sapiens; identical to SEQ ID NO: 7964
  source 1..371: mol_type = unassigned DNA

SEQ ID NO: 7967 - DNA, 702 bp, Homo sapiens
  source 1..702: mol_type = unassigned DNA
ggtgggagtgggaaggaaggcggagggaaccatgcgaggttctgagaattgcggcgagggtcgcctcgagagacggtttctgaggggctcattctgaggccccatccccttccagcaggaattctgaaatccccaccacttcctccctccgggggatttgatcccctatggccaccgctaacagcatcatcgtgctggatgatgatgacgaagatgaagcagctgctcagccagggccctcccacccactccccaatgcggcctcacctggggcagaagcccctagctcctctgagcctcatggggccagaggaagcagtagttcgggcggcaagaaatgctacaagctggagaatgagaagctgttcgaagagttccttgaactttgtaagatgcagacagcagaccaccctgaggtggtcccattcctctataaccggcagcaacgtgcccactctctgtttttggcctcggcggagttctgcaacatcctctctagggtcctgtctcgggcccggagccggccagccaagctctatgtctacatcaatgagctctgcactgttctcaaggcccactcagccaaaaagaagctgaacttggcccctgccgccaccacctccaatgagccctctgggaataaccctcccacacacctctccttggaccccacaaatgctgaaaacactgcctctcagtctc

SEQ ID NO: 7968 - DNA, 702 bp, Homo sapiens; identical to SEQ ID NO: 7967
  source 1..702: mol_type = unassigned DNA

SEQ ID NO: 7969 - DNA, 2522 bp, Homo sapiens
  source 1..2522: mol_type = unassigned DNA
ggcggagggaaccatgcgaggttctgagaattgcggcgagggtcgcctcgagagacggtttctgaggaattctgaaatccccaccacttcctccctccgggggatttgatcccctatggccaccgctaacagcatcatcgtgctggatgatgatgacgaagatgaagcagctgctcagccagggccctcccacccactccccaatgcggcctcacctggggcagaagcccctagctcctctgagcctcatggggccagaggaagcagtagttcgggcggcaagaaatgctacaagctggagaatgagaagctgttcgaagagttccttgaactttgtaagatgcagacagcagaccaccctgaggtggtcccattcctctataaccggcagcaacgtgcccactctctgtttttggcctcggcggagttctgcaacatcctctctagggtcctgtctcgggcccggagccggccagccaagctctatgtctacatcaatgagctctgcactgttctcaaggcccactcagccaaaaagaagctgaacttggcccctgccgccaccacctccaatgagccctctgggaataaccctcccacacacctctccttggaccccacaaatgctgaaaacactgcctctcagtctccaaggacccgtggttcccggcggcagatccagcgtttggagcagctgctggcgctctatgtggcagagatccggcggctgcaggaaaaggagttggatctctcagaattggatgacccagactccgcatacctgcaggaggcacggttgaagcgtaagctgatccgcctctttgggcgactatgtgagctgaaagactgctcttcactgaccggccgtgtcatagagcagcgcatcccctaccgtggcacccgctacccagaggttaacaggcgcattgagcggctcatcaacaagccagggcctgataccttccctgactatggggatgtgcttcgggctgtagagaaggcagctgcccgacacagccttggcctcccccgacagcagctccagctcatggctcaggatgccttccgagatgtgggcatcaggttacaggagcgacgtcacctcgatctcatctacaactttggctgccacctcacagatgactataggccaggcgttgaccctgcactatcagatcctgtgttggcccggcgccttcgggaaaaccggagtttggccatgagtcggctggatgaggtcatctccaaatatgcaatgttgcaagacaaaagtgaggagggcgagagaaaaaagagaagagctcggctccaaggcacctcttcccactctgcagacacccccgaagcctccttggattctggtgagggccctagtggaatggcatcccaggggtgcccttctgcctccagagctgagacagatgacgaagacgatgaggagagtgatgaggaagaggaggaggaggaggaagaagaagaggaggaggccacagattctgaagaggaggaggatctggaacagatgcaggagggtcaggaggatgatgaagaggaggacgaagaggaagaagcagcagcaggtaaagatggagacaagagccccatgtcctcactacagatctccaatgaaaagaacctggaacctggcaaacagatcagcagatcttcaggggagcagcaaaacaaaggacgcatagtgtcaccatcgttactgtcagaagaacccctggccccctccagcatagatgctgaaagcaatggagaacagcctgaggagctgaccctggaggaagaaagccctgtgtctcagctctttgagctagagattgaagctttgcccctggataccccttcctctgtggagacggacatttcctcttccaggaagcaatcagaggagcccttcaccactgtcttagagaatggagcaggcatggtctcttctacttccttcaatggaggcgtctctcctcacaactggggagattctggtcccccctgcaaaaaatctcggaaggagaagaagcaaacaggatcagggccattaggaaacagctatgtggaaaggcaaaggtcagtgcatgagaagaatgggaaaaagatatgtaccctgcccagcccaccttcccccttggcttccttggccccagttgctgattcctccacgagggtggactctcccagccatggcctggtgaccagctccctctgcatcccttctccagcccggctgtcccaaaccccccattcacagcctcctcggcctggtacttgcaagacaagtgtggccacacaatgcgatccagaagagatcatcgtgctctcagactctgattagctgcctccccttctccctgcctccagaatgttctgggataacatttggaggaaggtgggaagcagatgactgaggaagggatggactaagctaatccccttttggtggtgtttctttaaaaaaaaaaaaagcttaagttttacacagaaacattaataaacaataaagttcttttcttactgta

SEQ ID NO: 7970 - DNA, 2615 bp, Homo sapiens; identical to SEQ ID NO: 7959
  source 1..2615: mol_type = unassigned DNA

SEQ ID NO: 7971 - DNA, 751 bp, Homo sapiens; identical to SEQ ID NO: 7963
  source 1..751: mol_type = unassigned DNA

SEQ ID NO: 7972 - DNA, 702 bp, Homo sapiens; identical to SEQ ID NO: 7967
  source 1..702: mol_type = unassigned DNA

SEQ ID NO: 7973 - DNA, 2545 bp, Homo sapiens
  source 1..2545: mol_type = unassigned DNA
gcggtgggagtgggaaggaaggcggagggaaccatgcgaggttctgagaattgcggcgagggtcgcctcgagagacggtttctgagcaggaattctgaaatccccaccacttcctccctccgggggatttgatcccctatggccaccgctaacagcatcatcgtgctggatgatgatgacgaagatgaagcagctgctcagccagggccctcccacccactccccaatgcggcctcacctggggcagaagcccctagctcctctgagcctcatggggccagaggaagcagtagttcgggcggcaagaaatgctacaagctggagaatgagaagctgttcgaagagttccttgaactttgtaagatgcagacagcagaccaccctgaggtggtcccattcctctataaccggcagcaacgtgcccactctctgtttttggcctcggcggagttctgcaacatcctctctagggtcctgtctcgggcccggagccggccagccaagctctatgtctacatcaatgagctctgcactgttctcaaggcccactcagccaaaaagaagctgaacttggcccctgccgccaccacctccaatgagccctctgggaataaccctcccacacacctctccttggaccccacaaatgctgaaaacactgcctctcagtctccaaggacccgtggttcccggcggcagatccagcgtttggagcagctgctggcgctctatgtggcagagatccggcggctgcaggaaaaggagttggatctctcagaattggatgacccagactccgcatacctgcaggaggcacggttgaagcgtaagctgatccgcctctttgggcgactatgtgagctgaaagactgctcttcactgaccggccgtgtcatagagcagcgcatcccctaccgtggcacccgctacccagaggttaacaggcgcattgagcggctcatcaacaagccagggcctgataccttccctgactatggggatgtgcttcgggctgtagagaaggcagctgcccgacacagccttggcctcccccgacagcagctccagctcatggctcaggatgccttccgagatgtgggcatcaggttacaggagcgacgtcacctcgatctcatctacaactttggctgccacctcacagatgactataggccaggcgttgaccctgcactatcagatcctgtgttggcccggcgccttcgggaaaaccggagtttggccatgagtcggctggatgaggtcatctccaaatatgcaatgttgcaagacaaaagtgaggagggcgagagaaaaaagagaagagctcggctccaaggcacctcttcccactctgcagacacccccgaagcctccttggattctggtgagggccctagtggaatggcatcccaggggtgcccttctgcctccagagctgagacagatgacgaagacgatgaggagagtgatgaggaagaggaggaggaggaggaagaagaagaggaggaggccacagattctgaagaggaggaggatctggaacagatgcaggagggtcaggaggatgatgaagaggaggacgaagaggaagaagcagcagcaggtaaagatggagacaagagccccatgtcctcactacagatctccaatgaaaagaacctggaacctggcaaacagatcagcagatcttcaggggagcagcaaaacaaaggacgcatagtgtcaccatcgttactgtcagaagaacccctggccccctccagcatagatgctgaaagcaatggagaacagcctgaggagctgaccctggaggaagaaagccctgtgtctcagctctttgagctagagattgaagctttgcccctggataccccttcctctgtggagacggacatttcctcttccaggaagcaatcagaggagcccttcaccactgtcttagagaatggagcaggcatggtctcttctacttccttcaatggaggcgtctctcctcacaactggggagattctggtcccccctgcaaaaaatctcggaaggagaagaagcaaacaggatcagggccattaggaaacagctatgtggaaaggcaaaggtcagtgcatgagaagaatgggaaaaagatatgtaccctgcccagcccaccttcccccttggcttccttggccccagttgctgattcctccacgagggtggactctcccagccatggcctggtgaccagctccctctgcatcccttctccagcccggctgtcccaaaccccccattcacagcctcctcggcctggtacttgcaagacaagtgtggccacacaatgcgatccagaagagatcatcgtgctctcagactctgattagctgcctccccttctccctgcctccagaatgttctgggataacatttggaggaaggtgggaagcagatgactgaggaagggatggactaagctaatccccttttggtggtgtttctttaaaaaaaaaaaaagcttaagttttacacagaaacattaataaacaataaagttcttttcttactgta

SEQ ID NO: 7974 - DNA, 371 bp, Homo sapiens
  source 1..371: mol_type = unassigned DNA
ttggggagagctgggcgctgagtctgaggggaaagctgtggtaccttcctgtccctgaaagggagtggagcggccgggggctgaactgggggagggggatttggcgggaagcgcatctagcggaccggccggacccacggttgggatctaagaggaatcgcgagagcgtagcgcgcaggaattctgaaatccccaccacttcctccctccgggggatttgatcccctatggccaccgctaacagcatcatcgtgctggatgatgatgacgaagatgaagcagctgctcagccagggccctcccacccactccccaatgcggcctcacctggggcagaagcccctagctcctctgagcctcatggggccaga

SEQ ID NO: 7975 - DNA, 751 bp, Homo sapiens; identical to SEQ ID NO: 7963
  source 1..751: mol_type = unassigned DNA

SEQ ID NO: 7976 - DNA, 702 bp, Homo sapiens; identical to SEQ ID NO: 7967
  source 1..702: mol_type = unassigned DNA

SEQ ID NO: 7977 - DNA, 2608 bp, Homo sapiens; identical to SEQ ID NO: 7961
  source 1..2608: mol_type = unassigned DNA

SEQ ID NO: 7978 - DNA, 371 bp, Homo sapiens; identical to SEQ ID NO: 7964
  source 1..371: mol_type = unassigned DNA

SEQ ID NO: 7979 - DNA, 2152 bp, Homo sapiens
  source 1..2152: mol_type = unassigned DNA
gtgacttccggtccgtagtggggcctgcggtgggagtgggaaggaaggcggagggaaccatgcgaggttctgagaattgcggcgagggtcgcctcgagagacggtttctgagttccttgaactttgtaagatgcagacagcagaccaccctgaggtggtcccattcctctataaccggcagcaacgtgcccactctctgtttttggcctcggcggagttctgcaacatcctctctagggtcctgtctcgggcccggagccggccagccaagctctatgtctacatcaatgagctctgcactgttctcaaggcccactcagccaaaaagaagctgaacttggcccctgccgccaccacctccaatgagccctctgggaataaccctcccacacacctctccttggaccccacaaatgctgaaaacactgcctctcagtctccaaggacccgtggttcccggcggcagatccagcgtttggagcagctgctggcgctctatgtggcagagatccggcggctgcaggaaaaggagttggatctctcagaattggatgacccagactccgcatacctgcaggaggcacggttgaagcgtaagctgatccgcctctttgggcgactatgtgagctgaaagactgctcttcactgaccggccgtgtcatagagcagcgcatcccctaccgtggcacccgctacccagaggttaacaggcgcattgagcggctcatcaacaagccagggcctgataccttccctgactatggggatgtgcttcgggctgtagagaaggcagctgcccgacacagccttggcctcccccgacagcagctccagctcatggctcaggatgccttccgagatgtgggcatcaggttacaggagcgacgtcacctcgatctcatctacaactttggctgccacctcacagatgactataggccaggcgttgaccctgcactatcagatcctgtgttggcccggcgccttcgggaaaaccggagtttggccatgagtcggctggatgaggtcatctccaaatatgcaatgttgcaagacaaaagtgaggagggcgagagaaaaaagagaagagctcggctccaaggcacctcttcccactctgcagacacccccgaagcctccttggattctggtgagggccctagtggaatggcatcccaggggtgcccttctgcctccagagctgagacagatgacgaagacgatgaggagagtgatgaggaagaggaggaggaggaggaagaagaagaggaggaggccacagattctgaagaggaggaggatctggaacagatgcaggagggtcaggaggatgatgaagaggaggacgaagaggaagaagcagcagcaggtaaagatggagacaagagccccatgtcctcactacagatctccaatgaaaagaacctggaacctggcaaacagatcagcagatcttcaggggagcagcaaaacaaaggacgcatagtgtcaccatcgttactgtcagaagaacccctggccccctccagcatagatgctgaaagcaatggagaacagcctgaggagctgaccctggaggaagaaagccctgtgtctcagctctttgagctagagattgaagctttgcccctggataccccttcctctgtggagacggacatttcctcttccaggaagcaatcagaggagcccttcaccactgtcttagagaatggagcaggcatggtctcttctacttccttcaatggaggcgtctctcctcacaactggggagattctggtcccccctgcaaaaaatctcggaaggagaagaagcaaacaggatcagggccattaggaaacagctatgtggaaaggcaaaggtcagtgcatgagaagaatgggaaaaagatatgtaccctgcccagcccaccttcccccttggcttccttggccccagttgctgattcctccacgagggtggactctcccagccatggcctggtgaccagctccctctgcatcccttctccagcccggctgtcccaaaccccccattcacagcctcctcggcctggtacttgcaagacaagtgtggccacacaatgcgatccagaagagatcatcgtgctctcagactctgattagctgcctccccttctccctgcctcc

SEQ ID NO: 7980 - DNA, 2152 bp, Homo sapiens; identical to SEQ ID NO: 7979
  source 1..2152: mol_type = unassigned DNA

SEQ ID NO: 7981 - DNA, 2152 bp, Homo sapiens
  source 1..2152: mol_type = unassigned DNA
gtgacttccggtccgtagtggggcctgcggtgggagtgggaaggaaggcggagggaaccatgcgaggttctgagaattgcggcgagggtcgcctcgagagacggtttctgagttccttgaactttgtaagatgcagacagcagaccaccctgaggtggtcccattcctctataaccggcagcaacgtgcccactctctgtttttggcctcggcggagttctgcaacatcctctctagggtcctgtctcgggcccggagccggccagccaagctctatgtctacatcaatgagctctgcactgttctcaaggcccactcagccaaaaagaagctgaacttggcccctgccgccaccacctccaatgagccctctgggaataaccctcccacacacctctccttggaccccacaaatgctgaaaacactgcctctcagtctccaaggacccgtggttcccggcggcagatccagcgtttggagcagctgctggcgctctatgtggcagagatccggcggctgcaggaaaaggagttggatctctcagaattggatgacccagactccgcatacctgcaggaggcacggttgaagcgtaagctgatccgcctctttgggcgactatgtgagctgaaagactgctcttcactgaccggccgtgtcatagagcagcgcatcccctaccgtggcacccgctacccagaggttaacaggcgcattgagcggctcatcaacaagccagggcctgataccttccctgactatggggatgtgcttcgggctgtagagaaggcagctgcccgacacagccttggcctcccccgacagcagctccagctcatggctcaggatgccttccgagatgtgggcatcaggttacaggagcgacgtcacctcgatctcatctacaactttggctgccacctcacagatgactataggccaggcgttgaccctgcactatcagatcctgtgttggcccggcgccttcgggaaaaccggagtttggccatgagtcggctggatgaggtcatctccaaatacgcaatgttgcaagacaaaagtgaggagggcgagagaaaaaagagaagagctcggctccaaggcacctcttcccactctgcagacacccccgaagcctccttggattctggtgagggccctagtggaatggcatcccaggggtgcccttctgcctccagagctgagacagatgacgaagacgatgaggagagtgatgaggaagaggaggaggaggaggaagaagaagaggaggaggccacagattctgaagaggaggaggatctggaacagatgcaggagggtcaggaggatgatgaagaggaggacgaagaggaagaagcagcagcaggtaaagatggagacaagagccccatgtcctcactacagatctccaatgaaaagaacctggaacctggcaaacagatcagcagatcttcaggggagcagcaaaacaaaggacgcatagtgtcaccatcgttactgtcagaagaacccctggccccctccagcatagatgctgaaagcaatggagaacagcctgaggagctgaccctggaggaagaaagccctgtgtctcagctctttgagctagagattgaagctttgcccctggataccccttcctctgtggagacggacatttcctcttccaggaagcaatcagaggagcccttcaccactgtcttagagaatggagcaggcatggtctcttctacttccttcaatggaggcgtctctcctcacaactggggagattctggtcccccctgcaaaaaatctcggaaggagaagaagcaaacaggatcagggccattaggaaacagctatgtggaaaggcaaaggtcagtgcatgagaagaatgggaaaaagatatgtaccctgcccagcccaccttcccccttggcttccttggccccagttgctgattcctccacgagggtggactctcccagccatggcctggtgaccagctccctctgcatcccttctccagcccggctgtcccaaaccccccattcacagcctcctcggcctggtacttgcaagacaagtgtggccacacaatgcgatccagaagagatcatcgtgctctcagactctgattagctgcctccccttctccctgcctcc

SEQ ID NO: 7982 - DNA, 2152 bp, Homo sapiens; identical to SEQ ID NO: 7981
  source 1..2152: mol_type = unassigned DNA

SEQ ID NO: 7983 - DNA, 2392 bp, Homo sapiens
  source 1..2392: mol_type = unassigned DNA
aatgctacttgtaaacaaggctagaaagggtggagaatgaaatgagatggggggtggggaaacaaaccctttagttacaatatcttagggaaatgaatctacaataagacaaatttcaaatcaagttgctccactatactgcataagcagtttagaatcttaagcagatgcaaaaagaataaagcaaatgggaggaaaaaaaaggccgataaagtttctggctacaatacaagagacatatcattaccatatgatctaatgtgggtgtcagccggattgtgttcattgagggaaaccttattttttaactgtgctatggagtagaagcaggaggttttcaacctagtcacagagcagcacctaccccctcctcctttccacacctgcaaactcttttacttgggctgaatatttagtgtaattacatctcagctttgagggctcctgtggcaaattcccggattaaaaggttccctggttgtgaaaatacatgagataaatcatgaaggccactatcatcctccttctgcttgcacaagtttcctgggctggaccgtttcaacagagaggcttatttgactttatgctagaagatgaggcttctgggataggcccagaagttcctgatgaccgcgacttcgagccctccctaggcccagtgtgccccttccgctgtcaatgccatcttcgagtggtccagtgttctgatttgggtctggacaaagtgccaaaggatcttccccctgacacaactctgctagacctgcaaaacaacaaaataaccgaaatcaaagatggagactttaagaacctgaagaaccttcacgcattgattcttgtcaacaataaaattagcaaagttagtcctggagcatttacacctttggtgaagttggaacgactttatctgtccaagaatcagctgaaggaattgccagaaaaaatgcccaaaactcttcaggagctgcgtgcccatgagaatgagatcaccaaagtgcgaaaagttactttcaatggactgaaccagatgattgtcatagaactgggcaccaatccgctgaagagctcaggaattgaaaatggggctttccagggaatgaagaagctctcctacatccgcattgctgataccaatatcaccagcattcctcaaggtcttcctccttcccttacggaattacatcttgatggcaacaaaatcagcagagttgatgcagctagcctgaaaggactgaataatttggctaagttgggattgagtttcaacagcatctctgctgttgacaatggctctctggccaacacgcctcatctgagggagcttcacttggacaacaacaagcttaccagagtacctggtgggctggcagagcataagtacatccaggttgtctaccttcataacaacaatatctctgtagttggatcaagtgacttctgcccacctggacacaacaccaaaaaggcttcttattcgggtgtgagtcttttcagcaacccggtccagtactgggagatacagccatccaccttcagatgtgtctacgtgcgctctgccattcaactcggaaactataagtaattctcaagaaagccctcatttttataacctggcaaaatcttgttaatgtcattgctaaaaaataaataaaagctagatactggaaacctaactgcaatgtggatgttttacccacatgacttattatgcataaagccaaatttccagtttaagtaattgcctacaataaaaagaaattttgcctgccattttcagaatcatcttttgaagctttctgttgatgttaactgagctactagagatattcttatttcactaaatgtaaaatttggagtaaatatatatgtcaatatttagtaaagcttttcttttttaatttccaggaaaaaataaaaagagtatgagtcttctgtaattcattgagcagttagctcatttgagataaagtcaaatgccaaacactagctctgtattaatccccatcattactggtaaagcctcatttgaatgtgtgaattcaatacaggctatgtaaaatttttactaatgtcattattttgaaaaaataaatttaaaaatacattcaaaattactattgtatacaagcttaattgttaatattccctaaacacaattttatgaagggagaagacattggtttgttgacaataacagtacatcttttcaagttctcagctatttcttctacctctccctatcttacatttgagtatggtaacttatgtcatctatgttgaatgtaagcttataaagcacaaagcatacatttcctgactggtctagagaactgatgtttcaatttacccctctgctaaataaatattaaaactatcatgtgacttcatgtaa

SEQ ID NO: 7984 - DNA, 1960 bp, Homo sapiens
  source 1..1960: mol_type = unassigned DNA
gaatctacaataagacaaatttcaaatcaagttgctccactatactgcataagcagtttagaatcttaagcagatgcaaaaagaataaagcaaatgggaggaaaaaaaaggccgataaagtttctggctacaatacaagagacatatcattaccatatgatctaatgtgggtgtcagccggattgtgttcattgagggaaaccttattttttaactgtgctatggagtagaagcaggaggttttcaacctagtcacagagcagcacctaccccctcctcctttccacacctgcaaactcttttacttgggctgaatatttagtgtaattacatctcagctttgagggctcctgtggcaaattcccggattaaaaggttccctggttgtgaaaatacatgagataaatcatgaaggccactatcatcctccttctgcttgcacaagtttcctgggctggaccgtttcaacagagaggcttatttgactttatgctagaagatgaggcttctgggataggcccagaagttcctgatgaccgcgacttcgagccctccctaggcccagtgtgccccttccgctgtcaatgccatcttcgagtggtccagtgttctgatttggaactgggcaccaatccgctgaagagctcaggaattgaaaatggggctttccagggaatgaagaagctctcctacatccgcattgctgataccaatatcaccagcattcctcaaggtcttcctccttcccttacggaattacatcttgatggcaacaaaatcagcagagttgatgcagctagcctgaaaggactgaataatttggctaagttgggattgagtttcaacagcatctctgctgttgacaatggctctctggccaacacgcctcatctgagggagcttcacttggacaacaacaagcttaccagagtacctggtgggctggcagagcataagtacatccaggttgtctaccttcataacaacaatatctctgtagttggatcaagtgacttctgcccacctggacacaacaccaaaaaggcttcttattcgggtgtgagtcttttcagcaacccggtccagtactgggagatacagccatccaccttcagatgtgtctacgtgcgctctgccattcaactcggaaactataagtaattctcaagaaagccctcatttttataacctggcaaaatcttgttaatgtcattgctaaaaaataaataaaagctagatactggaaacctaactgcaatgtggatgttttacccacatgacttattatgcataaagccaaatttccagtttaagtaattgcctacaataaaaagaaattttgcctgccattttcagaatcatcttttgaagctttctgttgatgttaactgagctactagagatattcttatttcactaaatgtaaaatttggagtaaatatatatgtcaatatttagtaaagcttttcttttttaatttccaggaaaaaataaaaagagtatgagtcttctgtaattcattgagcagttagctcatttgagataaagtcaaatgccaaacactagctctgtattaatccccatcattactggtaaagcctcatttgaatgtgtgaattcaatacaggctatgtaaaatttttactaatgtcattattttgaaaaaataaatttaaaaatacattcaaaattactattgtatacaagcttaattgttaatattccctaaacacaattttatgaagggagaagacattggtttgttgacaataacagtacatcttttcaagttctcagctatttcttctacctctccctatcttacatttgagtatggtaacttatgtcatctatgttgaatgtaagcttataaagcacaaagcatacatttcctgactggtctagagaactgatgtttcaatttacccctctgctaaataaatattaaaactatcatgtg

SEQ ID NO: 7985 - DNA, 1726 bp, Homo sapiens
  source 1..1726: mol_type = unassigned DNA
gaatctacaataagacaaatttcaaatcaagttgctccactatactgcataagcagtttagaatcttaagcagatgcaaaaagaataaagcaaatgggaggaaaaaaaaggccgataaagtttctggctacaatacaagagacatatcattaccatatgatctaatgtgggtgtcagccggattgtgttcattgagggaaaccttattttttaactgtgctatggagtagaagcaggaggttttcaacctagtcacagagcagcacctaccccctcctcctttccacacctgcaaactcttttacttgggctgaatatttagtgtaattacatctcagctttgagggctcctgtggcaaattcccggattaaaaggttccctggttgtgaaaatacatgagataaatcatgaaggccactatcatcctccttctgcttgcacaagtttcctgggctggaccgtttcaacagagaggcttatttgactttatgctagaagatgaggcttctgggataggcccagaagttcctgatgaccgcgacttcgagccctccctaggcccagtgtgccccttccgctgtcaatgccatcttcgagtggtccagtgttctgatttgggtctggacaaagtgccaaaggatcttccccctgacacaactctgctagacctgcaaaacaacaaaataaccgaaatcaaagatggagactttaagaacctgaagaaccttcacgttgtctaccttcataacaacaatatctctgtagttggatcaagtgacttctgcccacctggacacaacaccaaaaaggcttcttattcgggtgtgagtcttttcagcaacccggtccagtactgggagatacagccatccaccttcagatgtgtctacgtgcgctctgccattcaactcggaaactataagtaattctcaagaaagccctcatttttataacctggcaaaatcttgttaatgtcattgctaaaaaataaataaaagctagatactggaaacctaactgcaatgtggatgttttacccacatgacttattatgcataaagccaaatttccagtttaagtaattgcctacaataaaaagaaattttgcctgccattttcagaatcatcttttgaagctttctgttgatgttaactgagctactagagatattcttatttcactaaatgtaaaatttggagtaaatatatatgtcaatatttagtaaagcttttcttttttaatttccaggaaaaaataaaaagagtatgagtcttctgtaattcattgagcagttagctcatttgagataaagtcaaatgccaaacactagctctgtattaatccccatcattactggtaaagcctcatttgaatgtgtgaattcaatacaggctatgtaaaatttttactaatgtcattattttgaaaaaataaatttaaaaatacattcaaaattactattgtatacaagcttaattgttaatattccctaaacacaattttatgaagggagaagacattggtttgttgacaataacagtacatcttttcaagttctcagctatttcttctacctctccctatcttacatttgagtatggtaacttatgtcatctatgttgaatgtaagcttataaagcacaaagcatacatttcctgactggtctagagaactgatgtttcaatttacccctctgctaaataaatattaaaactatcatgtg

SEQ ID NO: 7986 - DNA, 2133 bp, Homo sapiens
  source 1..2133: mol_type = unassigned DNA
ggaataataagacacgccctgaaggagtacatcgtctagtgagggacagaccaagcacgcaaaacaaattgcaatataatgtgataagttctttaaaagaggtaagagcaacgtgctttgggagcagagaagagggagaaagcagcatcttgcctggatgagccaggggacacagaagagaagcccactatctcatttaatctttacaactctcttgcaaggttccctggttgtgaaaatacatgagataaatcatgaaggccactatcatcctccttctgcttgcacaagtttcctgggctggaccgtttcaacagagaggcttatttgactttatgctagaagatgaggcttctgggataggcccagaagttcctgatgaccgcgacttcgagccctccctaggcccagtgtgccccttccgctgtcaatgccatcttcgagtggtccagtgttctgatttgggtctggacaaagtgccaaaggatcttccccctgacacaactctgctagacctgcaaaacaacaaaataaccgaaatcaaagatggagactttaagaacctgaagaaccttcacgcattgattcttgtcaacaataaaattagcaaagttagtcctggagcatttacacctttggtgaagttggaacgactttatctgtccaagaatcagctgaaggaattgccagaaaaaatgcccaaaactcttcaggagctgcgtgcccatgagaatgagatcaccaaagtgcgaaaagttactttcaatggactgaaccagatgattgtcatagaactgggcaccaatccgctgaagagctcaggaattgaaaatggggctttccagggaatgaagaagctctcctacatccgcattgctgataccaatatcaccagcattcctcaaggtcttcctccttcccttacggaattacatcttgatggcaacaaaatcagcagagttgatgcagctagcctgaaaggactgaataatttggctaagttgggattgagtttcaacagcatctctgctgttgacaatggctctctggccaacacgcctcatctgagggagcttcacttggacaacaacaagcttaccagagtacctggtgggctggcagagcataagtacatccaggttgtctaccttcataacaacaatatctctgtagttggatcaagtgacttctgcccacctggacacaacaccaaaaaggcttcttattcgggtgtgagtcttttcagcaacccggtccagtactgggagatacagccatccaccttcagatgtgtctacgtgcgctctgccattcaactcggaaactataagtaattctcaagaaagccctcatttttataacctggcaaaatcttgttaatgtcattgctaaaaaataaataaaagctagatactggaaacctaactgcaatgtggatgttttacccacatgacttattatgcataaagccaaatttccagtttaagtaattgcctacaataaaaagaaattttgcctgccattttcagaatcatcttttgaagctttctgttgatgttaactgagctactagagatattcttatttcactaaatgtaaaatttggagtaaatatatatgtcaatatttagtaaagcttttcttttttaatttccaggaaaaaataaaaagagtatgagtcttctgtaattcattgagcagttagctcatttgagataaagtcaaatgccaaacactagctctgtattaatccccatcattactggtaaagcctcatttgaatgtgtgaattcaatacaggctatgtaaaatttttactaatgtcattattttgaaaaaataaatttaaaaatacattcaaaattactattgtatacaagcttaattgttaatattccctaaacacaattttatgaagggagaagacattggtttgttgacaataacagtacatcttttcaagttctcagctatttcttctacctctccctatcttacatttgagtatggtaacttatgtcatctatgttgaatgtaagcttataaagcacaaagcatacatttcctgactggtctagagaactgatgtttcaatttacccctctgctaaataaatattaaaactatcatgtg

SEQ ID NO: 7987 - DNA, 753 bp, Homo sapiens
  source 1..753: mol_type = unassigned DNA
atgaaggccactatcatcctccttctgcttgcacaagtttcctgggctggaccgtttcaacagagaggcttatttgactttatgctagaagatgaggcttctgggataggcccagaagttcctgatgaccgcgacttcgagccctccctaggcccagtgtgccccttccgctgtcaatgccatcttcgagtggtccagtgttctgatttggaactgggcaccaatccgctgaagagctcaggaattgaaaatggggctttccagggaatgaagaagctctcctacatccgcattgctgataccaatatcaccagcattcctcaaggtcttcctccttcccttacggaattacatcttgatggcaacaaaatcagcagagttgatgcagctagcctgaaaggactgaataatttggctaagttgggattgagtttcaacagcatctctgctgttgacaatggctctctggccaacacgcctcatctgagggagcttcacttggacaacaacaagcttaccagagtacctggtgggctggcagagcataagtacatccaggttgtctaccttcataacaacaatatctctgtagttggatcaagtgacttctgcccacctggacacaacaccaaaaaggcttcttattcgggtgtgagtcttttcagcaacccggtccagtactgggagatacagccatccaccttcagatgtgtctacgtgcgctctgccattcaactcggaaactataagtaa

SEQ ID NO: 7988 - DNA, 1438 bp, Homo sapiens
  source 1..1438: mol_type = unassigned DNA
atgaaggccactatcatcctccttctgcttgcacaagtttcctgggctggaccgtttcaacagagaggcttatttgactttatgctagaagatgaggcttctgggataggcccagaagttcctgatgaccgcgacttcgagccctccctaggcccagtgtgccccttccgctgtcaatgccatcttcgagtggtccagtgttctgatttgggtcttcctccttcccttacggaattacatcttgatggcaacaaaatcagcagagttgatgcagctagcctgaaaggactgaataatttggctaagttgggattgagtttcaacagcatctctgctgttgacaatggctctctggccaacacgcctcatctgagggagcttcacttggacaacaacaagcttaccagagtacctggtgggctggcagagcataagtacatccaggttgtctaccttcataacaacaatatctctgtagttggatcaagtgacttctgcccacctggacacaacaccaaaaaggcttcttattcgggtgtgagtcttttcagcaacccggtccagtactgggagatacagccatccaccttcagatgtgtctacgtgcgctctgccattcaactcggaaactataagtaattctcaagaaagccctcatttttataacctggcaaaatcttgttaatgtcattgctaaaaaataaataaaagctagatactggaaacctaactgcaatgtggatgttttacccacatgacttattatgcataaagccaaatttccagtttaagtaattgcctacaataaaaagaaattttgcctgccattttcagaatcatcttttgaagctttctgttgatgttaactgagctactagagatattcttatttcactaaatgtaaaatttggagtaaatatatatgtcaatatttagtaaagcttttcttttttaatttccaggaaaaaataaaaagagtatgagtcttctgtaattcattgagcagttagctcatttgagataaagtcaaatgccaaacactagctctgtattaatccccatcattactggtaaagcctcatttgaatgtgtgaattcaatacaggctatgtaaaatttttactaatgtcattattttgaaaaaataaatttaaaaatacattcaaaattactattgtatacaagcttaattgttaatattccctaaacacaattttatgaagggagaagacattggtttgttgacaataacagtacatcttttcaagttctcagctatttcttctacctctccctatcttacatttgagtatggtaacttatgtcatctatgttgaatgtaagcttataaagcacaaagcatacatttcctgactggtctagagaactgatgtttcaatttacccctctgctaaataaatattaaaactatcatgtg

SEQ ID NO: 7989 - DNA, 519 bp, Homo sapiens
  source 1..519: mol_type = unassigned DNA
atgaaggccactatcatcctccttctgcttgcacaagtttcctgggctggaccgtttcaacagagaggcttatttgactttatgctagaagatgaggcttctgggataggcccagaagttcctgatgaccgcgacttcgagccctccctaggcccagtgtgccccttccgctgtcaatgccatcttcgagtggtccagtgttctgatttgggtctggacaaagtgccaaaggatcttccccctgacacaactctgctagacctgcaaaacaacaaaataaccgaaatcaaagatggagactttaagaacctgaagaaccttcacgttgtctaccttcataacaacaatatctctgtagttggatcaagtgacttctgcccacctggacacaacaccaaaaaggcttcttattcgggtgtgagtcttttcagcaacccggtccagtactgggagatacagccatccaccttcagatgtgtctacgtgcgctctgccattcaactcggaaactataagtaa

SEQ ID NO: 7990 - DNA, 228 bp, Homo sapiens
  source 1..228: mol_type = unassigned DNA
atgaaggccactatcatcctccttctgcttgcacaagtttcctgggctggaccgtttcaacagagaggcttatttgactttatgctagaagatgaggcttctgggataggcccagaagttcctgatgaccgcgacttcgagccctccctaggcccagtgtgccccttccgctgtcaatgccatcttcgagtggtccagtgttctgatttgggttgtctaccttcataa

SEQ ID NO: 7991 - DNA, 823 bp, Homo sapiens
  source 1..823: mol_type = unassigned DNA
gagtagaagcaggaggttttcaacctagtcacagagcagcacctaccccctcctcctttccacacctgcaaactcttttacttgggctgaatatttagtgtaattacatctcagctttgagggctcctgtggcaaattcccggattaaaaggttccctggttgtgaaaatacatgagataaatcatgaaggccactatcatcctccttctgcttgcacaagtttcctgggctggaccgtttcaacagagaggcttatttgactttatgctagaagatgaggcttctgggataggcccagaagttcctgatgaccgcgacttcgagccctccctaggcccagtgtgccccttccgctgtcaatgccatcttcgagtggtccagtgttctgatttgggtcttcctccttcccttacggaattacatcttgatggcaacaaaatcagcagagttgatgcagctagcctgaaaggactgaataatttggctaagttgggattgagtttcaacagcatctctgctgttgacaatggctctctggccaacacgcctcatctgagggagcttcacttggacaacaacaagcttaccagagtacctggtgggctggcagagcataagtacatccaggttgtctaccttcataacaacaatatctctgtagttggatcaagtgacttctgcccacctggacacaacaccaaaaaggcttcttattcgggtgtgagtcttttcagcaacccggtccagtactgggagatacagccatccaccttcagatgtgtctacgtgcgctctgccattcaactcggaaactataagtaa

SEQ ID NO: 7992 - DNA, 750 bp, Homo sapiens
  source 1..750: mol_type = unassigned DNA
tttctttttctctttctttctttccttttctttcttccttctttctttctttcttccttccttctttctttcttcttttttttaatatgctacaattggataatgactcaaaacagctgtaagattctacttacgaacgtacagctttaatatggattcgtctaagtgtacaattcaaggttccctggttgtgaaaatacatgagataaatcatgaaggccactatcatcctccttctgcttgcacaagtttcctgggctggaccgtttcaacagagaggcttatttgactttatgctagaagatgaggcttctgggataggcccagaagttcctgatgaccgcgacttcgagccctccctaggcccagtgtgccccttccgctgtcaatgccatcttcgagtggtccagtgttctgatttgggtctggacaaagtgccaaaggatcttccccctgacacaactctgctagacctgcaaaacaacaaaataaccgaaatcaaagatggagactttaagaacctgaagaaccttcacgcattgattcttgtcaacaataaaattagcaaagttagtcctggagcatttacacctttggtgaagttggaacgactttatctgtccaagaatcagctgaaggaattgccagaaaaaatgcccaaaactcttcaggagctgcgtgcccatgagaatgagatcaccaaagtgcgaaaagttactttcaatggactgaaccagatgattgtcatag

SEQ ID NO: 7993 - DNA, 920 bp, Homo sapiens
  source 1..920: mol_type = unassigned DNA
aacattttctttttgtgggttgttagtgaaacaaccaggcatgttctgctctggagaaaagatttcaaagtgacatctgcattaactgtcgttgctatttattaaatctgcaatgactttgcttcatttttcttttaaacttgtaagacattaaatatgcaaggctagcaagcttgtggtaaaccataaacattgcatttttaatgggaaacagatacaaaaccactccctcagatacaatccaaaggaacaggctgccaaaacaaaagtcttctcttaaagggatactcagtaactgaatgagagtgggctgctagaagaagcttaatgttgaacttaaagtggcagtgtgaataataatctttatgatattttgttaaatgaaaagccacaagcctgtattcaacatgtgctgccttagacacatatcagtagtaaatataaactaagaacaaacatgtaagaaactgaaaaacatttgtttcttctctagagaatctaggcaaaaattcccagaagataccttaaggttccctggttgtgaaaatacatgagataaatcatgaaggccactatcatcctccttctgcttgcacaagtttcctgggctggaccgtttcaacagagaggcttatttgactttatgctagaagatgaggcttctgggataggcccagaagttcctgatgaccgcgacttcgagccctccctaggcccagtgtgccccttccgctgtcaatgccatcttcgagtggtccagtgttctgatttgggtctggacaaagtgccaaaggatcttccccctgacacaactctgctagacctgcaaaacaacaaaataaccgaaatcaaagatggagactttaagaacctgaagaaccttcacgcattgattcttgtcaacaataaaattagcaaag

SEQ ID NO: 7994 - DNA, 593 bp, Homo sapiens
  source 1..593: mol_type = unassigned DNA
attctacatggcaagtagctttgattgtcagggttcaggttccctggttgtgaaaatacatgagataaatcatgaaggccactatcatcctccttctgcttgcacaagtttcctgggctggaccgtttcaacagagaggcttatttgactttatgctagaagatgaggcttctgggataggcccagaagttcctgatgaccgcgacttcgagccctccctaggcccagtgtgccccttccgctgtcaatgccatcttcgagtggtccagtgttctgatttgggtctggacaaagtgccaaaggatcttccccctgacacaactctgctagacctgcaaaacaacaaaataaccgaaatcaaagatggagactttaagaacctgaagaaccttcacgcattgattcttgtcaacaataaaattagcaaagttagtcctggagcatttacacctttggtgaagttggaacgactttatctgtccaagaatcagctgaaggaattgccagaaaaaatgcccaaaactcttcaggagctgcgtgcccatgagaatgagatcaccaaagtgcgaaaagttactttcaatggactgaac

SEQ ID NO: 7995 - DNA, 648 bp, Homo sapiens
  source 1..648: mol_type = unassigned DNA
atggttttcaataattgtcctgaactctgctacagactaataaaacttcggtcaagttgcgagcaaaagggattatttggttccctggttgtgaaaatacatgagataaatcatgaaggccactatcatcctccttctgcttgcacaagtttcctgggctggaccgtttcaacagagaggcttatttgactttatgctagaagatgaggcttctgggataggcccagaagttcctgatgaccgcgacttcgagccctccctaggcccagtgtgccccttccgctgtcaatgccatcttcgagtggtccagtgttctgatttgggtctggacaaagtgccaaaggatcttccccctgacacaactctgctagacctgcaaaacaacaaaataaccgaaatcaaagatggagactttaagaacctgaagaaccttcacgcattgattcttgtcaacaataaaattagcaaagttagtcctggagcatttacacctttggtgaagttggaacgactttatctgtccaagaatcagctgaaggaattgccagaaaaaatgcccaaaactcttcaggagctgcgtgcccatgagaatgagatcaccaaagtgcgaaaagttactttcaatggactgaaccagatgattgtcat

SEQ ID NO: 7996 - DNA, 1930 bp, Homo sapiens
  source 1..1930: mol_type = unassigned DNA
attttttaactgtgctatggagtagaagcaggaggttttcaacctagtcacagagcagcacctaccccctcctcctttccacacctgcaaactcttttacttgggctgaatatttagtgtaattacatctcagctttgagggctcctgtggcaaattcccggattaaaagactgattgcttggaacaaatggaataaatcgtcttgtcaataaagtgatggtcaattgagtcatttgtgtgcaaaatattgtgcaaggcccgggtacagaacaaggaataataagacacgccctgaaggagtacatcgtctagtgagggacagaccaagcacgcaaaacaaattgcaatataatgtgataagttctttaaaagaggtaagagcaacgtgctttgggagcagagaagagggagaaagcagcatcttgcctggatgagccaggggacacagaagagaagcccactatctcatttaatctttacaactctcttgcaaggttccctggttgtgaaaatacatgagataaatcatgaaggccactatcatcctccttctgcttgcacaagtttcctgggctggaccgtttcaacagagaggcttatttgactttatgctagaagatgaggcttctgggataggcccagaagttcctgatgaccgcgacttcgagccctccctaggcccagtgtgccccttccgctgtcaatgccatcttcgagtggtccagtgttctgatttgggtctggacaaagtgccaaaggatcttccccctgacacaactctgctagacctgcaaaacaacaaaataaccgaaatcaaagatggagactttaagaacctgaagaaccttcacgcattgattcttgtcaacaataaaattagcaaagttagtcctggagcatttacacctttggtgaagttggaacgactttatctgtccaagaatcagctgaaggaattgccagaaaaaatgcccaaaactcttcaggagctgcgtgcccatgagaatgagatcaccaaagtgcgaaaagttactttcaatggactgaaccagatgattgtcatagaactgggcaccaatccgctgaagagctcaggaattgaaaatggggctttccagggaatgaagaagctctcctacatccgcattgctgataccaatatcaccagcattcctcaaggtcttcctccttcccttacggaattacatcttgatggcaacaaaatcagcagagttgatgcagctagcctgaaaggactgaataatttggctaagttgggattgagtttcaacagcatctctgctgttgacaatggctctctggccaacacgcctcatctgagggagcttcacttggacaacaacaagcttaccagagtacctggtgggctggcagagcataagtacatccaggttgtctaccttcataacaacaatatctctgtagttggatcaagtgacttctgcccacctggacacaacaccaaaaaggcttcttattcgggtgtgagtcttttcagcaacccggtccagtactgggagatacagccatccaccttcagatgtgtctacgtgcgctctgccattcaactcggaaactataagtaattctcaagaaagccctcatttttataacctggcaaaatcttgttaatgtcattgctaaaaaataaataaaagctagatactggaaacctaactgcaatgtggatgttttacccacatgacttattatgcataaagccaaatttccagtttaagtaattgcctacaataaaaagaaattttgcctgccattttcagaatcatcttttgaagctttctgttgatgttaactgagctactagagatattcttatttcactaaatgtaaaatttggagtaaatatatatgtcaatatttagtaaagcttttcttttttaatttcca

SEQ ID NO: 7997 - DNA, 6797 bp, Homo sapiens
  source 1..6797: mol_type = unassigned DNA
ctccgccgcaaactttttcctccccatcctgtcgcggctcgaaaggaatggaaaatggcggcctagacgcggagtttcctgcccgacccgcggcggctccggcggcgccatgacgcgctgggtgcccaccaagcgcgaggagaagtacggcgtggctttttataactatgatgccagaggagcggatgaactttctttacagatcggagacactgtgcacatcttagaaacatatgaagggtggtaccgaggttacacgttacgaaaaaagtctaagaagggtatatttcctgcttcatatattcatcttaaagaagcgatagttgaaggaaaagggcaacatgaaacagtcatcccgggtgacctccccctcatccaggaagtcaccacgacactccgagagtggtccaccatctggaggcagctctacgtgcaagataacagggagatgtttcgaagtgtgcggcacatgatctatgaccttattgaatggcgatcacaaattctttctggaactctgcctcaggatgaactcaaagaactgaagaagaaggtcacagccaaaattgattatggaaacagaattctagatttggacctggtggttagagatgaagatgggaatattttggatccagaattaactagcacgattagtctcttcagagctcatgaaatagcttctaaacaagtggaggaaaggttacaagaggaaaaatctcaaaagcagaacatagatattaacagacaagccaagtttgctgcaaccccttctctggccttgtttgtgaacctcaaaaatgtggtttgtaaaataggagaagatgctgaagtcctcatgtctctatatgaccctgtggagtccaaattcatcagtgagaactacctggttcgctggtccagttcaggattacctaaagacatagacagattacataatttgcgagccgtgtttactgacctcggaagcaaagacctgaaaagggagaaaatcagttttgtctgtcagattgttcgcgtgggtcgcatggagctgagggacaacaacaccaggaaactgacctcggggttgcggcgaccttttggagtggctgtgatggatgtaacagatataataaatggaaaagtagatgatgaagataagcagcatttcattccctttcagccggtggcaggggagaatgacttccttcagactgttataaacaaagtcatcgctgccaaagaagtcaaccacaaggggcagggtttgtgggtaacattgaaattacttcctggagatatccatcagatccgaaaagagtttccgcatttagtggacaggaccacagctgtggctcgaaaaacagggtttccggagataatcatgcctggtgatgttcgaaatgatatctatgtaacattagttcaaggagattttgataaaggaagcaaaacaacagcgaagaacgtggaggtcacggtgtctgtgtacgatgaggatgggaaacgattagagcatgtgattttcccgggtgctggtgatgaagcgatttcagagtacaaatctgtgatttactaccaagtaaagcagccacgctggtttgagactgttaaggtggccattcccatcgaggacgttaaccgcagtcaccttcggtttaccttccgccacaggtcatcacaggactctaaggataaatctgagaaaatatttgcactagcatttgtcaagctgatgagatacgatggtaccaccctgcgagacggagagcacgatcttatcgtctataaggccgaagcaaagaagctggaagatgctgccacgtacttgagtctgccctccacgaaggcagagttggaagaaaagggccactcggccaccggcaagagcatgcagagccttgggagctgcaccattagcaaggactccttccagatctccacgctcgtgtgctccaccaaactgactcagaacgtggaccttctggggctcttgaaatggcgctccaacaccagcctgctgcagcagaacttgaggcagctgatgaaagtcgatggtggtgaagtagtgaagtttcttcaggacacgttggatgccctcttcaacatcatgatggagaactcagagagtgagacttttgacacgttagtctttgatgctctggtatttatcattggactgattgctgatagaaaatttcagcattttaatcctgttttggaaacttacattaagaaacactttagtgcaacgttagcctacacgaagttgacaaaagtgttgaagaactacgtggacggtgctgagaagccgggagtaaatgagcagctgtacaaagccatgaaagcgctagaatccatcttcaagttcatcgtgcgctccaggatcctgttcaatcaactgtatgaaaacaagggagaggctgacttcgtggaatctttgctgcagctcttcaggtccatcaatgacatgatgagcagcatgtcagaccagaccgtccgggtgaagggggcagcactgaaatacttaccaacgatcgtcaacgatgtgaaattggtgtttgatcccaaagagctcagcaaaatgtttactgaattcatcctcaatgttcccatgggcttgctgaccatccagaaactctactgcttgatcgaaatcgtccacagtgacctcttcacacagcatgactgcagagagatcctgcttcccatgatgaccgatcagctcaagtaccatctggagagacaggaggacctggaggcctgctgtcagctgctcagccacatcctggaggtgctgtacaggaaggacgtggggccaacccagaggcacgtccagattatcatggagaaacttctccggaccgtgaaccgaaccgtcatttccatgggacgagattctgaactcattggaaacttcgtggcttgcatgacagctattttacgacaaatggaagattaccattatgcccacttgatcaagacttttgggaaaatgaggactgatgtggtagatttcctaatggaaacattcatcatgtttaagaacctcattggaaagaacgtttaccccttcgactgggtgatcatgaacatggtgcaaaataaagtcttcctgcgagcaattaatcagtatgcagatatgctgaacaaaaaatttctggatcaagccaactttgagctacagctgtggaacaactactttcacctggctgttgctttccttactcaagagtccctgcaactggagaatttttcaagtgccaagagagccaaaatccttaacaagtacggagatatgaggagacagattggctttgaaatcagagacatgtggtacaaccttggtcaacacaagataaagttcattccagaaatggtgggcccaatattagaaatgacattaattcccgagacggagctgcgcaaagccaccatccccatcttctttgatatgatgcagtgtgaattccattcgacccgaagcttccaaatgtttgaaaatgagatcatcaccaagctggatcatgaagtcgaaggaggcagaggagacgaacagtacaaagtgttatttgataaaatccttctggaacactgcaggaagcacaaatacctcgccaaaacaggagaaacttttgtaaaactcgttgtgcgcttaatggaaaggcttttggattatagaaccatcatgcacgacgagaacaaagaaaaccgcatgagctgcaccgtcaatgtgctgaatttctacaaagaaattgaaagagaagaaatgtatataaggtatttgtacaagctctgtgacctgcacaaggagtgtgataactacaccgaagcggcttacaccttgcttctccatgcaaagcttcttaagtggtcggaggatgtgtgtgtggcccacctcacccagcgggacgggtaccaggccaccacgcagggacagctgaaggagcagctctaccaggaaatcatccactacttcgacaaaggcaagatgtgggaggaggccattgccttgggcaaggagctagccgagcagtatgagaacgaaatgtttgattatgagcaactcagcgaattgctgaaaaaacaggctcagttttatgaaaacatcgtcaaagtgatcaggcccaagcctgactattttgctgttggctactacggacaagggttccccacattcctgcggggaaaagttttcatttaccgagggaaagagtatgagcgccgggaagattttgaggctcggctcttaactcagtttccaaacgccgagaaaatgaagacaacatctccaccaggcgacgatattaaaaactctcctggccagtatattcagtgcttcacagtgaagcccaaactcgatctgcctcctaagtttcacaggccagtgtcagagcagattgtaagtttttacagggtgaacgaggtccagcgatttgaatattctcggccaatccggaagggagagaaaaacccagacaatgaatttgcgaatatgtggatcgagagaaccatatatacaactgcatataaattacctggaattttaaggtggtttgaggtcaagtctgttttcatggtggaaatcagccccctggagaatgccattgagaccatgcagctgacgaacgacaagatcaacagcatggtgcagcagcacctggatgaccccagcctgcccatcaacccgctctccatgctcctgaacggcatcgtggacccagctgtcatggggggcttcgcaaactacgaaaaggccttctttacagaccggtacctgcaggagcaccctgaggcccatgaaaagatcgagaagctcaaggacctgattgcttggcagattccttttctggccgaagggatcagaatccatggagacaaagtcacggaggcactgaggccgttccacgagaggatggaggcctgtttcaaacagctgaaggaaaaggtggagaaagagtacggcgtccgaatcatgccctcaagtctggatgatagaagaggcagccgcccccggtccatggtgcggtccttcacgatgccttcctcatcccgccctctgtctgtggcctctgtctcttccctctcatcggacagcaccccttccagaccaggctccgacgggtttgccctggagcctctcctgccaaagaaaatgcactccaggtcccaggacaagctggacaaggatgacctggagaaggagaagaaggacaagaagaaggaaaaaaggaacagcaaacatcaagagatatttgagaaagaatttaaacccaccgacatttccctgcagcagtctgaggctgtgatcctttcggaaacgataagtcccctgcggccccagagaccgaagagccaggtgatgaacgtcattggaagcgaaaggcgcttctcggtgtccccctcgtcaccgtcctcccagcaaacaccccctccagttacaccaagggccaagctcagcttcagcatgcagtcgagcttggagctgaacggcatgacgggggcggacgtggccgatgtcccaccccctctgcctctcaaaggcagcgtggcagattacgggaatttgatggaaaaccaggacttgctgggctcgccaacacctccacctccccctccacaccagaggcatctgccacctccactgcccagcaaaactccgcctcctccccctccaaagacaactcgcaagcaggcatcggtggactccgggatcgtgcagtgacgtcgcaagcctctctggaaagagtgtgctgcccctccccatctccatgccctctccttctgtgtcccctgagtctgctgtttacctcattgggcctgtgatgttaacatttcgtgcgactgctttttcttcaaaggagttcagttctcaccatggagtgagtggcctttagcgtcatggagcaaggtgggtctgggaggtagatatgggtccgggatgtgctatcgtagttatcagagttgggggcctctgagtgtgtctggctctgagagagtctgagtcttgcccaaacattctttctttttgtgccaaatgacttgcatttgcaaagagctcaattgctctgagctcagccaagtaggagaggctaggccatcactcttaggaagctgtgtagtgatgatgtataagaatcctcctcactgtcatgggatgttgtatccagcccctccttgttccagccggtggtgtgacttcgttggttgaggtgtgtctccaacctacatcagaccatgaagttcaacccctccagggaagctcctgatttcccctgcataattgaaaataggatatttctcagctattgaacagttactaatttatggggtggaaacagcattaagaatactgaatcaaatggaaaaacaaatgaatacaggaagataagtgttcgttcttttctgaaaaagagtatgtgtaccacaagagctggttttaattgggtgaattgtttttgtcctcattctgtacagaaatttgtatatatgatggttcttagaacttgttttaatttttgtggtccttccgtttattataataggcgtccaccaatgattatccatatgtgttcttaatttttaactgctggaagtgttaaaacacacacacacacacacacacattttttttttgagaactccaaagtcctgaaaattttggtggacaatgatttttaaaaaactaactttgtataacctaatatttgtattctctcatctatatttttttattcactataatcatgatactcttctaatagacttaaaagttaatcattgacaacgaaaaataaaatgttattttaaaagac

SEQ ID NO: 7998 - DNA, 7260 bp, Homo sapiens
  source 1..7260: mol_type = unassigned DNA
aaggttggcgcggggaagaccggcgggaggcgcgccccgggcccgcggcgcgattggcgtgaccggcgatggccggtgagcggacccgcaggttcacccggagcctgttgagacctgggcaggcggccgagctccggcacagcgccgcgtccgccgccgcggtggcagtcagcagccggcagcagcagcggcaagaaaagcctaggcttctcgagcctttggattatgagactgtcattgaagaacttgaaaagacctaccggaatgatcctcttcaagatctcttgttcttccccagtgatgacttttcagcagccacagtttcctgggatatccgcacgttgtactcaacagtacctgaagatgcagagcacaaggcagaaaatttactggttaaggaggcttgtaaattttatagttcccagtggcatgtggtaaactacaaatatgaacaatattctggagacattcgacagctaccccgagcagaatacaaaccagagaagcttccttcacattcctttgagattgaccatgaagatgctgataaggatgaagataccacttcccactcgtcttccaaggggggtggaggagcgggaggaactggtgttttcaagtccggctggctctacaaggggaattttaacagcaccgtgaacaacaccgttactgttcggtcattcaaaaagcgctacttccagctgactcagttaccagataactcctacattatgaacttttacaaagatgagaaaatatccaaagaacccaaaggatgcatctttttggattcctgtacaggagtggtgcagaataacagactaagaaaatatgcctttgaattgaaaatgaatgatctgacctattttgtgctggcagctgaaacagagtcagatatggatgaatggatccacaccctcaaccgcattctgcaaatcagtcctgaggggcccctccaagggaggaggagcacagagctcactgatctgggtctggattcgctggataattctgtaacttgtgaatgcacgccagaggaaacagattcttcagagaacaacctacacgcagactttgcaaagtacctcacagaaacagaagatactgtaaaaacaactcgaaacatggagaggctaaatctgttctctctagatccagacatagataccttgaaacttcaaaaaaaagatctcttggaacctgagtctgtgatcaaaccatttgaagaaaaagctgccaagagaatcatgatcatctgtaaagccctcaactcaaatcttcagggatgtgttacggagaatgaaaatgatccgataacgaatattgagcctttttttgtgagtgtggcactttatgacctcagagacagcaggaagatttctgctgattttcatgtggatctaaaccatgctgctgtcagacagatgctcttgggggcttctgtggctttggaaaatggcaacatcgacaccatcactccaagacaatcagaagaacctcacatcaagggacttccagaggaatggctaaaatttccaaagcaggctgtattttctgtaagcaatccacattctgaaattgttttggtggccaaaatcgaaaaagtcttgatgggaaacattgcaagtggtgccgaaccttatattaagaacccagactccaacaagtatgcacaaaagatactaaaatccaacagacaattctgcagcaaattgggaaaataccgtatgccttttgcttgggcagtaagatcagtatttaaggacaaccagggaaatgtggacagagactcaagattttcaccattgtttagacaagaaagtagcaagatttcaactgaggacctagttaaactagtatcagattatagaagggccgacagaataagcaaaatgcagaccattcctggaagcctggatattgctgttgacaacgttcccttggagcatccaaattgtgtaacatcgtcctttatccctgtcaagcctttcaacatgatggctcaaacagaacccacagtggaggtggaagaatttgtttacgattcaacaaagtattgtcggccttacagagtatataaaaatcaaatttatatttaccccaaacacctcaagtatgatagccagaaatgcttcaacaaggcacggaatataactgtgtgcattgaattcaaaaattcagatgaagaaagtgccaagcccctgaagtgtatttatggaaaacctggagggcccctcttcacctcagccgcctacacagcagttctgcaccactctcagaatccggatttctcagatgaggtgaaaattgagctaccaacacaactccatgagaaacaccatattttgttttctttttatcacgtcacctgtgacatcaatgcaaaagctaatgccaaaaagaaggaggctctggaaacgtcagttggatatgcttggcttcctctgatgaaacacgatcagatagcttctcaagagtacaacatcccaatagcaacaagtctgcctcctaattatttaagctttcaagattctgcaagtggaaagcatggtgggagtgacattaaatgggttgatggtggcaaaccacttttcaaagtgtcgacatttgttgtatcaacagtaaatactcaggatccacatgtgaatgcatttttccaagagtgccaaaaaagagagaaagatatgtctcagtcacctacctcaaatttcatccgctcttgtaagaacttattgaatgtggaaaagattcatgcaatcatgagttttctgcctataattttgaatcagctcttcaaagttctggtacagaatgaggaagatgaaataactacaactgtcaccagggttctgaccgacattgtggccaagtgccatgaggagcagctggatcattctgtccagtcatatattaagttcgtgttcaagaccagggcatgcaaggagaggactgtacatgaggaactggctaaaaatgtgactggtcttttgaaatcaaatgactcaacaacagtaaagcatgtcctaaagcattcctggttcttctttgcaattatcctaaaatcgatggcacagcacttgattgacacaaataaaatccagcttccccggcctcagagatttcctgaatcttaccaaaatgaattggacaatcttgtcatggtcctatccgaccatgtgatttggaaatacaaggatgcacttgaagaaacaagaagggcaaaccacagcgttgccagatttctcaagcgctgctttacatttatggaccgagggtatgtgtttaagatggtcaacaattacatcagcatgttctcctccggtgaccttaagaccttgtgccagtataaatttgattttcttcaagaagtatgtcaacatgaacactttatccctttgtgtctgcccataagatcagcaaacattccagatcctttgacaccttcagaatcgactcaagagttacatgcatcagatatgcctgaatattcagtcacaaatgaattttgtcgcaaacacttcttaatcggaattctgctccgagaagttggctttgccctgcaggaagaccaagatgtcagacacttagctttagctgtcctaaaaaatctaatggctaagcattcatttgatgatcgatacagagagccaagaaagcaggcccagatagcaagtttatacatgcccctgtacggcatgctcctggacaatatgccaaggatttatctgaaggacctgtatccttttactgtcaatacatctaatcaggggtctagagatgatctaagcaccaatggaggatttcaaagccagacagctatcaaacatgcaaactctgtggatacatcattttctaaagatgttttaaattccatagcagcattttcatcaatagctatttctacagtaaaccatgctgactccagagcatctttagcaagtcttgactccaatccaagtaccaatgagaagagcagtgagaagacggacaactgtgaaaagatcccaagacccttgtctttgattggctcaactcttcgatttgacaagttagatcaagcagaaaccaggagtctcctgatgtgttttcttcacattatgaaaacgatttcgtacgagactctgattgcctactggcagagagctcccagcccagaggtgtccgacttcttcagcatcttggacgtttgtcttcaaaatttcagatacctaggaaaacgcaacataataagaaaaattgctgctgcatttaaatttgtgcagtccacccagaacaatggaactctcaaaggatccaatccttcctgccagacatcaggtctcttgtcacaatggatgcactccacttccagtcatgaaggccataagcagcacagatcacaaactttacctataattcgaggcaaaaatgcactttctaaccccaaactcttacagatgttagacaataccatgaccagcaactccaatgaaatagacatcgtgcatcatgtagacactgaggccaatatagctacggaggtttgcctcactattctggacctgttatccctcttcacacagactcatcagagacaactccaacaatgtgactgtcaaaattcattgatgaaaagggtctttgatacctacatgctctttttccaagtcaatcagtcagccacagcgctgaagcatgtgtttgcctccttgagactgtttgtatgcaagtttccttcagcgttctttcaagggcctgctgacctctgtggatcattctgttacgaagtcctaaaatgctgtaaccacaggtcacggtcaactcagacagaagcctcagcccttctgtactttttcatgaggaagaattttgaatttaacaagcagaagtcaattgtccggtcccacttacaactcatcaaagctgtgagccagttaatagccgatgctgggattggaggctctcggtttcaacattcgcttgcaattaccaataatttcgccaatggagataagcaaatgaaaaacagcaatttcccagcagaggtgaaggacctgactaagcgtataaggactgttttgatggccacagctcagatgaaggagcacgagaaggaccccgagatgctggtggatctccagtacagcctggcaaactcctacgcaagcactcctgaactacgcaggacctggctggaaagtatggccaagattcatgccagaaacggagatttatctgaggctgccatgtgttacatccatattgctgctctcattgcagagtatctgaaaagaaagggttactggaaagtggaaaagatttgcacagcatccctgctctcggaggatacccacccctgtgatagcaactcattactaacaactcccagtggaggaagcatgttctctatgggatggccagcttttttgagcattacaccaaacattaaggaagaaggagcgatgaaagaggattctggaatgcaagatacaccatacaatgagaatatcctggtggagcagctatacatgtgtgtggagtttctctggaagtctgagcgatatgaactcattgctgatgtcaacaagcccatcattgctgtctttgagaaacaacgagacttcaaaaaattgtcagatctctactacgacattcatcggtcatatctgaaagtggcagaggtggtgaattcggagaagcggctgtttggtcgctactatcgtgtggcattttatgggcagggcttttttgaagaagaagaaggtaaagagtatatttataaagagcctaagctgacaggtctgtccgagatttcccaaagattactcaagctctatgcagataaatttggagcagacaatgtgaagataatccaggattccaacaaggtaaaccccaaggatttggaccccaaatatgcctacatccaggtgacctatgtgacgccgttctttgaggaaaaggaaatcgaagaccggaagacagatttcgaaatgcaccacaacatcaaccgctttgtcttcgagacacccttcacgctgtcgggcaagaagcacggtggggtggcggagcagtgcaagcggcggacgatcctgacaacgagtcacctgttcccctacgtgaagaagagaatacaagtaattagccaatcgagcacagaactgaatccaattgaagtggcaattgacgagatgtccaagaaggtttctgagcttaatcagctttgcacaatggaagaagtggacatgatcagactgcagctcaaactgcaaggaagtgtcagcgtgaaggttaatgctgggccaatggcctatgcacgagcttttcttgaagaaaccaatgcaaagaagtaccctgacaaccaagtaaagcttttgaaggagatcttcaggcaatttgcagatgcatgtgggcaggcccttgacgtgaatgagcgcctcatcaaagaggaccagctggagtaccaggaagaactgaggtcccactacaaggacatgctcagcgaactctccacagtcatgaatgagcagattacgggcagggacgacctgtcaaagcgcggagtggaccaaacctgcactcgagtaattagcaaagcaactccggccctacccacggtctccatctcatctagtgctgaagtctgagggctctgcagcatcagacccacctctaagagaactttctgaatttgcagctaatctcggggaagagaaagataggtttaatttatttgaagttttcatggtgttaatatttttgtttacctcgctagcttcagaattttgccaacctctgaatttgcacattttgtataatttttttttctttgagcagtgttgatcaagccaggttgaatatttgccatgaaattccagtgaatgtgtagctcaaatgcaaaccctaagtttgctgtcagttattgtatggtcagtaccccagtcctagtacacatattttaaaggttaaagtgaatgtttttgtaacatttaagcatatttcagatgtaaataaaagattgtaaaatatacggtttttaccaaatttaaaagatcctttttagttaatactatgacagtactaaaaatatatgaataacatttcagataccattatattaaaatatttgtgtatgtgtacaaaagcgttgataaatactaatctttaaagtttgtggagttcctttatttgtaatatatgtgctcttaaaagcaatgggatgtgaaattatgaaagtattttattgttcatagaaataaaaaacacagttactttgca

SEQ ID NO: 7999 - DNA, 4257 bp, Homo sapiens
  source 1..4257: mol_type = unassigned DNA
gtcttttgaaatcaaatgactcaacaacagtaaagcatgtcctaaagcattcctggttcttctttgcaattatcctaaaatcgatggcacagcacttgattgacacaaataaaatccagcttccccggcctcagagatttcctgaatcttaccaaaatgaattggacaatcttgtcatggtcctatccgaccatgtgatttggaaatacaaggatgcacttgaagaaacaagaagggcaaaccacagcgttgccagatttctcaagcgctgctttacatttatggaccgagggtatgtgtttaagatggtcaacaattacatcagcatgttctcctccggtgaccttaagaccttgtgccagtataaatttgattttcttcaagaagtatgtcaacatgaacactttatccctttgtgtctgcccataagatcagcaaacattccagatcctttgacaccttcagaatcgactcaagagttacatgcatcagatatgcctgaatattcagtcacaaatgaattttgtcgcaaacacttcttaatcggaattctgctccgagaagttggctttgccctgcaggaagaccaagatgtcagacacttagctttagctgtcctaaaaaatctaatggctaagcattcatttgatgatcgatacagagagccaagaaagcaggcccagatagcaagtttatacatgcccctgtacggcatgctcctggacaatatgccaaggatttatctgaaggacctgtatccttttactgtcaatacatctaatcaggggtctagagatgatctaagcaccaatggaggatttcaaagccagacagctatcaaacatgcaaactctgtggatacatcattttctaaagatgttttaaattccatagcagcattttcatcaatagctatttctacagtaaaccatgctgactccagagcatctttagcaagtcttgactccaatccaagtaccaatgagaagagcagtgagaagacggacaactgtgaaaagatcccaagacccttgtctttgattggctcaactcttcgatttgacaagttagatcaagcagaaaccaggagtctcctgatgtgttttcttcacattatgaaaacgatttcgtacgagactctgattgcctactggcagagagctcccagcccagaggtgtccgacttcttcagcatcttggacgtttgtcttcaaaatttcagatacctaggaaaacgcaacataataagaaaaattgctgctgcatttaaatttgtgcagtccacccagaacaatggaactctcaaaggatccaatccttcctgccagacatcaggtctcttgtcacaatggatgcactccacttccagtcatgaaggccataagcagcacagatcacaaactttacctataattcgaggcaaaaatgcactttctaaccccaaactcttacagatgttagacaataccatgaccagcaactccaatgaaatagacatcgtgcatcatgtagacactgaggccaatatagctacggaggtttgcctcactattctggacctgttatccctcttcacacagactcatcagagacaactccaacaatgtgactgtcaaaattcattgatgaaaagggtctttgatacctacatgctctttttccaagtcaatcagtcagccacagcgctgaagcatgtgtttgcctccttgagactgtttgtatgcaagtttccttcagcgttctttcaagggcctgctgacctctgtggatcattctgttacgaagtcctaaaatgctgtaaccacaggtcacggtcaactcagacagaagcctcagcccttctgtactttttcatgaggaagaattttgaatttaacaagcagaagtcaattgtccggtcccacttacaactcatcaaagctgtgagccagttaatagccgatgctgggattggaggctctcggtttcaacattcgcttgcaattaccaataatttcgccaatggagataagcaaatgaaaaacagcaatttcccagcagaggtgaaggacctgactaagcgtataaggactgttttgatggccacagctcagatgaaggagcacgagaaggaccccgagatgctggtggatctccagtacagcctggcaaactcctacgcaagcactcctgaactacgcaggacctggctggaaagtatggccaagattcatgccagaaacggagatttatctgaggctgccatgtgttacatccatattgctgctctcattgcagagtatctgaaaagaaagggcatgttctctatgggatggccagcttttttgagcattacaccaaacattaaggaagaaggagcgatgaaagaggattctggaatgcaagatacaccatacaatgagaatatcctggtggagcagctatacatgtgtgtggagtttctctggaagtctgagcgatatgaactcattgctgatgtcaacaagcccatcattgctgtctttgagaaacaacgagacttcaaaaaattgtcagatctctactacgacattcatcggtcatatctgaaagtggcagaggtggtgaattcggagaagcggctgtttggtcgctactatcgtgtggcattttatgggcagggtgttggcttttttgaagaagaagaaggtaaagagtatatttataaagagcctaagctgacaggtctgtccgagatttcccaaagattactcaagctctatgcagataaatttggagcagacaatgtgaagataatccaggattccaacaaggtaaaccccaaggatttggaccccaaatatgcctacatccaggtgacctatgtgacgccgttctttgaggaaaaggaaatcgaagaccggaagacagatttcgaaatgcaccacaacatcaaccgctttgtcttcgagacacccttcacgctgtcgggcaagaagcacggtggggtggcggagcagtgcaagcggcggacgatcctgacaacgagtcacctgttcccctacgtgaagaagagaatacaagtaattagccaatcgagcacagaactgaatccaattgaagtggcaattgacgagatgtccaagaaggtttctgagcttaatcagctttgcacaatggaagaagtggacatgatcagactgcagctcaaactgcaaggaagtgtcagcgtgaaggttaatgctgggccaatggcctatgcacgagcttttcttgaagaaaccaatgcaaagaagtaccctgacaaccaagtaaagcttttgaaggagatcttcaggcaatttgcagatgcatgtgggcaggcccttgacgtgaatgagcgcctcatcaaagaggaccagctggagtaccaggaagaactgaggtcccactacaaggacatgctcagcgaactctccacagtcatgaatgagcagctctgtcgaggtccgtgtttatacagcttctgttcctctgtgtctagtatttccctcagtactgtaagcaaaagtgattacgggcagggacgacctgtcaaagcgcggagtggaccaaacctgcactcgagtaattagcaaagcaactccggccctacccacggtctccatctcatctagtgctgaagtctgagggctctgcagcatcagacccacctctaagagaactttctgaatttgcagctaatctcggggaagagaaagataggtttaatttatttgaagttttcatggtgttaatatttttgtttacctcgctagcttcagaattttgccaacctctgaatttgcacattttgtataatttttttttctttgagcagtgttgatcaagccaggttgaatatttgccatgaaattccagtgaatgtgtagctcaaatgcaaaccctaagtttgctgtcagttattgtatggtcagtaccccagtcctagtacacatattttaaaggttaaagtgaatgtttttgtaacatttaagcatatttcagatgtaaataaaagattgtaaaatatacggtttttaccaaatttaaaagatcctttttagttaatactatgacagtactaaaaatatatgaataacatttcagataccattatattaaaatatttgtgtatgtgtacaaaagcgttgataaatactaatctttaaagtttgtggagttcctttatttgtaatatatgtgctcttaaaagcaatgggatgtgaaattatgaaagtattttattgttcatagaaataaaaaacacagttactttgc

SEQ ID NO: 8000 - DNA, 7288 bp, Homo sapiens
  source 1..7288: mol_type = unassigned DNA
atttccctttttaccaagaagaaagatttgttcagcctggtgacgcttcagaagagaagagtttaacgacattgatattttgaaatattttgtgactcaaattatagcaatacgatgagttttcgagggaaggtttttaaacgggagcccagtgaattttggaagaagagacgaactgtgaggagagtaaaccaagaagaaatccacagatttagttctcaagaaaagcctaggcttctcgagcctttggattatgagactgtcattgaagaacttgaaaagacctaccggaatgatcctcttcaagatctcttgttcttccccagtgatgacttttcagcagccacagtttcctgggatatccgcacgttgtactcaacagtacctgaagatgcagagcacaaggcagaaaatttactggttaaggaggcttgtaaattttatagttcccagtggcatgtggtaaactacaaatatgaacaatattctggagacattcgacagctaccccgagcagaatacaaaccagagaagcttccttcacattcctttgagattgaccatgaagatgctgataaggatgaagataccacttcccactcgtcttccaaggggggtggaggagcgggaggaactggtgttttcaagtccggctggctctacaaggggaattttaacagcaccgtgaacaacaccgttactgttcggtcattcaaaaagcgctacttccagctgactcagttaccagataactcctacattatgaacttttacaaagatgagaaaatatccaaagaacccaaaggatgcatctttttggattcctgtacaggagtggtgcagaataacagactaagaaaatatgcctttgaattgaaaatgaatgatctgacctattttgtgctggcagctgaaacagagtcagatatggatgaatggatccacaccctcaaccgcattctgcaaatcagtcctgaggggcccctccaagggaggaggagcacagagctcactgatctgggtctggattcgctggataattctgtaacttgtgaatgcacgccagaggaaacagattcttcagagaacaacctacacgcagactttgcaaagtacctcacagaaacagaagatactgtaaaaacaactcgaaacatggagaggctaaatctgttctctctagatccagacatagataccttgaaacttcaaaaaaaagatctcttggaacctgagtctgtgatcaaaccatttgaagaaaaagctgccaagagaatcatgatcatctgtaaagccctcaactcaaatcttcagggatgtgttacggagaatgaaaatgatccgataacgaatattgagcctttttttgtgagtgtggcactttatgacctcagagacagcaggaagatttctgctgattttcatgtggatctaaaccatgctgctgtcagacagatgctcttgggggcttctgtggctttggaaaatggcaacatcgacaccatcactccaagacaatcagaagaacctcacatcaagggacttccagaggaatggctaaaatttccaaagcaggctgtattttctgtaagcaatccacattctgaaattgttttggtggccaaaatcgaaaaagtcttgatgggaaacattgcaagtggtgccgaaccttatattaagaacccagactccaacaagtatgcacaaaagatactaaaatccaacagacaattctgcagcaaattgggaaaataccgtatgccttttgcttgggcagtaagatcagtatttaaggacaaccagggaaatgtggacagagactcaagattttcaccattgtttagacaagaaagtagcaagatttcaactgaggacctagttaaactagtatcagattatagaagggccgacagaataagcaaaatgcagaccattcctggaagcctggatattgctgttgacaacgttcccttggagcatccaaattgtgtaacatcgtcctttatccctgtcaagcctttcaacatgatggctcaaacagaacccacagtggaggtggaagaatttgtttacgattcaacaaagtattgtcggccttacagagtatataaaaatcaaatttatatttaccccaaacacctcaagtatgatagccagaaatgcttcaacaaggcacggaatataactgtgtgcattgaattcaaaaattcagatgaagaaagtgccaagcccctgaagtgtatttatggaaaacctggagggcccctcttcacctcagccgcctacacagcagttctgcaccactctcagaatccggatttctcagatgaggtgaaaattgagctaccaacacaactccatgagaaacaccatattttgttttctttttatcacgtcacctgtgacatcaatgcaaaagctaatgccaaaaagaaggaggctctggaaacgtcagttggatatgcttggcttcctctgatgaaacacgatcagatagcttctcaagagtacaacatcccaatagcaacaagtctgcctcctaattatttaagctttcaagattctgcaagtggaaagcatggtgggagtgacattaaatgggttgatggtggcaaaccacttttcaaagtgtcgacatttgttgtatcaacagtaaatactcaggatccacatgtgaatgcatttttccaagagtgccaaaaaagagagaaagatatgtctcagtcacctacctcaaatttcatccgctcttgtaagaacttattgaatgtggaaaagattcatgcaatcatgagttttctgcctataattttgaatcagctcttcaaagttctggtacagaatgaggaagatgaaataactacaactgtcaccagggttctgaccgacattgtggccaagtgccatgaggagcagctggatcattctgtccagtcatatattaagttcgtgttcaagaccagggcatgcaaggagaggactgtacatgaggaactggctaaaaatgtgactggtcttttgaaatcaaatgactcaacaacagtaaagcatgtcctaaagcattcctggttcttctttgcaattatcctaaaatcgatggcacagcacttgattgacacaaataaaatccagcttccccggcctcagagatttcctgaatcttaccaaaatgaattggacaatcttgtcatggtcctatccgaccatgtgatttggaaatacaaggatgcacttgaagaaacaagaagggcaaaccacagcgttgccagatttctcaagcgctgctttacatttatggaccgagggtatgtgtttaagatggtcaacaattacatcagcatgttctcctccggtgaccttaagaccttgtgccagtataaatttgattttcttcaagaagtatgtcaacatgaacactttatccctttgtgtctgcccataagatcagcaaacattccagatcctttgacaccttcagaatcgactcaagagttacatgcatcagatatgcctgaatattcagtcacaaatgaattttgtcgcaaacacttcttaatcggaattctgctccgagaagttggctttgccctgcaggaagaccaagatgtcagacacttagctttagctgtcctaaaaaatctaatggctaagcattcatttgatgatcgatacagagagccaagaaagcaggcccagatagcaagtttatacatgcccctgtacggcatgctcctggacaatatgccaaggatttatctgaaggacctgtatccttttactgtcaatacatctaatcaggggtctagagatgatctaagcaccaatggaggatttcaaagccagacagctatcaaacatgcaaactctgtggatacatcattttctaaagatgttttaaattccatagcagcattttcatcaatagctatttctacagtaaaccatgctgactccagagcatctttagcaagtcttgactccaatccaagtaccaatgagaagagcagtgagaagacggacaactgtgaaaagatcccaagacccttgtctttgattggctcaactcttcgatttgacaagttagatcaagcagaaaccaggagtctcctgatgtgttttcttcacattatgaaaacgatttcgtacgagactctgattgcctactggcagagagctcccagcccagaggtgtccgacttcttcagcatcttggacgtttgtcttcaaaatttcagatacctaggaaaacgcaacataataagaaaaattgctgctgcatttaaatttgtgcagtccacccagaacaatggaactctcaaaggatccaatccttcctgccagacatcaggtctcttgtcacaatggatgcactccacttccagtcatgaaggccataagcagcacagatcacaaactttacctataattcgaggcaaaaatgcactttctaaccccaaactcttacagatgttagacaataccatgaccagcaactccaatgaaatagacatcgtgcatcatgtagacactgaggccaatatagctacggaggtttgcctcactattctggacctgttatccctcttcacacagactcatcagagacaactccaacaatgtgactgtcaaaattcattgatgaaaagggtctttgatacctacatgctctttttccaagtcaatcagtcagccacagcgctgaagcatgtgtttgcctccttgagactgtttgtatgcaagtttccttcagcgttctttcaagggcctgctgacctctgtggatcattctgttacgaagtcctaaaatgctgtaaccacaggtcacggtcaactcagacagaagcctcagcccttctgtactttttcatgaggaagaattttgaatttaacaagcagaagtcaattgtccggtcccacttacaactcatcaaagctgtgagccagttaatagccgatgctgggattggaggctctcggtttcaacattcgcttgcaattaccaataatttcgccaatggagataagcaaatgaaaaacagcaatttcccagcagaggtgaaggacctgactaagcgtataaggactgttttgatggccacagctcagatgaaggagcacgagaaggaccccgagatgctggtggatctccagtacagcctggcaaactcctacgcaagcactcctgaactacgcaggacctggctggaaagtatggccaagattcatgccagaaacggagatttatctgaggctgccatgtgttacatccatattgctgctctcattgcagagtatctgaaaagaaagggttactggaaagtggaaaagatttgcacagcatccctgctctcggaggatacccacccctgtgatagcaactcattactaacaactcccagtggaggaagcatgttctctatgggatggccagcttttttgagcattacaccaaacattaaggaagaaggagcgatgaaagaggattctggaatgcaagatacaccatacaatgagaatatcctggtggagcagctatacatgtgtgtggagtttctctggaagtctgagcgatatgaactcattgctgatgtcaacaagcccatcattgctgtctttgagaaacaacgagacttcaaaaaattgtcagatctctactacgacattcatcggtcatatctgaaagtggcagaggtggtgaattcggagaagcggctgtttggtcgctactatcgtgtggcattttatgggcagggcttttttgaagaagaagaaggtaaagagtatatttataaagagcctaagctgacaggtctgtccgagatttcccaaagattactcaagctctatgcagataaatttggagcagacaatgtgaagataatccaggattccaacaaggtaaaccccaaggatttggaccccaaatatgcctacatccaggtgacctatgtgacgccgttctttgaggaaaaggaaatcgaagaccggaagacagatttcgaaatgcaccacaacatcaaccgctttgtcttcgagacacccttcacgctgtcgggcaagaagcacggtggggtggcggagcagtgcaagcggcggacgatcctgacaacgagtcacctgttcccctacgtgaagaagagaatacaagtaattagccaatcgagcacagaactgaatccaattgaagtggcaattgacgagatgtccaagaaggtttctgagcttaatcagctttgcacaatggaagaagtggacatgatcagactgcagctcaaactgcaaggaagtgtcagcgtgaaggttaatgctgggccaatggcctatgcacgagcttttcttgaagaaaccaatgcaaagaagtaccctgacaaccaagtaaagcttttgaaggagatcttcaggcaatttgcagatgcatgtgggcaggcccttgacgtgaatgagcgcctcatcaaagaggaccagctggagtaccaggaagaactgaggtcccactacaaggacatgctcagcgaactctccacagtcatgaatgagcagattacgggcagggacgacctgtcaaagcgcggagtggaccaaacctgcactcgagtaattagcaaagcaactccggccctacccacggtctccatctcatctagtgctgaagtctgagggctctgcagcatcagacccacctctaagagaactttctgaatttgcagctaatctcggggaagagaaagataggtttaatttatttgaagttttcatggtgttaatatttttgtttacctcgctagcttcagaattttgccaacctctgaatttgcacattttgtataatttttttttctttgagcagtgttgatcaagccaggttgaatatttgccatgaaattccagtgaatgtgtagctcaaatgcaaaccctaagtttgctgtcagttattgtatggtcagtaccccagtcctagtacacatattttaaaggttaaagtgaatgtttttgtaacatttaagcatatttcagatgtaaataaaagattgtaaaatatacggtttttaccaaatttaaaagatcctttttagttaatactatgacagtactaaaaatatatgaataacatttcagataccattatattaaaatatttgtgtatgtgtacaaaagcgttgataaatactaatctttaaagtttgtggagttcctttatttgtaatatatgtgctcttaaaagcaatgggatgtgaaattatgaaagtattttattgttcatagaaataaaaaacacagttactttgca

SEQ ID NO: 8001 - DNA, 6097 bp, Homo sapiens
  source 1..6097: mol_type = unassigned DNA
aggaaggaagtggggccctgcggcgcccagccaccccctgacggcttccccacgggaggacgcgaggccccggcccagccatggccccctggcgcaaagctgacaaggagcggcacggcgtggccatatacaacttccaaggcagcggagccccccagctctccctgcagatcggcgatgtggtgcgaatacaggagacgtgtggagactggtataggggatacctcataaagcacaaaatgttacagggcatttttcctaagtcatttatccacatcaaggaagtgacagttgagaaaagaagaaatactgagaacatcattcctgcagaaattcctctggcacaagaagtgacaacgacactttgggaatggggaagcatctggaaacaactctatgtggccagcaaaaaggagcgttttctccaggtgcagtccatgatgtacgatctgatggagtggaggtcccagcttctctcaggaaccttacccaaggatgagctgaaggaactgaagcagaaagtcacgtccaaaattgactatggcaacaaaatccttgagcttgatttgattgtcagagatgaagacggaaatatcttggaccctgataataccagtgtcatcagcttgttccatgcacatgaggaagcaactgataaaatcacagagcgtatcaaagaagaaatgtcaaaagaccagccagattatgcaatgtattcccggatctcctcatcccccacccatagcctctatgtgtttgtgagaaactttgtgtgcagaattggggaagatgctgagctcttcatgtctctctacgaccccaacaagcaaacggtcataagtgagaactacctagtgcgatggggcagccggggcttccctaaggagattgagatgctcaacaatctgaaggtggtcttcacggatcttggaaacaaagacctcaacagggataaaatttacttgatttgtcaaatagtccgggtcggcaagatggatcttaaggatactggtgcaaagaagtgcacgcagggactgaggaggccctttggggtggcagttatggatataacagacatcatcaaggggaaagcagagagtgatgaagaaaagcagcacttcattccttttcacccggttacagctgagaatgacttcctacacagcctgctgggcaaagtcatagcctccaagggggacagtggagggcaaggcctctgggtgaccatgaagatgctggtgggtgacatcattcagattcgcaaggactatccacacctggtggacaggaccaccgtggtggccaggaagctgggattcccagagatcatcatgccaggggatgtcaggaacgacatctacattactctcttacaaggtgactttgacaagtacaacaagaccacacagaggaatgtggaagtcatcatgtgtgtgtgcgcggaggatggcaaaacgctgcctaatgcaatttgcgtgggagcaggggacaagcccatgaatgagtatcgctccgttgtgtactatcaagtcaaacagccacgctggatggaaacagtcaaggtggctgtccctattgaagacatgcagaggatccatctgcgattcatgtttcgacatcggtcatctctggaatctaaagataaaggagaaaagaactttgccatgtcctatgtgaagctgatgaaagaagatgggactactctacacgatggattccatgacttagttgtcctcaagggggacagcaagaagatggaggatgccagcgcatacctgacccttccttcttatcgacaccatgtggaaaacaagggggccacgctgagcaggagctccagcagtgttggggggctttctgtcagctcccgggatgtgttctccatttccaccctggtgtgctccacaaagctcactcagaatgtgggcttgctgggtttgctgaagtggcgtatgaagcctcaactgctacaggagaatttagaaaagttgaagattgtggatggagaggaagtggtgaagtttctccaggatactctggatgccctcttcaacatcatgatggagcattctcaaagtgatgaatatgacatcctcgtctttgatgccttgatttacataataggactcattgcagaccggaaatttcagcatttcaacaccgttctggaggcttacatccaacagcatttcagtgcgaccttggcttacaagaaattgatgacagtgctgaagacttacttggatacctccagcagaggggagcaatgtgagccaatcctaagaacgctgaaggctttggaatatgtgttcaagttcattgttcggtcgaggacattattttcacagctttatgaaggcaaagaacagatggagtttgaagaatccatgagacggctctttgaatccatcaacaatctgatgaaaagtcaatacaaaactaccatccttttgcaggtggcggctttgaaatacatcccatctgtcctgcatgatgtagaaatggtctttgatgcgaagttactcagccaactcctgtatgagttctacacctgcatccctcctgtgaaactccagaagcagaaagtacagtctatgaatgagatagtccagagcaacctctttaaaaagcaagaatgccgggacattctgcttcctgtcatcaccaaagagctgaaggagctgctggagcagaaggatgacatgcaacaccaggtcctggagaggaagtactgcgttgaattgctcaacagcatcttggaagtccttagctaccaggatgcggccttcacctaccaccatatccaggagatcatggtccagctgctgcggacagtgaaccggacagtcatcaccatgggccgggatcacattctgattagtcactttgtggcatgtatgacagccatcttaaaccagatgggtgaccagcactactccttctacattgagaccttccagaccagctctgaacttgtggacttcttgatggagaccttcatcatgttcaaggacctcattggaaagaacgtgtaccctggagactggatggccatgagcatggttcaaaacagggtcttcctgagagctatcaacaagtttgcagaaaccatgaaccagaagttcctagaacacacgaactttgagttccagctgtggaacaactattttcatctggcagtggcttttatcacccaggattctctgcagctggagcagttctcacacgccaaatacaacaaaatcctgaataagtatggggacatgagacggctaattggcttctccatccgtgatatgtggtacaagcttggtcagaacaaaatctgcttcatcccaggcatggtaggacctatattagagatgacacttatccctgaggctgagctccggaaagccaccataccaatcttcttcgacatgatgctgtgtgaatatcaaagaagtggggatttcaaaaagtttgaaaacgaaatcatcctgaagctggaccacgaggtagaagggggccgaggcgacgagcagtacatgcagctcctggagtcaatcctgatggaatgtgctgcagagcacccaaccattgccaagtcggtggagaacttcgtgaacctggtcaaaggcctcctggagaagctgctggattaccggggtgtgatgacagatgagagcaaagacaaccgcatgagctgcaccgtgaacctgctgaatttctacaaagataacaacagggaggagatgtacataaggtacctgtacaaactccgcgatcttcacctggactgtgacaattacacagaggctgcctacacgctccttctccacacctggcttctcaagtggtcggatgagcagtgtgcatcacaggtcatgcagacaggccagcagcacccccagacacaccggcagctgaaggagacgctctacgagaccatcataggctactttgacaaaggaaagatgtgggaagaggccataagtctgtgcaaggagctggcggaacagtacgagatggagatctttgactatgagctgctcagccagaacctgatccagcaggcaaaattctatgaaagcatcatgaaaatcctcaggcccaaaccagactactttgctgttggatactacggccagggattcccctccttcctgcggaacaaagtgttcatctaccgcgggaaggaatatgagcgaagagaagatttccagatgcagctgatgacccagttccccaatgcagagaagatgaacaccacctctgccccgggagatgatgtgaagaatgccccaggccagtatatccagtgcttcactgtccagcctgtcttggatgaacatcccaggttcaagaataagccagtgcctgaccagattataaacttctacaaatccaactacgtgcaaaggttccactactcccggcccgtgcgcagggggaccgtagacccagagaatgagtttgcttccatgtggattgagagaacctccttcgtgactgcatacaagctgccggggatcctgcgctggtttgaggtggtgcacatgtcgcagaccacaattagtcctctggagaatgccatagaaaccatgtccacggccaatgagaagatcctgatgatgataaaccagtaccagagtgatgagaccctccccatcaacccactctccatgctcctgaacgggattgtggaccctgctgtcatgggaggcttcgccaagtatgagaaggccttcttcactgaagagtatgtcagggaccaccctgaggaccaggacaagctgacccacctcaaggacctgattgcatggcagatccccttcttgggagctgggattaagatccatgagaaaagggtgtcagataacttgcgacccttccatgaccggatggaggaatgtttcaagaacctgaaaatgaaggtggagaaggagtacggtgtccgagagatgcctgactttgacgacaggagagtgggccgtcccaggtctatgctgcgctcatacagacagatgtccatcatctctctggcttccatgaattctgactgcagcacccccagcaagcctacctcagagagctttgacctggaattagcatcacccaagacgccgagagtggagcaggaggaaccgatctccccggggagcaccctgcctgaggtcaagctgcggaggtccaagaagaggacaaagagaagcagcgtagtttttgcggatgagaaagcagctgcagagtcggacctgaagcggctttccaggaagcatgagttcatgagtgacaccaacctctcggagcatgcggccatccccctcaaggcgtctgtcctctctcaaatgagctttgccagccagtccatgcctaccatcccagccctggcgctctcagtggcaggcatccctgggttggatgaggccaacacatctccccgcctcagccagaccttcctccaactctcagatggtgacaagaagacactcacacggaagaaggtcaatcagttcttcaagacaatgctggccagcaaatcggctgaagaaggcaaacagatcccagactcgctgtccacggacctgtgagctgctgctgactagggctgcatgggagagccagggaggggagtttctggaagaggaaagccatgcgtggaacatcgaagcctcagagagtgggagactgtccccatcagttgtccttacttagaggagacagagaggccaatcaggtcccagagcttgaatgctaacaagcccagcatcccctggggctgtgatcatggtggatgaggaagcctcaacgtagattcctgaactcaaggtaccagcaagaatgccttctcccagtgtgctctccccaacatcctaggcacagctttcataacccagtttcttaggtgtaagaaactgtttttatctcatttattaagtctcagaacttaacagaaaaggaagccttttaaatattctttttaattttattttagattaacagttttgtactttacatttttttatacaaccaaccagtttcttttctagccaatcatctctgaagagttgctgtttcttactgacaataaaaaatgttctcttggttcgaataa

SEQ ID NO: 8002 - DNA, 2438 bp, Homo sapiens
  source 1..2438: mol_type = unassigned DNA
aggaaggaagtggggccctgcggcgcccagccaccccctgacggcttccccacgggaggacgcgaggccccggcccagccatggccccctggcgcaaagctgacaaggagcggcacggcgtggccatatacaacttccaaggcagcggagccccccagctctccctgcagatcggcgatgtggtgcgaatacaggagacgtgtggagactggtataggggatacctcataaagcacaaaatgttacagggcatttttcctaagtcatttatccacatcaaggaagtgacagttgagaaaagaagaaatactgagaacatcattcctgcagaaattcctctggcacaagaagtgacaacgacactttgggaatggggaagcatctggaaacaactctatgtggccagcaaaaaggagcgttttctccaggtgcagtccatgatgtacgatctgatggagtggaggtcccagcttctctcaggaaccttacccaaggatgagctgaaggaactgaagcagaaagtcacgtccaaaattgactatggcaacaaaatccttgagcttgatttgattgtcagagatgaagacggaaatatcttggaccctgataataccagtgtcatcagcttgttccatgcacatgaggaagcaactgataaaatcacagagcgtatcaaagaagaaatgtcaaaagaccagccagattatgcaatgtattcccggatctcctcatcccccacccatagcctctatgtgtttgtgagaaactttgtgtgcagaattggggaagatgctgagctcttcatgtctctctacgaccccaacaagcaaacggtcataagtgagaactacctagtgcgatggggcagccggggcttccctaaggagattgagatgctcaacaatctgaaggtggtcttcacggatcttggaaacaaagacctcaacagggataaaatttacttgatttgtcaaatagtccgggtcggcaagatggatcttaaggatactggtgcaaagaagtgcacgcagggactgaggaggccctttggggtggcagttatggatataacagacatcatcaaggggaaagcagagagtgatgaagaaaagcagcacttcattccttttcacccggttacagctgagaatgacttcctacacagcctgctgggcaaagtcatagcctccaagggggacagtggagggcaaggcctctgggtgaccatgaagatgctggtgggtgacatcattcagattcgcaaggactatccacacctggtggacaggaccaccgtggtggccaggaagctgggattcccagagatcatcatgccaggggatgtcaggaacgacatctacattactctcttacaaggtgactttgacaagtacaacaagaccacacagaggaatgtggaagtcatcatgtgtgtgtgcgcggaggatggcaaaacgctgcctgtggctgtccctattgaagacatgcagaggatccatctgcgattcatgtttcgacatcggtcatctctggaatctaaagataaaggagaaaagaactttgccatgtcctatgtgaagctgatgaaagaagatgggactactctacacgatggattccatgacttagttgtcctcaagggggacagcaagaagatggaggatgccagcgcatacctgacccttccttcttatcgacaccatgtggaaaacaagggggccacgctgagcaggagctccagcagtgttggggggctttctgtcagctcccgggatgtgttctccatttccaccctggtgtgctccacaaagctcactcagaatgtgggcttgctgggtttgctgaagtggcgtatgaagcctcaactggaagaatccatgagacggctctttgaatccatcaacaatctgatgaaaagtcaatacaaaactaccatccttttgcaggtggcggctttgaaatacatcccatctgtcctgcatgatgtagaaatggtctttgatgcgaagttactcagccaactcctgtatgagttctacacctgcatccctcctgtgaaactccagaagcagaaagtacagtctatgaatgagatagtccagagcaacctctttaaaaagcaagaatgccgggacattctgcttcctgtcatcaccaaagagctgaaggagctgctggagcagaaggatgacatgcaacaccaggtcctggagaggaagtactgcgttgaattgctcaacagcatcttggaagtccttagctaccaggatgcggccttcacctaccaccatatccaggagatcatggtccagctgctgcggacagtgaaccggacagtcatcaccatgggccgggatcacattctgattggagcttgctgcaactgcggattcccatcctccaccccacactctctgattcagtggctttggggctga

SEQ ID NO: 8003 - DNA, 4652 bp, Homo sapiens
  source 1..4652: mol_type = unassigned DNA
aaaagacacagttaacaggcaagcagccatcttatctcctgtctgagccactctttcttccacttttgtcaccctttcaagtcactaccgagcaggctgagcagatgcacttatccaagatgagtagaatgcaatttgcgtgggagcaggggacaagcccatgaatgagtatcgctccgttgtgtactatcaagtcaaacagccacgctggatggaaacagtcaaggtggctgtccctattgaagacatgcagaggatccatctgcgattcatgtttcgacatcggtcatctctggaatggggacagcaagaagatggaggatgccagcgcatacctgacccttccttcttatcgacaccatgtggaaaacaagggggccacgctgagcaggagctccagcagtgttggggggctttctgtcagctcccgggatgtgttctccatttccaccctggtgtgctccacaaagctcactcagaatgtgggcttgctgggtttgctgaagtggcgtatgaagcctcaactgctacaggagaatttagaaaagttgaagattgtggatggagaggaagtggtgaagtttctccaggatactctggatgccctcttcaacatcatgatggagcattctcaaagtgatgaatatgacatcctcgtctttgatgccttgatttacataataggactcattgcagaccggaaatttcagcatttcaacaccgttctggaggcttacatccaacagcatttcagtgcgaccttggcttacaagaaattgatgacagtgctgaagacttacttggatacctccagcagaggggagcaatgtgagccaatcctaagaacgctgaaggctttggaatatgtgttcaagttcattgttcggtcgaggacattattttcacagctttatgaaggcaaagaacagatggagtttgaagaatccatgagacggctctttgaatccatcaacaatctgatgaaaagtcaatacaaaactaccatccttttgcaggtggcggctttgaaatacatcccatctgtcctgcatgatgtagaaatggtctttgatgcgaagttactcagccaactcctgtatgagttctacacctgcatccctcctgtgaaactccagaagcagaaagtacagtctatgaatgagatagtccagagcaacctctttaaaaagcaagaatgccgggacattctgcttcctgtcatcaccaaagagctgaaggagctgctggagcagaaggatgacatgcaacaccaggtcctggagaggaagtactgcgttgaattgctcaacagcatcttggaagtccttagctaccaggatgcggccttcacctaccaccatatccaggagatcatggtccagctgctgcggacagtgaaccggacagtcatcaccatgggccgggatcacattctgattagtcactttgtggcatgtatgacagccatcttaaaccagatgggtgaccagcactactccttctacattgagaccttccagaccagctctgaacttgtggacttcttgatggagaccttcatcatgttcaaggacctcattggaaagaacgtgtaccctggagactggatggccatgagcatggttcaaaacagggtcttcctgagagctatcaacaagtttgcagaaaccatgaaccagaagttcctagaacacacgaactttgagttccagctgtggaacaactattttcatctggcagtggcttttatcacccaggattctctgcagctggagcagttctcacacgccaaatacaacaaaatcctgaataagtatggggacatgagacggctaattggcttctccatccgtgatatgtggtacaagcttggtcagaacaaaatctgcttcatcccaggcatggtaggacctatattagagatgacacttatccctgaggctgagctccggaaagccaccataccaatcttcttcgacatgatgctgtgtgaatatcaaagaagtggggatttcaaaaagtttgaaaacgaaatcatcctgaagctggaccacgaggtagaagggggccgaggcgacgagcagtacatgcagctcctggagtcaatcctgatggaatgtgctgcagagcacccaaccattgccaagtcggtggagaacttcgtgaacctggtcaaaggcctcctggagaagctgctggattaccggggtgtgatgacagatgagagcaaagacaaccgcatgagctgcaccgtgaacctgctgaatttctacaaagataacaacagggaggagatgtacataaggtacctgtacaaactccgcgatcttcacctggactgtgacaattacacagaggctgcctacacgctccttctccacacctggcttctcaagtggtcggatgagcagtgtgcatcacaggtcatgcagacaggccagcagcacccccagacacaccggcagctgaaggagacgctctacgagaccatcataggctactttgacaaaggaaagatgtgggaagaggccataagtctgtgcaaggagctggcggaacagtacgagatggagatctttgactatgagctgctcagccagaacctgatccagcaggcaaaattctatgaaagcatcatgaaaatcctcaggcccaaaccagactactttgctgttggatactacggccagggattcccctccttcctgcggaacaaagtgttcatctaccgcgggaaggaatatgagcgaagagaagatttccagatgcagctgatgacccagttccccaatgcagagaagatgaacaccacctctgccccgggagatgatgtgaagaatgccccaggccagtatatccagtgcttcactgtccagcctgtcttggatgaacatcccaggttcaagaataagccagtgcctgaccagattataaacttctacaaatccaactacgtgcaaaggttccactactcccggcccgtgcgcagggggaccgtagacccagagaatgagtttgcttccatgtggattgagagaacctccttcgtgactgcatacaagctgccggggatcctgcgctggtttgaggtggtgcacatgtcgcagaccacaattagtcctctggagaatgccatagaaaccatgtccacggccaatgagaagatcctgatgatgataaaccagtaccagagtgatgagaccctccccatcaacccactctccatgctcctgaacgggattgtggaccctgctgtcatgggaggcttcgccaagtatgagaaggccttcttcactgaagagtatgtcagggaccaccctgaggaccaggacaagctgacccacctcaaggacctgattgcatggcagatccccttcttgggagctgggattaagatccatgagaaaagggtgtcagataacttgcgacccttccatgaccggatggaggaatgtttcaagaacctgaaaatgaaggtggagaaggagtacggtgtccgagagatgcctgactttgacgacaggagagtgggccgtcccaggtctatgctgcgctcatacagacagatgtccatcatctctctggcttccatgaattctgactgcagcacccccagcaagcctacctcagagagctttgacctggaattagcatcacccaagacgccgagagtggagcaggaggaaccgatctccccggggagcaccctgcctgaggtcaagctgcggaggtccaagaagaggacaaagagaagcagcgtagtttttgcggatgagaaagcagctgcagagtcggacctgaagcggctttccaggaagcatgagttcatgagtgacaccaacctctcggagcatgcggccatccccctcaaggcgtctgtcctctctcaaatgagctttgccagccagtccatgcctaccatcccagccctggcgctctcagtggcaggcatccctgggttggatgaggccaacacatctccccgcctcagccagaccttcctccaactctcagatggtgacaagaagacactcacacggaagaaggtcaatcagttcttcaagacaatgctggccagcaaatcggctgaagaaggcaaacagatcccagactcgctgtccacggacctgtgagctgctgctgactagggctgcatgggagagccagggaggggagtttctggaagaggaaagccatgcgtggaacatcgaagcctcagagagtgggagactgtccccatcagttgtccttacttagaggagacagagaggccaatcaggtcccagagcttgaatgctaacaagcccagcatcccctggggctgtgatcatggtggatgaggaagcctcaacgtagattcctgaactcaaggtaccagcaagaatgccttctcccagtgtgctctccccaacatcctaggcacagctttcataacccagtttcttaggtgtaagaaactgtttttatctcatttattaagtctcagaacttaacagaaaaggaagccttttaaatattctttttaattttattttagattaacagttttgtactttacatttttttatacaaccaaccagtttcttttctagccaatcatctctgaagagttgctgtttcttactgacaataaaaaatgttctcttggttcg

SEQ ID NO: 8004 - DNA, 8455 bp, Homo sapiens
  source 1..8455: mol_type = unassigned DNA
gcggggccgcgcccggcacggccatgtggacccccacggaggaggagaaatacggcgtagtgatatgcagctttcgaggatctgtccctcaagggttggtcttagaaataggagaaacagtccagattcttgaaaaatgtgaaggttggtacagaggagtttcaacaaagaagccaaatgtgaaggggatctttcctgcaaattacattcacttgaaaaaggcaattgtcagtaatagggggcagtatgaaactgtggttccacttgaagattctattgtgactgaggttacagcaactctacaagaatgggcaagtttgtggaaacagttgtatgtgaaacacaaagtagatcttttctacaaactacgccatgtgatgaatgaacttattgacctgcgaaggcagctactgtctggtcacctgactcaggatcaggtgcgggaggttaagcggcacatcaccgtgcgcctggactggggtaatgaacatttgggcctggacctggtgcctcggaaggactttgaagtagtggactcggaccagattagtgtctcagatctctataagatgcatttatctagccggcagagtgtacagcaaagcacatcccaggtagatacaatgcgcccacgtcatggggaaacatgtcggatgccagtgccacatcacttcttcctcagcctgaagagtttcacttacaatactattggggaagataccgatgtcttcttttccttatatgacatgagggaaggcaagcagatcagtgagcggtttctggtaagactgaacaagaatggtgggccgaggaacccagagaagatagaacgaatgtgtgccctttttacagatctgagcagcaaagatatgaagagagatttgtatatcgttgcccatgtgatccgaataggccggatgctcctgaacgactcaaagaaaggtcctcctcacctgcactacaggcgaccatatggctgtgcggtcctaagcatcttggatgtcctacagtcactcacagaagtaaaggaagaaaaggattttgttcttaaggtttacacgtgcaacaacgagagtgagtggtcccagatccacgagaacatcatccgaaagtccagtgccaagtactctgcccccagcgccagccatggtcttatcatttctctgcagcttcttcgtggagacatggaacagattcggagagaaaatcccatgatatttaataggggattggcaattacaagaaaattgggatttcctgatgtcattatgccaggtgatatccgcaatgacctgtacctaaccctggagaagggggatttcgagagaggaggaaagagtgtacaaaagaatattgaagtgaccatgtatgtgctttatgcagatggagaaatcttgaaggattgcatcagcttgggttcaggagagccaaataggagttcctaccactcctttgtcctctaccacagtaatagtcctcgctggggagaaattatcaaattgcctatccccattgaccggttccggggctcccacctgcgctttgagttcagacattgttccacaaaggacaaaggggaaaagaaactctttggctttgcattctcaaccctgatgcgtgatgatggcaccaccctctcagatgatattcacgagctttatgtgtacaagtgtgatgagaatagcacgtttaataaccatgctctgtacctgggcctgccctgctgcaaagaggactacaatggctgccctaatattccttctagcctcatcttccagcgcagcaccaaagagtctttcttcatctccactcagctctcctctaccaaactcacccagaatgtggacctcctagctctgctgaagtggaaagccttccccgaccggatcatggatgtactagggcggctgcggcatgtcagtggggaggaaattgttaagtttctgcaggacatcttagatacactctttgtgattttggatgataatacagagaagtacggcctgttggtttttcagtctctggtgttcatcatcaacctgctccgagacatcaagtattttcactttcgacctgtgatggacacgtatatccagaagcactttgctggagctctggcatacaaggagctcatccgctgtttgaagtggtatatggactgctcagcagaactgattcgacaggaccacattcaagaagctatgcgggccttggagtaccttttcaagttcattgtacagtcacggatcctgtactcacgagccacttgtggaatggaagaggaacaattcagatccagtatccaagaacttttccagtccatccggtttgtgctcagtctggacagccgaaactcagaaacactcctttttactcaggctgcactcctcaattctttcccaaccatctttgatgagcttctgcaaatgttcaccgtgcaagaggtggcagagtttgtgagagggacactggggagcatgcccagcactgtgcacattgggcagtcaatggacgtggtcaagctgcagtccattgccaggacagtggatagccgcctgttttctttctcagaatcccgccgcatcctgcttcctgtggttctccatcacattcaccttcacctgaggcagcagaaagagctgctaatttgctcagggattcttggcagcatcttctccatcgtcaagaccagctctctggaggcagatgtcatggaggaagtagagatgatggtggagagcctcctggacgtgctcttgcagactctgctcaccatcatgagcaaatcgcacgctcaggaggcggtaagagggcagcggtgcccgcagtgcacagccgagatcactggcgagtatgtgtcctgccttctctcactgctccgccagatgtgtgacacccatttccagcacctcctggacaacttccagagcaaagatgaactcaaggaatttctgctgaagattttttgcgtgttccggaacctgatgaagatgagtgtcttccctcgggactggatggtaatgagactgctcacaagcaatattatagtcactactgtccagtacctgtcctctgcactgcacaagaatttcacagagactgactttgactttaaggtgtggaattcttactttagcctggcagttctattcataaatcagccaagccttcagctagaaattatcacctcagccaaaaggaagaagattctagataagtatggggacatgcgtgtaatgatggcctatgaactgttcagcatgtggcagaatttgggtgaacataagatccactttattccgggaatgattggtccttttctgggtgtgacactggtcccacagccagaagtacggaatatcatgattcccatctttcatgacatgatggactgggagcagagaaaaaatggcaacttcaaacaggtggaggccgagttgattgacaagctggacagcatggtgtcagaagggaaaggtgacgagagctacagggagctcttcagcctactaacccagctgtttgggccctaccccagcctgctggagaaggttgaacaagaaacatggcgcgagaccggcatttcctttgtgacctcagtcacccgcctcatggaacgtcttcttgactacagggactgcatgaaaggagaggaaacagagaataagaagataggctgcactgttaacctgatgaatttttacaaatctgagattaacaaggaagaaatgtatatccgctacatccataagctttgtgacatgcacttgcaggccgaaaactacacagaggccgcatttaccctgctcctttactgtgagctgctgcagtgggaggaccggccactacgggaattcctccactacccatcgcagacagagtggcagcggaaggagggactgtgccggaagatcattcactacttcaacaaaggcaagagctgggagtttgggatcccactgtgcagggagctggcgtgtcagtacgagagcctctatgattaccagagcctcagctggattcggaaaatggaggccagctactatgacaacattatggagcagcaacgcctggagcctgagttctttcgggtcggcttctatggcaggaagtttcctttctttcttcggaacaaagaatacgtgtgccgtggccatgactacgagaggctggaggccttccagcagaggatgctcagtgagtttccgcaggctgtcgccatgcagcaccccaaccatcctgatgacgccatcctacagtgcgatgcccagtacttgcagatctatgcagtgacgcccattccagattatgtggatgttctgcagatggatagggtaccagatcgagtcaagagcttctatcgcgtcaacaatgtgaggaagttccggtatgacaggccttttcacaaaggccccaaggacaaggagaatgaattcaagagcctgtggattgaacgtaccacactgaccctgacccacagcttgcctggcatctctcggtggtttgaagtggagaggagggaactggtggaggtgagccctctggagaatgccatccaagtggttgagaataagaaccaggagctacgctccctgatcagccagtatcaacacaagcaggtgcatggcaacattaacctgctaagcatgtgcctgaatggtgtcattgatgcagctgtcaatggaggcattgcacgctatcaggaggccttctttgataaagattacatcaacaagcacccaggagatgctgagaagatcacccagctcaaggagcttatgcaggagcaggttcatgtccttggagttgggctagcagttcatgagaagtttgtgcacccagaaatgcggcctctgcataagaagctaattgatcagttccagatgatgcgggccagtctctaccatgagtttccaggtttggataagctaagtcctgcatgttcaggcaccagcaccccacggggaaatgttctggcatcccatagccccatgagtccggagagcatcaagatgacccaccggcacagccccatgaacttgatgggcacaggccgccattcatcatcctctctctcctcacatgcgtctagtgaagcaggaaacatggtgatgctgggtgacggctccatgggtgatgctcctgaggacctgtaccaccacatgcagctcgcgtatcccaaccccaggtaccaaggctcagtcaccaacgtctctgttctgtcctcgtcccaggcaagcccttcttcctccagcctgagttccactcactcagcaccatcccagatgattacctctgccccttccagtgcccgaggctctccctctctgccagataagtaccgccatgcccgtgaaatgatgttgttgctgcccacataccgggaccgcccaagcagtgccatgtatccagcagccatcctggagaacggacagccgccgaatttccagcgagccctgttccagcaagtggtcggagcctgcaaaccctgcagtgatcccaatctgtctgtggctgaaaaaggtcattactccctacactttgacgccttccaccaccctctgggtgatacccccccagccctccctgcccggaccctgcgcaagtctcctctccaccctatcccagcctcccccacaagcccccagtcaggtctggacggcagcaactctacgctgtccggcagtgccagcagcggcgtgtcctccttgagtgagagtaactttgggcactcctcggaggccccacctcgcactgacaccatggactccatgccaagtcaggcctggaatgctgacgaagatcttgagccaccctacctccctgtccactacagcctctctgagtctgccgtcctggactccatcaaggcccagccatgccgaagccactcagccccagggtgcgtcatccctcaggaccccatggacccgcctgcgctgccgcccaagccctaccacccccgcctgccggccctggagcacgatgagggggtgctgctgcgtgaagagactgagaggcctcgaggcctgcaccgcaaggctccattgcctcctgggagcgctaaggaggagcaggcccgcatggcctgggagcacggccgaggggagcagtgaggggcaacgaggcggctgggatgccgccctcagtaagcagcttgccaatcactccaggtctgaaaagcaagtcccccagccccaccccagggagccagagaggcttgcactcaggagagaaccacccccaagtctccgttctactgccgtgaactcatgtgttgccatgtacagaggccacagcagcatgaagggttgtggcttccctttttatttttttacatttccatttctatgggttttcctttctttcctttatgcagtagatgctttcttcctcctgcagttctggaccatgtggagctacatggagaaattgcacagacagaatcactttgccacactgcagggcccaggagtgggagcccaggccctccctccagggtagagatgcaccgaatggaaattgcactaaggacctcttcctttgctgtatggacagaagagttcatggttgcattcagggattgcaaggaccatatagacatgtcacaggtggaaaaagggccacaagccgttttgcacaaatgcctgcccacctgcccctcttccatccaggagtgtgctactgaggggctggctggaccaacctgctggctcaggcatgtgactggcctaactgcatgcccagggcactgccagggttcaatgggccagccgtctcctactccaccttggatttttctctccatcacatcatttctgaccatttgctcccttccattcttgaaacacctcatgccccacaggagccccagtggtgactggatctgcaagggttatctcccgccctctggggtttgagtggaggtatggagccagagaggctatcctagctaccttcctcctagggggagctggtccccttcctatgtggtagagagactggtgtaagagtgtggggtgtggcaggcgccggaaatcctcaaagctttcagaagcatccagaatgcctaccatcagctcctgaatcagggattttcagcactacctctgagccatggggttggctgcccagccaggcttccaggccctgaggacatgtggtcaggttcagcaggctcctgggtaaagagggtgggagggggcttctccttttggaagcagatagccatgcaggtagaattgtcatctcccaagtggccacatacagcaacccactccaggccatggggaccaccactcagggttcggggctggcaggagggtagtttctccagtctccccagtctgttggtgtctttataggaaactataaagcagagcagtggtgtctttagaggaaactcattcaagtcagggcactgattttcctctcagtttattatttggggggatagggtcaggtgggtatagtagtactttaccagggtgcttttaagttactttaaaaaaagcctacaaaatattttttttcttttatttgctcgagttcacattaatgatggtcacaaggctgccttgttgggcaggcgtattgcccccagttcctcttctgctggcctgtatgacctccacagccaggccctgggcccaagccccttgtcccttctccactgcccctctttccagacagtaaaggccatggtcagtgtgtttttctcttgtaaacaaaccccagcttgtttaacagaaatgctaataacctactgggaaagatggaggtctaaattacctccagggtttttctgggggtttatcaccagtgtgggtcccttctgataccaccaggttcactccaggcagagtggggcggaaggctgctgaggatatgggtcagttacagcagccctcacctcaaagggctggcctgcttctcagcctacattcatttgcaagcttcaatctctggaccatctggtgttcacaggtgttagagggttaggggttaggggctagttttggatttgattcataggtaggagggcttagattttaaggcacttctgaaagtcaatccctggacaaggcagtcatcacataagaacagctaccttctccacttggtggcacaagaggtagggaggggagtatgggttcatttggcttcgcattatgcaaggtgaaaccgtttgttttccctctccattttccctaactaaatgaaaaggacacattctgaaatcccttttgttggagaataagtcagtctgaggggaaatgggaggccagagatgagaaccctttgaaaagattgtaaaatactgattttcattctttcaagcttatttgtaaatacctatttgaatgctgtgtatttgtacaggaatttgagcaaaaaatgtatagagtgtgatgtccaattggtattcagcactataaatgtgtttttaacctcc

SEQ ID NO: 8005 - DNA, 5120 bp, Homo sapiens
  source 1..5120: mol_type = unassigned DNA
atgccaaagtggctagaggaaacagagaataagaagataggctgcactgttaacctgatgaatttttacaaatctgagattaacaaggaagaaatgtatatccgctacatccataagctttgtgacatgcacttgcaggccgaaaactacacagaggccgcatttaccctgctcctttactgtgagctgctgcagtgggaggaccggccactacgggaattcctccactacccatcgcagacagagtggcagcggaaggagggactgtgccggaagatcattcactacttcaacaaaggcaagagctgggagtttgggatcccactgtgcagggagctggcgtgtcagtacgagagcctctatgattaccagagcctcagctggattcggaaaatggaggccagctactatgacaacattatggagcagcaacgcctggagcctgagttctttcgggtcggcttctatggcaggaagtttcctttctttcttcggaacaaagaatacgtgtgccgtggccatgactacgagaggctggaggccttccagcagaggatgctcagtgagtttccgcaggctgtcgccatgcagcaccccaaccatcctgatgacgccatcctacagtgcgatgcccagtacttgcagatctatgcagtgacgcccattccagattatgtggatgttctgcagatggatagggtaccagatcgagtcaagagcttctatcgcgtcaacaatgtgaggaagttccggtatgacaggccttttcacaaaggccccaaggacaaggagaatgaattcaagagcctgtggattgaacgtaccacactgaccctgacccacagcttgcctggcatctctcggtggtttgaagtggagaggagggaactggtggaggtgagccctctggagaatgccatccaagtggttgagaataagaaccaggagctacgctccctgatcagccagtatcaacacaagcaggtgcatggcaacattaacctgctaagcatgtgcctgaatggtgtcattgatgcagctgtcaatggaggcattgcacgctatcaggaggccttctttgataaagattacatcaacaagcacccaggagatgctgagaagatcacccagctcaaggagcttatgcaggagcaggttcatgtccttggagttgggctagcagttcatgagaagtttgtgcacccagaaatgcggcctctgcataagaagctaattgatcagttccagatgatgcgggccagtctctaccatgagtttccaggtttggataagctaagtcctgcatgttcaggcaccagcaccccacggggaaatgttctggcatcccatagccccatgagtccggagagcatcaagatgacccaccggcacagccccatgaacttgatgggcacaggccgccattcatcatcctctctctcctcacatgcgtctagtgaagcaggaaacatggtgatgctgggtgacggctccatgggtgatgctcctgaggacctgtaccaccacatgcagctcgcgtatcccaaccccaggtaccaaggctcagtcaccaacgtctctgttctgtcctcgtcccaggcaagcccttcttcctccagcctgagttccactcactcagcaccatcccagatgattacctctgccccttccagtgcccgaggctctccctctctgccagataagtaccgccatgcccgtgaaatgatgttgttgctgcccacataccgggaccgcccaagcagtgccatgtatccagcagccatcctggagaacggacagccgccgaatttccagcgagccctgttccagcaagtggtcggagcctgcaaaccctgcagtgatcccaatctgtctgtggctgaaaaaggtcattactccctacactttgacgccttccaccaccctctgggtgatacccccccagccctccctgcccggaccctgcgcaagtctcctctccaccctatcccagcctcccccacaagcccccagtcaggtctggacggcagcaactctacgctgtccggcagtgccagcagcggcgtgtcctccttgagtgagagtaactttgggcactcctcggaggccccacctcgcactgacaccatggactccatgccaagtcaggcctggaatgctgacgaagatcttgagccaccctacctccctgtccactacagcctctctgagtctgccgtcctggactccatcaaggcccagccatgccgaagccactcagccccagggtgcgtcatccctcaggaccccatggacccgcctgcgctgccgcccaagccctaccacccccgcctgccggccctggagcacgatgagggggtgctgctgcgtgaagagactgagaggcctcgaggcctgcaccgcaaggctccattgcctcctgggagcgctaaggaggagcaggcccgcatggcctgggagcacggccgaggggagcagtgaggggcaacgaggcggctgggatgccgccctcagtaagcagcttgccaatcactccaggtctgaaaagcaagtcccccagccccaccccagggagccagagaggcttgcactcaggagagaaccacccccaagtctccgttctactgccgtgaactcatgtgttgccatgtacagaggccacagcagcatgaagggttgtggcttccctttttatttttttacatttccatttctatgggttttcctttctttcctttatgcagtagatgctttcttcctcctgcagttctggaccatgtggagctacatggagaaattgcacagacagaatcactttgccacactgcagggcccaggagtgggagcccaggccctccctccagggtagagatgcaccgaatggaaattgcactaaggacctcttcctttgctgtatggacagaagagttcatggttgcattcagggattgcaaggaccatatagacatgtcacaggtggaaaaagggccacaagccgttttgcacaaatgcctgcccacctgcccctcttccatccaggagtgtgctactgaggggctggctggaccaacctgctggctcaggcatgtgactggcctaactgcatgcccagggcactgccagggttcaatgggccagccgtctcctactccaccttggatttttctctccatcacatcatttctgaccatttgctcccttccattcttgaaacacctcatgccccacaggagccccagtggtgactggatctgcaagggttatctcccgccctctggggtttgagtggaggtatggagccagagaggctatcctagctaccttcctcctagggggagctggtccccttcctatgtggtagagagactggtgtaagagtgtggggtgtggcaggcgccggaaatcctcaaagctttcagaagcatccagaatgcctaccatcagctcctgaatcagggattttcagcactacctctgagccatggggttggctgcccagccaggcttccaggccctgaggacatgtggtcaggttcagcaggctcctgggtaaagagggtgggagggggcttctccttttggaagcagatagccatgcaggtagaattgtcatctcccaagtggccacatacagcaacccactccaggccatggggaccaccactcagggttcggggctggcaggagggtagtttctccagtctccccagtctgttggtgtctttataggaaactataaagcagagcagtggtgtctttagaggaaactcattcaagtcagggcactgattttcctctcagtttattatttggggggatagggtcaggtgggtatagtagtactttaccagggtgcttttaagttactttaaaaaaagcctacaaaatattttttttcttttatttgctcgagttcacattaatgatggtcacaaggctgccttgttgggcaggcgtattgcccccagttcctcttctgctggcctgtatgacctccacagccaggccctgggcccaagccccttgtcccttctccactgcccctctttccagacagtaaaggccatggtcagtgtgtttttctcttgtaaacaaaccccagcttgtttaacagaaatgctaataacctactgggaaagatggaggtctaaattacctccagggtttttctgggggtttatcaccagtgtgggtcccttctgataccaccaggttcactccaggcagagtggggcggaaggctgctgaggatatgggtcagttacagcagccctcacctcaaagggctggcctgcttctcagcctacattcatttgcaagcttcaatctctggaccatctggtgttcacaggtgttagagggttaggggttaggggctagttttggatttgattcataggtaggagggcttagattttaaggcacttctgaaagtcaatccctggacaaggcagtcatcacataagaacagctaccttctccacttggtggcacaagaggtagggaggggagtatgggttcatttggcttcgcattatgcaaggtgaaaccgtttgttttccctctccattttccctaactaaatgaaaaggacacattctgaaatcccttttgttggagaataagtcagtctgaggggaaatgggaggccagagatgagaaccctttgaaaagattgtaaaatactgattttcattctttcaagcttatttgtaaatacctatttgaatgctgtgtatttgtacaggaatttgagcaaaaaatgtatagagtgtgatgtccaattggtattcagcactataaatgtgtttttaacctcccgcattctgtgcttatttaaaacaaggaaacttctaaccatttcttttgtgtattcatgtttaaagaaaaaaagtgatttaaaaatgatcttacctgtaccagaaaagcaaagttaaaggaaacaaaatttgtaccattgtcccaagaggtattttactgtatatattgtggtagcatgttcaaaatccaacaagtaatgtgaattttagatgtaaatatctgccacttgattttttttccccctttccccacttccttgactgctgtgatgtgaattaaagataaatacgtgatactga

SEQ ID NO: 8006 - DNA, 5778 bp, Homo sapiens
  source 1..5778: mol_type = unassigned DNA
gttattgccagtttccgaggaaccgttccatatggcctgtcattggaaattggagatacagttcagatcctggagaagtgtgatggctggtacagaggatttgccttaaaaaacccaaatatcaagggtatatttccttccagctacgttcacttgaaaaatgcctgtgtaaagaacaaaggacaatttgaaatggttattcccactgaagactctgttatcacagaaatgacatcaacattaagagactggggaaccatgtggaaacaactctatgtgcgtaatgaaggcgatctcttccaccggctgtggcacatcatgaatgaaatcctggacctgaggcggcaggtgctggtgggccacctcacccacgaccggatgaaggacgtgaagcgccacattactgcccggcttgactggggcaatgaacaactgggactggacctggtgcctaggaaagagtacgcaatggtggatccggaagacatcagcattactgagctctaccgattgatggaacatcgacatcggaagaaagacaccccggtgcaggccagcagtcaccacctctttgtccagatgaagagcctcatgtgttccaacctgggagaggagctggaggtcatcttctcactctttgacagtaaagagaaccggccaatcagtgagagatttttcttgaggctgaatagaaacgggcttcccaaagcccctgataaaccggaacgacattgctccctctttgtggatttgggcagcagtgagctaagaaaggacatttatatcaccgtgcacattatccgaatcggtcgaatgggagcaggagaaaaaaagaatgcctgtagtgtccagtaccgacgaccctttggctgtgcagttcttagcatcgctgacctgctaacaggagagacaaaggatgacctcattctgaaagtatacatgtgtaacacagagagtgagtggtaccaaatccatgagaacatcatcaaaaagctgaatgcacgttataacttgactggctccaatgcaggtttagcagtttccttacagctattgcacggagacattgaacaaatcagaagggaatattcatcagtattttctcatggagtatccataacaaggaagctgggattttcaaatattattatgcctggtgaaatgaggaatgatttatatatcactattgaaaggggagaatttgagaaaggagggaagagcgtggccagaaatgtggaagttacgatgttcattgtagacagtagtggccaaaccctgaaggattttatctccttcggctctggggagccaccagccagtgagtaccactcctttgtgctttaccataacaacagtcccaggtggtctgaactgctgaaacttcccattcctgtggataaattccggggtgcacacatccgcttcgagtttcggcattgttccacaaaggagaaaggagagaagaagttgtttgggttttcttttgtccctctgatgcaagaagatggtaggactcttccagatggcactcatgagctcatcgtgcataagtgtgaagaaaacacaaatcttcaggatactacccgctacctcaaacttcccttttccaagggcattttccttgggaataataatcaagccatgaaggccacaaaggagtccttttgtattacatcttttctctgttccacaaaactcacacaaaatggtgatatgcttgatcttttgaaatggagaacccacccagacaagatcactggctgtctctctaaattaaaagaaattgatggctcagagatagtaaagtttctgcaggatacactggataccttatttggaattttagatgaaaattcccaaaaatatgggtctaaagtgtttgattctttggttcacataataaatttgctgcaagatagcaaatttcatcattttaaacctgtaatggacacttacattgagagtcattttgctggggcacttgcatacagagatctcatcaaagtgctcaaatggtacgtggaccggatcacagaagcagagcggcaagagcatatccaggaggtgctgaaggcacaagaatacatttttaagtatatagttcaatctcgaaggctgttttcccttgccactggtgggcaaaacgaagaggagttccgctgctgcattcaggagcttctcatgtcagtccgtttctttctttcgcaagagagcaaagggtctggagcattatctcagtcacaggctgtgtttctgagctctttccctgccgtgtactcagaactgttgaagctctttgatgtccgggaagtagccaacttggtccaggacaccctgggcagtctgccgaccatcctgcatgtggatgattccctgcaggccatcaaactgcagtgcattggcaaaaccgtggaaagccagctttataccaacccagattcccgatacattcttctgcctgtcgtgttacatcacctccacattcacttgcaagaacagaaggacctgatcatgtgtgcacgtatccttagcaacgtattttgtcttatcaagaaaaatagctcagaaaaatctgtgctggaggaaatagatgtgatagtggccagcttgctggatattctgctgaggaccatattggagatcaccagccgacctcagccatccagctcagcaatgcggttccagttccaggatgtcactggggagtttgttgcttgtctcctgtccctattacgacaaatgacagatagacattatcaacagcttcttgatagttttaatacaaaggaagaactaagggatttcctgctgcagatatttactgtgttccgaatattgatacgcccggagatgtttccaaaggactggactgttatgcgcttggttgctaacaatgttattattacaacagttctatacctctcagatgcacttcgtaagaacttcttaaatgaaaactttgattataagatctgggattcctacttttacctcgcagtcatttttataaaccagttgtgtctgcagttggagatgttcacaccttccaagaagaaaaaggtgttagaaaagtatggtgacatgcgggtaacaatgggttgtgaaattttcagcatgtggcaaaacctaggagagcacaagcttcattttatccctgccctgattggccccttcctagaagtgaccttgataccccagccagatcttcggaatgtcatgattccaatttttcatgatatgatggactgggagcagaggcggagtggcaactttaaacaggtggaagccaagctaattgacaaactggatagcctgatgtcagaaggcaaaggtgacgaaacataccgcgagctcttcaacagtataattccactatttggtccctatcctagtctactaaagaaaattgagcgggaaacatggcgggaaagtggcgtttcattaattgctactgtaactcgtctaatggagaggttgttagattacagggactgcatgaaaatgggagaggtagatggcaaaaagattggctgcacagttagccttctgaacttctataagactgaactgaacaaggaggagatgtatatacgctacattcacaaactctatgatctgcatctcaaagcacagaactttacagaagctgcatataccctcctcttatatgacgagctactggaatggtctgatcggcccctcagggagttcctgacctaccccatgcaaacagaatggcagcgcaaagagcacctgcacctcaccatcatccagaactttgacagaggcaaatgttgggagaatggcattatcttgtgccggaagattgcagagcagtatgagagttattatgactacagaaacctgagcaagatgcggatgatggaagcctctttgtatgacaaaattatggaccagcaacgtcttgaaccagagttcttcagagttggattttatggaaaaaaatttccatttttcttaagaaataaggagtttgtgtgtcgagggcatgactacgagaggctggaagccttccaacagagaatgctgaacgagttcccccatgccatcgccatgcagcacgccaaccagcccgatgagaccatcttccaggcagaagctcagtatttgcagatatatgctgtgactcccattccagagagccaggaggtcctgcagagagagggtgttccggacaacatcaaaagcttctataaagtgaatcacatctggaaattccgctatgaccgaccatttcacaaaggcacaaaagataaagagaatgaattcaagagtctctgggtggagagaacgtcattatacttggtgcagagtttgcctggcatctctcgctggtttgaagtggaaaagcgtgaagtggtagaaatgagtcctctggaaaatgcaattgaagtgctagaaaataagaatcagcagctgaagactctgattagtcagtgtcagacaagacagatgcagaatattaatcccctgactatgtgcctgaatggagttatagatgctgcagttaatggtggcgtttccaggtatcaagaggcattctttgtcaaagaatatatcttaagtcaccctgaagatggggagaaaattgcacgattaagagagctgatgcttgagcaggcacagattctggaatttggtttggccgtgcatgagaagtttgtacctcaagatatgagaccccttcacaaaaagctggttgaccaattctttgtgatgaagtcgagcttagggatacaggagttctctgcttgtatgcaagccagtcctgtccattttcctaatggaagccctcgtgtgtgtagaaactcagcacctgcttctgtgagcccagatggtaccagggtaattcctagacgcagcccgttaagttacccagctgtcaaccgatattcttcctcctcactgtcctcacaagcttctgctgaagtaagcaatattacagggcaatcagaaagctctgatgaagtctttaacatgcagccaagtccatctacctcaagcttgagttctactcactcggcttcacctaatgtgacaagttctgctccatcgagtgccagagcttctcctttgttgtctgacaaacacaaacattcccgagaaaactcttgcctgtcaccaagagagagaccatgcagtgccatctatccaacacctgtggagccttcgcagaggatgctgtttaatcatattggagacggggccttgccacgcagtgacccaaatctctctgcacctgaaaaagcttcaccagcaagacacacgacatcagtatccccctcgcctgccgggcgatctccattgaagggctctgtgcagtctttcaccccctctccagtggagtaccactcgccaggactcatctccaactcccctgtcttgtcgggcagctacagcagtgggatttcttctctcagccggtgcagcacgtcggaaacctcaggctttgaaaatcaggtgaatgaacagtcggcccccctgccggtgccagtgccggtgcccgtgccgagctacggcggggaggagccagtgcgcaaggagagcaagactccgcccccgtacagcgtctacgagcggactctgcggcgccccgtcccgctacctcacagcctctccatccccgtcacgtcggagccgcccgcgctgccccccaagcctctggcagcgcgatccagccacctggagaatggggcccggaggactgaccccggcccgcggcccaggcccctgccccgcaaggtctctcagttataa

SEQ ID NO: 8007 - DNA, 8027 bp, Homo sapiens
  source 1..8027: mol_type = unassigned DNA
gttattgccagtttccgaggaaccgttccatatggcctgtcattggaaattggagatacagttcagatcctggagaagtgtgatggctggtacagaggatttgccttaaaaaacccaaatatcaagggtatatttccttccagctacgttcacttgaaaaatgcctgtgtaaagaacaaaggacaatttgaaatggttattcccactgaagactctgttatcacagaaatgacatcaacattaagagactggggaaccatgtggaaacaactctatgtgcgtaatgaaggcgatctcttccaccggctgtggcacatcatgaatgaaatcctggacctgaggcggcaggtgctggtgggccacctcacccacgaccggatgaaggacgtgaagcgccacattactgcccggcttgactggggcaatgaacaactgggactggacctggtgcctaggaaagagtacgcaatggtggatccggaagacatcagcattactgagctctaccgattgatggaacatcgacatcggaagaaagacaccccggtgcaggccagcagtcaccacctctttgtccagatgaagagcctcatgtgttccaacctgggagaggagctggaggtcatcttctcactctttgacagtaaagagaaccggccaatcagtgagagatttttcttgaggctgaatagaaacgggcttcccaaagcccctgataaaccggaacgacattgctccctctttgtggatttgggcagcagtgagctaagaaaggacatttatatcaccgtgcacattatccgaatcggtcgaatgggagcaggagaaaaaaagaatgcctgtagtgtccagtaccgacgaccctttggctgtgcagttcttagcatcgctgacctgctaacaggagagacaaaggatgacctcattctgaaagtatacatgtgtaacacagagagtgagtggtaccaaatccatgagaacatcatcaaaaagctgaatgcacgttataacttgactggctccaatgcaggtttagcagtttccttacagctattgcacggagacattgaacaaatcagaagggaatattcatcagtattttctcatggagtatccataacaaggaagctgggattttcaaatattattatgcctggtgaaatgaggaatgatttatatatcactattgaaaggggagaatttgagaaaggagggaagagcgtggccagaaatgtggaagttacgatgttcattgtagacagtagtggccaaaccctgaaggattttatctccttcggctctggggagccaccagccagtgagtaccactcctttgtgctttaccataacaacagtcccaggtggtctgaactgctgaaacttcccattcctgtggataaattccggggtgcacacatccgcttcgagtttcggcattgttccacaaaggagaaaggagagaagaagttgtttgggttttcttttgtccctctgatgcaagaagatggtaggactcttccagatggcactcatgagctcatcgtgcataagtgtgaagaaaacacaaatcttcaggatactacccgctacctcaaacttcccttttccaagggcattttccttgggaataataatcaagccatgaaggccacaaaggagtccttttgtattacatcttttctctgttccacaaaactcacacaaaatggtgatatgcttgatcttttgaaatggagaacccacccagacaagatcactggctgtctctctaaattaaaagaaattgatggctcagagatagtaaagtttctgcaggatacactggataccttatttggaattttagatgaaaattcccaaaaatatgggtctaaagtgtttgattctttggttcacataataaatttgctgcaagatagcaaatttcatcattttaaacctgtaatggacacttacattgagagtcattttgctggggcacttgcatacagagatctcatcaaagtgctcaaatggtacgtggaccggatcacagaagcagagcggcaagagcatatccaggaggtgctgaaggcacaagaatacatttttaagtatatagttcaatctcgaaggctgttttcccttgccactggtgggcaaaacgaagaggagttccgctgctgcattcaggagcttctcatgtcagtccgtttctttctttcgcaagagagcaaagggtctggagcattatctcagtcacaggctgtgtttctgagctctttccctgccgtgtactcagaactgttgaagctctttgatgtccgggaagtagccaacttggtccaggacaccctgggcagtctgccgaccatcctgcatgtggatgattccctgcaggccatcaaactgcagtgcattggcaaaaccgtggaaagccagctttataccaacccagattcccgatacattcttctgcctgtcgtgttacatcacctccacattcacttgcaagaacagaaggacctgatcatgtgtgcacgtatccttagcaacgtattttgtcttatcaagaaaaatagctcagaaaaatctgtgctggaggaaatagatgtgatagtggccagcttgctggatattctgctgaggaccatattggagatcaccagccgacctcagccatccagctcagcaatgcggttccagttccaggatgtcactggggagtttgttgcttgtctcctgtccctattacgacaaatgacagatagacattatcaacagcttcttgatagttttaatacaaaggaagaactaagggatttcctgctgcagatatttactgtgttccgaatattgatacgcccggagatgtttccaaaggactggactgttatgcgcttggttgctaacaatgttattattacaacagttctatacctctcagatgcacttcgtaagaacttcttaaatgaaaactttgattataagatctgggattcctacttttacctcgcagtcatttttataaaccagttgtgtctgcagttggagatgttcacaccttccaagaagaaaaaggtgttagaaaagtatggtgacatgcgggtaacaatgggttgtgaaattttcagcatgtggcaaaacctaggagagcacaagcttcattttatccctgccctgattggccccttcctagaagtgaccttgataccccagccagatcttcggaatgtcatgattccaatttttcatgatatgatggactgggagcagaggcggagtggcaactttaaacaggtggaagccaagctaattgacaaactggatagcctgatgtcagaaggcaaaggtgacgaaacataccgcgagctcttcaacagtattctactaaagaaaattgagcgggaaacatggcgggaaagtggcgtttcattaattgctactgtaactcgtctaatggagaggttgttagattacagggactgcatgaaaatgggagaggtagatggcaaaaagattggctgcacagttagccttctgaacttctataagactgaactgaacaaggaggagatgtatatacgctacattcacaaactctatgatctgcatctcaaagcacagaactttacagaagctgcatataccctcctcttatatgacgagctactggaatggtctgatcggcccctcagggagttcctgacctaccccatgcaaacagaatggcagcgcaaagagcacctgcacctcaccatcatccagaactttgacagaggcaaatgttgggagaatggcattatcttgtgccggaagattgcagagcagtatgagagttattatgactacagaaacctgagcaagatgcggatgatggaagcctctttgtatgacaaaattatggaccagcaacgtcttgaaccagagttcttcagagttggattttatggaaaaaaatttccatttttcttaagaaataaggagtttgtgtgtcgagggcatgactacgagaggctggaagccttccaacagagaatgctgaacgagttcccccatgccatcgccatgcagcacgccaaccagcccgatgagaccatcttccaggcagaagctcagtatttgcagatatatgctgtgactcccattccagagagccaggaggtcctgcagagagagggtgttccggacaacatcaaaagcttctataaagtgaatcacatctggaaattccgctatgaccgaccatttcacaaaggcacaaaagataaagagaatgaattcaagagtctctgggtggagagaacgtcattatacttggtgcagagtttgcctggcatctctcgctggtttgaagtggaaaagcgtgaagtggtagaaatgagtcctctggaaaatgcaattgaagtgctagaaaataagaatcagcagctgaagactctgattagtcagtgtcagacaagacagatgcagaatattaatcccctgactatgtgcctgaatggagttatagatgctgcagttaatggtggcgtttccaggtatcaagaggcattctttgtcaaagaatatatcttaagtcaccctgaagatggggagaaaattgcacgattaagagagctgatgcttgagcaggcacagattctggaatttggtttggccgtgcatgagaagtttgtacctcaagatatgagaccccttcacaaaaagctggttgaccaattctttgtgatgaagtcgagcttagggatacaggagttctctgcttgtatgcaagccagtcctgtccattttcctaatggaagccctcgtgtgtgtagaaactcagcacctgcttctgtgagcccagatggtaccagggtaattcctagacgcagcccgttaagttacccagctgtcaaccgatattcttcctcctcactgtcctcacaagcttctgctgaagtaagcaatattacagggcaatcagaaagctctgatgaagtctttaacatgcagccaagtccatctacctcaagcttgagttctactcactcggcttcacctaatgtgacaagttctgctccatcgagtgccagagcttctcctttgttgtctgacaaacacaaacattcccgagaaaactcttgcctgtcaccaagagagagaccatgcagtgccatctatccaacacctgtggagccttcgcagaggatgctgtttaatcatattggagacggggccttgccacgcagtgacccaaatctctctgcacctgaaaaagctgtgaaccccacccctagcagctggagcctggacagtgggaaggaagccaagaacatgtcggatagtgggaaacttatctctccccctgtccctccaagacccacacagactgcttcaccagcaagacacacgacatcagtatccccctcgcctgccgggcgatctccattgaagggctctgtgcagtctttcaccccctctccagtggagtaccactcgccaggactcatctccaactcccctgtcttgtcgggcagctacagcagtgggatttcttctctcagccggtgcagcacgtcggaaacctcaggctttgaaaatcaggtgaatgaacagtcggcccccctgccggtgccagtgccggtgcccgtgccgagctacggcggggaggagccagtgcgcaaggagagcaagactccgcccccgtacagcgtctacgagcggactctgcggcgccccgtcccgctacctcacagcctctccatccccgtcacgtcggagccgcccgcgctgccccccaagcctctggcagcgcgatccagccacctggagaatggggcccggaggactgaccccggcccgcggcccaggcccctgccccgcaaggtctctcagttataagtcacttttctatgtacctgcgatgcattctttgcccgtttacaaaataagaagtatgatgagaagacatttagtgtaggcactttaataacttactcagctccttcgatgaatggaattaaaacttgcttattaaatatcatgttgcacaatattaaaagttgctgatctaaaacgccagatgttaaatgaagtatggctgaatttcattaaaacgtttctcatttggaagtggtaaatagtgataaagactccttttgtacctttttatgttcacttttttttatatagtttaatcttaaaaccaatacgatattgtcaaacgatacaatgtgtgacaatgttgtatcgtttttactgaatacttgatacttggagaaagcttattaagtcagtgcacatcctaacacagtggtccttattttagaagacttctgtaaataaggcaaggtttatcagtgcagatcatcagaattaaagttcaagcaggcgagcaagacagtatacttaaggggttgcaaagcttgggactggaaattgttttgttcttgaaacaaaatacttctttaaggttgcttttgctgtttgactgctgtctacattcgtaaaattctattttgtgaattggtagctaaatcccttactaccctgacaccgtggtatctactgtatttcttttcaaggtgcaatttgcttcagagttccaatcagctagattaagcaagaggctccagaagaaatgtttacttgaattttgcgcttcctttcttgatagtttcctatataaaatttgtcattgaacaagagcaaatgctgaagtattaatgaggcacaaatgactgtgccccattagcaagaattcaggaatcaatacagacagtattaaattaatagcttaagtgaagaaaaaaaaaacttagtgaaaatgtattagcacgattaaatggcaaaaggacttataaaaggcaagggcattaactttcagtcctgcacaaaataaaaaattcctcacgactctccacttttaccagtggagtttgtcttagctgacctgtcgtctttctcttgaaggaggattgctgtagacttctctagcttgaatattgcaacatagcatcttaggtctagatagggatgctaatgccagttgtagaagtgtgaaaaaagcaccttgtatgtagtaatgtattttatatctttgttttttcttttactgactgtttataacactcaattgacaatagatatgaactgtattttaaatcatactgttaaatattttccctcttttgttgggaagctcattttagtttaaccatgtttgttttgttggtagcttacctggaaggcagtgaccacttttttatattctcttaatgaaaccattcagcaggtatatgctgttgaggctggttatagaggttttctataataaatgttcaagtatttttgtatataactggttaattttaataagagataccattatgtgtaaaaaaaagtaaaaataaacgcaaacagttgttgatgcagtatgattgttataattatgccaaatactttacgtatggaaaaagaatatttgtacatatgtgcttttaacaattctgccatattgactttacaattttgaatgtcggaaaaattaatatatgttaaatatttatgtttagtgaaagtgttcataattgagaaaaggaacatatgcattttagctttgtatcttgcaagttttgcagtcagaaattttttgaactagcttttgcttttgataacacttcgtgtttgtaaccacattcatatatatatacatatatatgtgaagctccatatttctgttgctttaaagaagtaaaaccttccatttaaataagatgacatgcataagataacaaagcttccttgatttccttttcctgtgtaatttaatagatttgttgactagtgcttgggcacattataaatcagtgttatttgctcttggagccattttttaaaaaaaattttggcagtgagcagttgaatttatcttgaatttatcatgtgtgtgtatttctgaagcagctacatagcagaacattttaagagattctgttagcccacatgttcatgttggttgctgctgaatggtaaatattaaataaaattaccagattaatctt

SEQ ID NO: 8008 - DNA, 7997 bp, Homo sapiens
  source 1..7997: mol_type = unassigned DNA
gcttagttcagtgaatcagaacaatgactgcgccgccgggtacccgggagcgcgtcggaggactgtgagcagccgccgccgggagagctgcgggcggcgcagtgtcaacgctgggctcgggagcctccagcgcagatcctgcccagcgcccgcagcccgcgcgaagccgctgggctccggcactgcagcgctgctcggggactgtgcattgttgtgagccggagaaggggcgcggggattacaaagcctgaagaccccggagcccctttagccatgtggatacctacggagcacgagaaatacggcgtggttattgccagtttccgaggaaccgttccatatggcctgtcattggaaattggagatacagttcagatcctggagaagtgtgatggctggtacagaggatttgccttaaaaaacccaaatatcaagggtatatttccttccagctacgttcacttgaaaaatgcctgtgtaaagaacaaaggacaatttgaaatggttattcccactgaagactctgttatcacagaaatgacatcaacattaagagactggggaaccatgtggaaacaactctatgtgcgtaatgaaggcgatctcttccaccggctgtggcacatcatgaatgaaatcctggacctgaggcggcaggtgctggtgggccacctcacccacgaccggatgaaggacgtgaagcgccacattactgcccggcttgactggggcaatgaacaactgggactggacctggtgcctaggaaagagtacgcaatggtggatccggaagacatcagcattactgagctctaccgattgatggaacatcgacatcggaagaaagacaccccggtgcaggccagcagtcaccacctctttgtccagatgaagagcctcatgtgttccaacctgggagaggagctggaggtcatcttctcactctttgacagtaaagagaaccggccaatcagtgagagatttttcttgaggctgaatagaaacgggcttcccaaagcccctgataaaccggaacgacattgctccctctttgtggatttgggcagcagtgagctaagaaaggacatttatatcaccgtgcacattatccgaatcggtcgaatgggagcaggagaaaaaaagaatgcctgtagtgtccagtaccgacgaccctttggctgtgcagttcttagcatcgctgacctgctaacaggagagacaaaggatgacctcattctgaaagtatacatgtgtaacacagagagtgagtggtaccaaatccatgagaacatcatcaaaaagctgaatgcacgttataacttgactggctccaatgcaggtttagcagtttccttacagctattgcacggagacattgaacaaatcagaagggaatattcatcagtattttctcatggagtatccataacaaggaagctgggattttcaaatattattatgcctggtgaaatgaggaatgatttatatatcactattgaaaggggagaatttgagaaaggagggaagagcgtggccagaaatgtggaagttacgatgttcattgtagacagtagtggccaaaccctgaaggattttatctccttcggctctggggagccaccagccagtgagtaccactcctttgtgctttaccataacaacagtcccaggtggtctgaactgctgaaacttcccattcctgtggataaattccggggtgcacacatccgcttcgagtttcggcattgttccacaaaggagaaaggagagaagaagttgtttgggttttcttttgtccctctgatgcaagaagatggtaggactcttccagatggcactcatgagctcatcgtgcataagtgtgaagaaaacacaaatcttcaggatactacccgctacctcaaacttcccttttccaagggcattttccttgggaataataatcaagccatgaaggccacaaaggagtccttttgtattacatcttttctctgttccacaaaactcacacaaaatggtgatatgcttgatcttttgaaatggagaacccacccagacaagatcactggctgtctctctaaattaaaagaaattgatggctcagagatagtaaagtttctgcaggatacactggataccttatttggaattttagatgaaaattcccaaaaatatgggtctaaagtgtttgattctttggttcacataataaatttgctgcaagatagcaaatttcatcattttaaacctgtaatggacacttacattgagagtcattttgctggggcacttgcatacagagatctcatcaaagtgctcaaatggtacgtggaccggatcacagaagcagagcggcaagagcatatccaggaggtgctgaaggcacaagaatacatttttaagtatatagttcaatctcgaaggctgttttcccttgccactggtgggcaaaacgaagaggagttccgctgctgcattcaggagcttctcatgtcagtccgtttctttctttcgcaagagagcaaagggtctggagcattatctcagtcacaggctgtgtttctgagctctttccctgccgtgtactcagaactgttgaagctctttgatgtccgggaagtagccaacttggtccaggacaccctgggcagtctgccgaccatcctgcatgtggatgattccctgcaggccatcaaactgcagtgcattggcaaaaccgtggaaagccagctttataccaacccagattcccgatacattcttctgcctgtcgtgttacatcacctccacattcacttgcaagaacagaaggacctgatcatgtgtgcacgtatccttagcaacgtattttgtcttatcaagaaaaatagctcagaaaaatctgtgctggaggaaatagatgtgatagtggccagcttgctggatattctgctgaggaccatattggagatcaccagccgacctcagccatccagctcagcaatgcggttccagttccaggatgtcactggggagtttgttgcttgtctcctgtccctattacgacaaatgacagatagacattatcaacagcttcttgatagttttaatacaaaggaagaactaagggatttcctgctgcagatatttactgtgttccgaatattgatacgcccggagatgtttccaaaggactggactgttatgcgcttggttgctaacaatgttattattacaacagttctatacctctcagatgcacttcgtaagaacttcttaaatgaaaactttgattataagatctgggattcctacttttacctcgcagtcatttttataaaccagttgtgtctgcagttggagatgttcacaccttccaagaagaaaaaggtgttagaaaagtatggtgacatgcgggtaacaatgggttgtgaaattttcagcatgtggcaaaacctaggagagcacaagcttcattttatccctgccctgattggccccttcctagaagtgaccttgataccccagccagatcttcggaatgtcatgattccaatttttcatgatatgatggactgggagcagaggcggagtggcaactttaaacaggtggaagccaagctaattgacaaactggatagcctgatgtcagaaggcaaaggtgacgaaacataccgcgagctcttcaacagtataattccactatttggtccctatcctagtctactaaagaaaattgagcgggaaacatggcgggaaagtggcgtttcattaattgctactgtaactcgtctaatggagaggttgttagattacagggactgcatgaaaatgggagaggtagatggcaaaaagattggctgcacagttagccttctgaacttctataagactgaactgaacaaggaggagatgtatatacgctacattcacaaactctatgatctgcatctcaaagcacagaactttacagaagctgcatataccctcctcttatatgacgagctactggaatggtctgatcggcccctcagggagttcctgacctaccccatgcaaacagaatggcagcgcaaagagcacctgcacctcaccatcatccagaactttgacagaggcaaatgttgggagaatggcattatcttgtgccggaagattgcagagcagtatgagagttattatgactacagaaacctgagcaagatgcggatgatggaagcctctttgtatgacaaaattatggaccagcaacgtcttgaaccagagttcttcagagttggattttatggaaaaaaatttccatttttcttaagaaataaggagtttgtgtgtcgagggcatgactacgagaggctggaagccttccaacagagaatgctgaacgagttcccccatgccatcgccatgcagcacgccaaccagcccgatgagaccatcttccaggcagaagctcagtatttgcagatatatgctgtgactcccattccagagagccaggaggtcctgcagagagagggtgttccggacaacatcaaaagcttctataaagtgaatcacatctggaaattccgctatgaccgaccatttcacaaaggcacaaaagataaagagaatgaattcaagagtctctgggtggagagaacgtcattatacttggtgcagagtttgcctggcatctctcgctggtttgaagtggaaaagcgtgaagtggtagaaatgagtcctctggaaaatgcaattgaagtgctagaaaataagaatcagcagctgaagactctgattagtcagtgtcagacaagacagatgcagaatattaatcccctgactatgtgcctgaatggagttatagatgctgcagttaatggtggcgtttccaggtatcaagaggcattctttgtcaaagaatatatcttaagtcaccctgaagatggggagaaaattgcacgattaagagagctgatgcttgagcaggcacagattctggaatttggtttggccgtgcatgagaagtttgtacctcaagatatgagaccccttcacaaaaagctggttgaccaattctttgtgatgaagtcgagcttagggatacaggagttctctgcttgtatgcaagccagtcctgtccattttcctaatggaagccctcgtgtgtgtagaaactcagcacctgcttctgtgagcccagatggtaccagggtaattcctagacgcagcccgttaagttacccagctgtcaaccgatattcttcctcctcactgtcctcacaagcttctgctgaagtaagcaatattacagggcaatcagaaagctctgatgaagtctttaacatgcagccaagtccatctacctcaagcttgagttctactcactcggcttcacctaatgtgacaagttctgctccatcgagtgccagagcttctcctttgttgtctgacaaacacaaacattcccgagaaaactcttgcctgtcaccaagagagagaccatgcagtgccatctatccaacacctgtggagccttcgcagaggatgctgtttaatcatattggagacggggccttgccacgcagtgacccaaatctctctgcacctgaaaaagctgtgaaccccacccctagcagctggagcctggacagtgggaaggaagccaagaacatgtcggatagtgggaaacttatctctccccctgtccctccaagacccacacagactgcttcaccagcaagacacacgacatcagtatccccctcgcctgccgggcgatctccattgaagggctctgtgcagtctttcaccccctctccagtggagtaccactcgccaggactcatctccaactcccctgtcttgtcgggcagctacagcagtgggatttcttctctcagccggtgcagcacgtcggaaacctcaggctttgaaaatcaggtgaatgaacagtcggcccccctgccggtgccagtgccggtgcccgtgccgagctacggcggggaggagccagtgcgcaaggagagcaagactccgcccccgtacagcgtctacgagcggactctgcggcgccccgtcccgctacctcacagcctctccatccccgtcacgtcggagccgcccgcgctgccccccaagcctctggcagcgcgatccagccacctggagaatggggcccggaggactgaccccggcccgcggcccaggcccctgccccgcaaggtctctcagttataagtcacttttctatgtacctgcgatgcattctttgcccgtttacaaaataagaagtatgatgagaagacatttagtgtaggcactttaataacttactcagctccttcgatgaatggaattaaaacttgcttattaaatatcatgttgcacaatattaaaagttgctgatctaaaacgccagatgttaaatgaagtatggctgaatttcattaaaacgtttctcatttggaagtggtaaatagtgataaagactccttttgtacctttttatgttcacttttttttatatagtttaatcttaaaaccaatacgatattgtcaaacgatacaatgtgtgacaatgttgtatcgtttttactgaatacttgatacttggagaaagcttattaagtcagtgcacatcctaacacagtggtccttattttagaagacttctgtaaataaggcaaggtttatcagtgcagatcatcagaattaaagttcaagcaggcgagcaagacagtatacttaaggggttgcaaagcttgggactggaaattgttttgttcttgaaacaaaatacttctttaaggttgcttttgctgtttgactgctgtctacattcgtaaaattctattttgtgaattggtagctaaatcccttactaccctgacaccgtggtatctactgtatttcttttcaaggtgcaatttgcttcagagttccaatcagctagattaagcaagaggctccagaagaaatgtttacttgaattttgcgcttcctttcttgatagtttcctatataaaatttgtcattgaacaagagcaaatgctgaagtattaatgaggcacaaatgactgtgccccattagcaagaattcaggaatcaatacagacagtattaaattaatagcttaagtgaagaaaaaaaaaacttagtgaaaatgtattagcacgattaaatggcaaaaggacttataaaaggcaagggcattaactttcagtcctgcacaaaataaaaaattcctcacgactctccacttttaccagtggagtttgtcttagctgacctgtcgtctttctcttgaaggaggattgctgtagacttctctagcttgaatattgcaacatagcatcttaggtctagatagggatgctaatgccagttgtagaagtgtgaaaaaagcaccttgtatgtagtaatgtattttatatctttgttttttcttttactgactgtttataacactcaattgacaatagatatgaactgtattttaaatcatactgttaaatattttccctcttttgttgggaagctcattttagtttaaccatgtttgttttgttggtagcttacctggaaggcagtgaccacttttttatattctcttaatgaaaccattcagcaggtatatgctgttgaggctggttatagaggttttctataataaatgttcaagtatttttgtatataactggttaattttaataagagataccattatgtgtaaaaaaaagtaaaaataaacgcaaacagttgttgatgcagtatgattgttataattatgccaaatactttacgtatggaaaaagaatatttgtacatatgtgcttttaacaattctgccatattgactttacaattttgaatgtcggaaaaattaatatatgttaaatatttatgtttagtgaaagtgttcataattgagaaaaggaacatatgcattttagctttgtatcttgcaagttttgcagtcagaaattttttgaactagcttttgcttttgataacacttcgtgtttgtaaccaca

SEQ ID NO: 8009 - DNA, 6212 bp, Homo sapiens
  source 1..6212: mol_type = unassigned DNA
cagaacaatgactgcgccgccgggtacccgggagcgcgtcggaggactgtgagcagccgccgccgggagagctgcgggcggcgcagtgtcaacgctgggctcgggagcctccagcgcagatcctgcccagcgcccgcagcccgcgcgaagccgctgggctccggcactgcagcgctgctcggggactgtgcattgttgtgagccggagaaggggcgcggggattacaaagcctgaagaccccggagcccctttagccatgtggatacctacggagcacgagaaatacggcgtggttattgccagtttccgaggaaccgttccatatggcctgtcattggaaattggagatacagttcagatcctggagaagtgtgatggctggtacagaggatttgccttaaaaaacccaaatatcaagggtatatttccttccagctacgttcacttgaaaaatgcctgtgtaaagaacaaaggacaatttgaaatggttattcccactgaagactctgttatcacagaaatgacatcaacattaagagactggggaaccatgtggaaacaactctatgtgcgtaatgaaggcgatctcttccaccggctgtggcacatcatgaatgaaatcctggacctgaggcggcaggtgctggtgggccacctcacccacgaccggatgaaggacgtgaagcgccacattactgcccggcttgactggggcaatgaacaactgggactggacctggtgcctaggaaagagtacgcaatggtggatccggaagacatcagcattactgagctctaccgattgatggaacatcgacatcggaagaaagacaccccggtgcaggccagcagtcaccacctctttgtccagatgaagagcctcatgtgttccaacctgggagaggagctggaggtcatcttctcactctttgacagtaaagagaaccggccaatcagtgagagatttttcttgaggctgaatagaaacgggcttcccaaagcccctgataaaccggaacgacattgctccctctttgtggatttgggcagcagtgagctaagaaaggacatttatatcaccgtgcacattatccgaatcggtcgaatgggagcaggagaaaaaaagaatgcctgtagtgtccagtaccgacgaccctttggctgtgcagttcttagcatcgctgacctgctaacaggagagacaaaggatgacctcattctgaaagtatacatgtgtaacacagagagtgagtggtaccaaatccatgagaacatcatcaaaaagctgaatgcacgttataacttgactggctccaatgcaggtttagcagtttccttacagctattgcacggagacattgaacaaatcagaagggaatattcatcagtattttctcatggagtatccataacaaggaagctgggattttcaaatattattatgcctggtgaaatgaggaatgatttatatatcactattgaaaggggagaatttgagaaaggagggaagagcgtggccagaaatgtggaagttacgatgttcattgtagacagtagtggccaaaccctgaaggattttatctccttcggctctggggagccaccagccagtgagtaccactcctttgtgctttaccataacaacagtcccaggtggtctgaactgctgaaacttcccattcctgtggataaattccggggtgcacacatccgcttcgagtttcggcattgttccacaaaggagaaaggagagaagaagttgtttgggttttcttttgtccctctgatgcaagaagatggtaggactcttccagatggcactcatgagctcatcgtgcataagtgtgaagaaaacacaaatcttcaggatactacccgctacctcaaacttcccttttccaagggcattttccttgggaataataatcaagccatgaaggccacaaaggagtccttttgtattacatcttttctctgttccacaaaactcacacaaaatggtgatatgcttgatcttttgaaatggagaacccacccagacaagatcactggctgtctctctaaattaaaagaaattgatggctcagagatagtaaagtttctgcaggatacactggataccttatttggaattttagatgaaaattcccaaaaatatgggtctaaagtgtttgattctttggttcacataataaatttgctgcaagatagcaaatttcatcattttaaacctgtaatggacacttacattgagagtcattttgctggggcacttgcatacagagatctcatcaaagtgctcaaatggtacgtggaccggatcacagaagcagagcggcaagagcatatccaggaggtgctgaaggcacaagaatacatttttaagtatatagttcaatctcgaaggctgttttcccttgccactggtgggcaaaacgaagaggagttccgctgctgcattcaggagcttctcatgtcagtccgtttctttctttcgcaagagagcaaagggtctggagcattatctcagtcacaggctgtgtttctgagctctttccctgccgtgtactcagaactgttgaagctctttgatgtccgggaagtagccaacttggtccaggacaccctgggcagtctgccgaccatcctgcatgtggatgattccctgcaggccatcaaactgcagtgcattggcaaaaccgtggaaagccagctttataccaacccagattcccgatacattcttctgcctgtcgtgttacatcacctccacattcacttgcaagaacagaaggacctgatcatgtgtgcacgtatccttagcaacgtattttgtcttatcaagaaaaatagctcagaaaaatctgtgctggaggaaatagatgtgatagtggccagcttgctggatattctgctgaggaccatattggagatcaccagccgacctcagccatccagctcagcaatgcggttccagttccaggatgtcactggggagtttgttgcttgtctcctgtccctattacgacaaatgacagatagacattatcaacagcttcttgatagttttaatacaaaggaagaactaagggatttcctgctgcagatatttactgtgttccgaatattgatacgcccggagatgtttccaaaggactggactgttatgcgcttggttgctaacaatgttattattacaacagttctatacctctcagatgcacttcgtaagaacttcttaaatgaaaactttgattataagatctgggattcctacttttacctcgcagtcatttttataaaccagttgtgtctgcagttggagatgttcacaccttccaagaagaaaaaggtgttagaaaagtatggtgacatgcgggtaacaatgggttgtgaaattttcagcatgtggcaaaacctaggagagcacaagcttcattttatccctgccctgattggccccttcctagaagtgaccttgataccccagccagatcttcggaatgtcatgattccaatttttcatgatatgatggactgggagcagaggcggagtggcaactttaaacaggtggaagccaagctaattgacaaactggatagcctgatgtcagaaggcaaaggtgacgaaacataccgcgagctcttcaacagtattctactaaagaaaattgagcgggaaacatggcgggaaagtggcgtttcattaattgctactgtaactcgtctaatggagaggttgttagattacagggactgcatgaaaatgggagaggtagatggcaaaaagattggctgcacagttagccttctgaacttctataagactgaactgaacaaggaggagatgtatatacgctacattcacaaactctatgatctgcatctcaaagcacagaactttacagaagctgcatataccctcctcttatatgacgagctactggaatggtctgatcggcccctcagggagttcctgacctaccccatgcaaacagaatggcagcgcaaagagcacctgcacctcaccatcatccagaactttgacagaggcaaatgttgggagaatggcattatcttgtgccggaagattgcagagcagtatgagagttattatgactacagaaacctgagcaagatgcggatgatggaagcctctttgtatgacaaaattatggaccagcaacgtcttgaaccagagttcttcagagttggattttatggaaaaaaatttccatttttcttaagaaataaggagtttgtgtgtcgagggcatgactacgagaggctggaagccttccaacagagaatgctgaacgagttcccccatgccatcgccatgcagcacgccaaccagcccgatgagaccatcttccaggcagaagctcagtatttgcagatatatgctgtgactcccattccagagagccaggaggtcctgcagagagagggtgttccggacaacatcaaaagcttctataaagtgaatcacatctggaaattccgctatgaccgaccatttcacaaaggcacaaaagataaagagaatgaattcaagagtctctgggtggagagaacgtcattatacttggtgcagagtttgcctggcatctctcgctggtttgaagtggaaaagcgtgaagtggtagaaatgagtcctctggaaaatgcaattgaagtgctagaaaataagaatcagcagctgaagactctgattagtcagtgtcagacaagacagatgcagaatattaatcccctgactatgtgcctgaatggagttatagatgctgcagttaatggtggcgtttccaggtatcaagaggcattctttgtcaaagaatatatcttaagtcaccctgaagatggggagaaaattgcacgattaagagagctgatgcttgagcaggcacagattctggaatttggtttggccgtgcatgagaagtttgtacctcaagatatgagaccccttcacaaaaagctggttgaccaattctttgtgatgaagtcgagcttagggatacaggagttctctgcttgtatgcaagccagtcctgtccattttcctaatggaagccctcgtgtgtgtagaaactcagcacctgcttctgtgagcccagatggtaccagggtaattcctagacgcagcccgttaagttacccagctgtcaaccgatattcttcctcctcactgtcctcacaagcttctgctgaagtaagcaatattacagggcaatcagaaagctctgatgaagtctttaacatgcagccaagtccatctacctcaagcttgagttctactcactcggcttcacctaatgtgacaagttctgctccatcgagtgccagagcttctcctttgttgtctgacaaacacaaacattcccgagaaaactcttgcctgtcaccaagagagagaccatgcagtgccatctatccaacacctgtggagccttcgcagaggatgctgtttaatcatattggagacggggccttgccacgcagtgacccaaatctctctgcacctgaaaaagctgtgaaccccacccctagcagctggagcctggacagtgggaaggaagccaagaacatgtcggatagtgggaaacttatctctccccctgtccctccaagacccacacagactgcttcaccagcaagacacacgacatcagtatccccctcgcctgccgggcgatctccattgaagggctctgtgcagtctttcaccccctctccagtggagtaccactcgccaggactcatctccaactcccctgtcttgtcgggcagctacagcagtgggatttcttctctcagccggtgcagcacgtcggaaacctcaggctttgaaaatcaggtgaatgaacagtcggcccccctgccggtgccagtgccggtgcccgtgccgagctacggcggggaggagccagtgcgcaaggagagcaagactccgcccccgtacagcgtctacgagcggactctgcggcgccccgtcccgctacctcacagcctctccatccccgtcacgtcggagccgcccgcgctgccccccaagcctctggcagcgcgatccagccacctggagaatggggcccggaggactgaccccggcccgcggcccaggcccctgccccgcaaggtctctcagttataagtcacttttctatgtacctgcgatgcattctttgcccgtttacaaaataagaag

SEQ ID NO: 8010 - DNA, 2857 bp, Homo sapiens
  source 1..2857: mol_type = unassigned DNA
aaggaaaaaacgcaaaacgtcataccagctgtacaaggattttcctgtagcagttgcattgcagtaaaattgcttggatgaagatgcattccactgagagaattccactatttggtccctatcctagtctactaaagaaaattgagcgggaaacatggcgggaaagtggcgtttcattaattgctactgtaactcgtctaatggagaggttgttagattacagggactgcatgaaaatgggagaggtagatggcaaaaagattggctgcacagttagccttctgaacttctataagactgaactgaacaaggaggagatgtatatacgctacattcacaaactctatgatctgcatctcaaagcacagaactttacagaagctgcatataccctcctcttatatgacgagctactggaatggtctgatcggcccctcagggagttcctgacctaccccatgcaaacagaatggcagcgcaaagagcacctgcacctcaccatcatccagaactttgacagaggcaaatgttgggagaatggcattatcttgtgccggaagattgcagagcagtatgagagttattatgactacagaaacctgagcaagatgcggatgatggaagcctctttgtatgacaaaattatggaccagcaacgtcttgaaccagagttcttcagagttggattttatggaaaaaaatttccatttttcttaagaaataaggagtttgtgtgtcgagggcatgactacgagaggctggaagccttccaacagagaatgctgaacgagttcccccatgccatcgccatgcagcacgccaaccagcccgatgagaccatcttccaggcagaagctcagtatttgcagatatatgctgtgactcccattccagagagccaggaggtcctgcagagagagggtgttccggacaacatcaaaagcttctataaagtgaatcacatctggaaattccgctatgaccgaccatttcacaaaggcacaaaagataaagagaatgaattcaagagtctctgggtggagagaacgtcattatacttggtgcagagtttgcctggcatctctcgctggtttgaagtggaaaagcgtgaagtggtagaaatgagtcctctggaaaatgcaattgaagtgctagaaaataagaatcagcagctgaagactctgattagtcagtgtcagacaagacagatgcagaatattaatcccctgactatgtgcctgaatggagttatagatgctgcagttaatggtggcgtttccaggtatcaagaggcattctttgtcaaagaatatatcttaagtcaccctgaagatggggagaaaattgcacgattaagagagctgatgcttgagcaggcacagattctggaatttggtttggccgtgcatgagaagtttgtacctcaagatatgagaccccttcacaaaaagctggttgaccaattctttgtgatgaagtcgagcttagggatacaggagttctctgcttgtatgcaagccagtcctgtccattttcctaatggaagccctcgtgtgtgtagaaactcagcacctgcttctgtgagcccagatggtaccagggtaattcctagacgcagcccgttaagttacccagctgtcaaccgatattcttcctcctcactgtcctcacaagcttctgctgaagtaagcaatattacagggcaatcagaaagctctgatgaagtctttaacatgcagccaagtccatctacctcaagcttgagttctactcactcggcttcacctaatgtgacaagttctgctccatcgagtgccagagcttctcctttgttgtctgacaaacacaaacattcccgagaaaactcttgcctgtcaccaagagagagaccatgcagtgccatctatccaacacctgtggagccttcgcagaggatgctgtttaatcatattggagacggggccttgccacgcagtgacccaaatctctctgcacctgaaaaagctgtgaaccccacccctagcagctggagcctggacagtgggaaggaagccaagaacatgtcggatagtgggaaacttatctctccccctgtccctccaagacccacacagactgcttcaccagcaagacacacgacatcagtatccccctcgcctgccgggcgatctccattgaagggctctgtgcagtctttcaccccctctccagtggagtaccactcgccaggactcatctccaactcccctgtcttgtcgggcagctacagcagtgggatttcttctctcagccggtgcagcacgtcggaaacctcaggctttgaaaatcaggtgaatgaacagtcggcccccctgccggtgccagtgccggtgcccgtgccgagctacggcggggaggagccagtgcgcaaggagagcaagactccgcccccgtacagcgtctacgagcggactctgcggcgccccgtcccgctacctcacagcctctccatccccgtcacgtcggagccgcccgcgctgccccccaagcctctggcagcgcgatccagccacctggagaatggggcccggaggactgaccccggcccgcggcccaggcccctgccccgcaaggtctctcagttataagtcacttttctatgtacctgcgatgcattctttgcccgtttacaaaataagaagtatgatgagaagacatttagtgtaggcactttaataacttactcagctccttcgatgaatggaattaaaacttgcttattaaatatcatgttgcacaatattaaaagttgctgatctaaaacgccagatgttaaatgaagtatggctgaatttcattaaaacgtttctcatttgga

SEQ ID NO: 8011 - DNA, 3318 bp, Homo sapiens
  source 1..3318: mol_type = unassigned DNA
tggattccaagtgagaagcaaacattttttacagttattgccagtttccgaggaaccgttccatatggcctgtcattggaaattggagatacagttcagatcctggagaagtgtgatggctggtacagaggatttgccttaaaaaacccaaatatcaagggtatatttccttccagctacgttcacttgaaaaatgcctgtgtaaagaacaaaggacaatttgaaatggttattcccactgaagactctgttatcacagaaatgacatcaacattaagagactggggaaccatgtggaaacaactctatgtgcgtaatgaaggcgatctcttccaccggctgtggcacatcatgaatgaaatcctggacctgaggcggcaggtgctggtgggccacctcacccacgaccggatgaaggacgtgaagcgccacattactgcccggcttgactggggcaatgaacaactgggactggacctggtgcctaggaaagagtacgcaatggtggatccggaagacatcagcattactgagctctaccgattgatggaacatcgacatcggaagaaagacaccccggtgcaggccagcagtcaccacctctttgtccagatgaagagcctcatgtgttccaacctgggagaggagctggaggtcatcttctcactctttgacagtaaagagaaccggccaatcagtgagagatttttcttgaggctgaatagaaacgggcttcccaaagcccctgataaaccggaacgacattgctccctctttgtggatttgggcagcagtgagctaagaaaggacatttatatcaccgtgcacattatccgaatcggtcgaatgggagcaggagaaaaaaagaatgcctgtagtgtccagtaccgacgaccctttggctgtgcagttcttagcatcgctgacctgctaacaggagagacaaaggatgacctcattctgaaagtatacatgtgtaacacagagagtgagtggtaccaaatccatgagaacatcatcaaaaagctgaatgcacgttataacttgactggctccaatgcaggtttagcagtttccttacagctattgcacggagacattgaacaaatcagaagggaatattcatcagtattttctcatggagtatccataacaaggaagctgggattttcaaatattattatgcctggtgaaatgaggaatgatttatatatcactattgaaaggggagaatttgagaaaggagggaagagcgtggccagaaatgtggaagttacgatgttcattgtagacagtagtggccaaaccctgaaggattttatctccttcggctctggggagccaccagccagtgagtaccactcctttgtgctttaccataacaacagtcccaggtggtctgaactgctgaaacttcccattcctgtggataaattccggggtgcacacatccgcttcgagtttcggcattgttccacaaaggagaaaggagagaagaagttgtttgggttttcttttgtccctctgatgcaagaagatggtaggactcttccagatggcactcatgagctcatcgtgcataagtgtgaagaaaacacaaatcttcaggatactacccgctacctcaaacttcccttttccaagggcattttccttgggaataataatcaagccatgaaggccacaaaggagtccttttgtattacatcttttctctgttccacaaaactcacacaaaatggtgatatgcttgatcttttgaaatggagaacccacccagacaagatcactggctgtctctctaaattaaaagaaattgatggctcagagatagtaaagtttctgcaggatacactggataccttatttggaattttagatgaaaattcccaaaaatatgggtctaaagtgtttgattctttggttcacataataaatttgctgcaagatagcaaatttcatcattttaaacctgtaatggacacttacattgagagtcattttgctggggcacttgcatacagagatctcatcaaagtgctcaaatggtacgtggaccggatcacagaagcagagcggcaagagcatatccaggaggtgctgaaggcacaagaatacatttttaagtatatagttcaatctcgaaggctgttttcccttgccactggtgggcaaaacgaagaggagttccgctgctgcattcaggagcttctcatgtcagtccgtttctttctttcgcaagagagcaaagggtctggagcattatctcagtcacaggctgtgtttctgagctctttccctgccgtgtactcagaactgttgaagctctttgatgtccgggaagtagccaacttggtccaggacaccctgggcagtctgccgaccatcctgcatgtggatgattccctgcaggccatcaaactgcagtgcattggcaaaaccgtggaaagccagctttataccaacccagattcccgatacattcttctgcctgtcgtgttacatcacctccacattcacttgcaagaacagaaggacctgatcatgtgtgcacgtatccttagcaacgtattttgtcttatcaagaaaaatagctcagaaaaatctgtgctggaggaaatagatgtgatagtggccagcttgctggatattctgctgaggaccatattggagatcaccagccgacctcagccatccagctcagcaatgcggttccagttccaggatgtcactggggagtttgttgcttgtctcctgtccctattacgacaaatgacagatagacattatcaacagcttcttgatagttttaatacaaaggaagaactaagggatttcctgctgcagatatttactgtgttccgaatattgatacgcccggagatgtttccaaaggactggactgttatgcgcttggttgctaacaatgttattattacaacagttctatacctctcagatgcacttcgtaagaacttcttaaatgaaaactttgattataagatctgggattcctacttttacctcgcagtcatttttataaaccagttgtgtctgcagttggagatgttcacaccttccaagaagaaaaaggtgttagaaaagtatggtgacatgcgggtaacaatgggttgtgaaattttcagcatgtggcaaaacctaggagagcacaagcttcattttatccctgcgctgaggcaggagaatcgcttgaacctgggaggaggaggttgcagtgagccgagagcatgtcactgcactccagcctgggcaacaaagcgagactgtgtctcaaagaaaaaagaaaaaaagacatga

SEQ ID NO: 8012 - DNA, 6385 bp, Homo sapiens
  source 1..6385: mol_type = unassigned DNA
ggggccggggcccggggcggcggcggcgggacgcgaggaccatggctgcctccgagcgccgcgccttcgcgcacaagatcaacaggacggtggccgcagaggtgcggaagcaggtgtcccgggaacgcagtggctccccccactccagcaggcgctgcagcagctccctgggggtcccactgactgaagttgtcgagcccctggactttgaggatgtacttctgagccggccaccagatgctgagcccgggcccctcagggacctggtagaattcccagctgatgacttggagctgctgctgcagccccgggaatgccggaccacggagcccgggatccccaaggatgaaaaactggatgcccaggtgagggccgcggtggagatgtatattgaggactgggtcattgtccacagaaggtatcagtacctgagtgcagcatacagccccgtcaccacagacacacagcgggagcgacagaagggcctcccccgccaggtctttgagcaggatgcttctggagacgagaggtccggccctgaggactcgaatgactcccggcgtggctcgggctccccggaagacacccctcgaagcagtggtgcctctagcatcttcgacctgaggaacctggcagctgactcattgctgccctctctgctagagcgggcggccccagaagatgtggaccggcgcaatgaaacccttcgacggcagcaccggcccccggccctgctcaccctctacccggcacctgacgaggatgaagccgtggaacgctgtagccgcccagagccaccccgcgagcactttggacaaaggatcttggtcaagtgtctgtcgctcaagttcgagattgaaattgagcccatctttgggatcttggctctgtatgatgtgcgggagaaaaagaagatctcggagaacttctacttcgacctgaactcggactccatgaaggggctgcttcgggctcatggcacccaccctgccatctccaccctggcccgctctgccatcttctctgtgacctacccctcacctgacatcttcctggtcatcaagttggagaaggtgcttcagcaaggggacatcagtgagtgctgtgagccttacatggtgttgaaagaagtggacacagccaagaacaaagagaagctagagaagctgcgcctggcggccgagcagttctgcacccgcctgggccgctaccgcatgcccttcgcctggacggccgtgcacttggccaacatcgtgagcagcgctgggcagctggaccgggactctgactcggagggcgagcgccggccagcctggacagaccgccgccgtcgggggccccaggaccgggcgagtagtggggacgacgcctgcagcttctctggcttccgtccagccacgctaactgtcacaaacttctttaagcaggaggctgagcgactcagtgacgaggacctcttcaagttcctggctgacatgaggcgcccgtcgtccctgctgcggcgactacgtcctgtgactgcccagctcaagatcgacatttctccggctcctgaaaatccccacttctgcctctcccctgagctgcttcatatcaagccctacccggaccccaggggccggcccaccaaggagattctggagttccccgcccgcgaagtctatgccccccataccagctacaggaacctgctgtacgtgtacccgcacagcctcaacttcagcagccgccagggctccgtgcgcaaccttgctgtgcgagtgcagtacatgacaggcgaggaccccagccaggctctgccggtcatctttggcaagtccagctgcagtgaatttacccgcgaggccttcacaccggtggtctaccataacaagtcccccgagttctacgaggagttcaagctgcatcttccagcctgcgtgacagagaaccatcacctgctgttcaccttctaccatgtcagctgccagccccggccgggcactgccctggagacacccgtgggctttacttggatcccactgctgcagcacgggcgcctgaggaccggccccttctgtctcccagtgtctgtggaccagccgccgcccagctattccgtgctcacacccgatgtggcgcttccgggcatgcgctgggtggacggtcacaagggcgtgttcagtgtggagctcacagccgtgtcctctgtgcacccccaggacccctacctggacaaattcttcaccctggtgcacgtcctggaggagggagccttcccattccggctcaaggacactgtgctgagcgagggcaacgtggagcaggagctgcgggccagtcttgcagcactgcgcctggccagccccgaaccccttgtggccttctcccaccacgtgctggacaagctcgtgcgtctggtcatcaggcccccgatcatcagtggccagattgtgaacctgggccgtggagcctttgaagcaatggcccatgtagtcagccttgttcaccggagcctggaggcagcccaggatgcccgcggtcactgcccacagctggctgcctacgtccactacgcctttcgccttcctggcactgagcccagcctcccggatggggcccctccagtgacagtgcaggctgccacactggcccgtggctctggtcgccccgcaagcctctacctggcgcgttccaagagcatcagcagcagcaaccctgacctcgccgtggcccctggctctgtggatgacgaggtttcccgcatcctggccagcaagctgcttcacgaggagctggctctgcagtgggtggtcagcagcagtgccgtacgcgaggccatcctccagcacgcctggttcttcttccagctcatggtgaagagtatggcgctgcacctgctgcttggccagcgactagacacaccccgcaagctgcgcttccccggacgcttcctggacgacatcactgccttggtgggctctgtgggcctggaggtcatcacccgtgtccacaaggatgtggagctggccgagcacctcaacgccagcctggctttcttcctcagtgaccttctgtccctggtggaccggggctttgtcttcagcctggtccgggcccactacaagcaggtggccacgcggctccagtcgtcccctaatccagcagccctgctgaccctgcgcatggaattcacccgcatcctgtgcagccacgagcactacgtgaccctcaacctcccctgctgccccctgtcacctccagcctcgccctccccctctgtgtcctccaccacctcccagagctccaccttctccagccaagccccggaccccaaggtgaccagcatgttcgaactgagtggaccattccggcagcagcacttcctagctgggctcctgctgacggagctggcactggccctcgaacctgaggctgaaggggcattcctgttgcacaagaaggccatcagtgctgtgcacagcctgctatgtggccatgacactgacccccgctacgccgaggccactgtgaaggctcgtgtggccgagctgtacctgccactgctatcgattgcacgggataccttgccacggctgcatgactttgctgagggcccaggtcagcggtcaagactggcctcaatgcttgactcagacacagaaggcgaaggggacattgcgggtaccatcaacccctctgtggccatggccattgctggtggccccctagcccctggctcccgggccagcatctcccaggggccaccaacggcttctcgcgcaggctgtgccctctctgctgagtcaagccggaccttgctggcgtgtgtgctgtgggtgctgaaaaacaccgagccggcgctcctgcagcgctgggccactgacctgacactcccccagctgggacgtctgttggatttgctgtacctttgcctagctgcctttgagtacaaggggaaaaaggcctttgaacgcatcaacagcctcacattcaaaaaatctctggatatgaaggcgcggctagaggaagccattctgggtaccatcggagctcgacaagaaatggttcggcgaagtcgtgagaggagcccgtttgggaatccggagaatgtgcgctggcggaagagcgtcacacactggaagcaaacctcagaccgcgtggacaagaccaaggatgaaatggaacacgaggccttggtggaagggaacctggcaaccgaggcaagcctagtggttctggacacactggagatcatcgtgcagacggtgatgctttcagaagcccgggagagcgtcttgggggcagtgctgaaggttgtgctgtacagcctgggcagtgcccagagtgccctcttcttgcagcatggcctggccacccagagggcccttgtgtccaagttcccggagctgctgttcgaggaggacacggagctgtgtgccgacctgtgcctgaggctcctacgacactgtggcagccgcatcagcaccatccgcacgcacgccagcgcctcgctgtacctgctcatgcgacagaacttcgagatcggccacaactttgcccgtgtgaagatgcaggtcaccatgtctctctcgtccctggtggggacgacgcagaacttcagtgaagagcacctgcgacgttcactcaaaaccatcctcacctatgctgaggaggacatggggctgcgggacagcaccttcgcagagcaggtccaggacctgatgttcaacctgcacatgatcctgacggacacggtgaagatgaaggaacaccaggaggaccctgagatgctcatcgacctcatgtacagaattgcccggggctaccagggctcaccggaccttcggctgacctggttgcagaacatggccgggaagcacgcggagctgggcaaccacgccgaggccgcccagtgcatggtgcacgcggccgccctcgtggctgagtacctcgccctgctcgaggaccaccgccacctgcccgtgggctgcgtttccttccagaacatctcatccaacgtgctagaggagtccgccatctccgacgacatcctgtcgcccgacgaggagggcttctgctccgggaagcacttcactgagctggggctggtagggttgctggaacaggcagccggctacttcaccatgggcgggctctacgaggcggtgaatgaggtctacaagaacctcatccccatcctggaagcccaccgtgactacaagaagctggccgcggtgcacggcaaactgcaggaggccttcaccaagatcatgcaccagagttccggctgggagcgcgtgttcgggacgtatttccgcgtgggcttctacggcgcccacttcggtgacctggatgagcaggagtttgtgtacaaggagccatcgatcacgaagctggcagagatctcacaccggctggaggagttctacacggagagatttggcgacgacgtcgttgagattatcaaagactctaaccctgtggacaagtccaagcttgactcacaaaaggcctacatccagatcacgtatgtggaaccgtactttgatacctacgagctcaaggaccgggtgacctactttgaccgcaactatgggcttcgcacattcctgttctgcacgccgttcacgccggatgggcgcgcacacggggagctgcccgagcaacacaagcgtaagacgctgctcagcaccgaccacgccttcccctacatcaagactcgcatccgtgtgtgccaccgggaggagacggtgctgacgccagtggaggtggccatcgaggacatgcagaagaagacacgggagctggcctttgccaccgagcaggacccaccagatgctaagatgctacagatggtgcttcagggctctgtagggcccaccgtgaaccagggtcccctggaggtggcccaggtgtttttagcagagatcccggaagaccccaagctcttccggcatcacaacaaattgcggctctgcttcaaggacttctgcaagaaatgtgaggatgcgctgcggaaaaataaggccctgattgggccggaccagaaggagtaccaccgtgagctggagcgcaactactgccgcctgcgggaggctctgcagcccctgcttacccagcgcctgccccagctgatggcacccaccccacccggcctcaggaactccttgaacagagcaagtttccgaaaggcagacctctgagcccacaaggaccaaagctgtacctagaggaaccagcacccgggcctcagctgtctgtgctgcgaggggagtctgccctggtgcccactgggctgtggggtgaccacactgtacttggggctgggccctctgcccctgtgtccccatctgtgtgcactgatgcttcctcccttttttaatttaaaatggtttttataagc

SEQ ID NO: 8013 - DNA, 4660 bp, Homo sapiens
  source 1..4660: mol_type = unassigned DNA
aatttacccgcgaggccttcacaccggtggtctaccataacaagtcccccgagttctacgaggagttcaagctgcatcttccagcctgcgtgacagagaaccatcacctgctgttcaccttctaccatgtcagctgccagccccggccgggcactgccctggagacacccgtgggctttacttggatcccactgctgcagcacgggcgcctgaggaccggccccttctgtctcccagtgtctgtggaccagccgccgcccagctattccgtgctcacacccgatgtggcgcttccgggcatgcgctgggtggacggtcacaagggcgtgttcagtgtggagctcacagccgtgtcctctgtgcacccccaggacccctacctggacaaattcttcaccctggtgcacgtcctggaggagggagccttcccattccggctcaaggacactgtgctgagcgagggcaacgtggagcaggagctgcgggccagtcttgcagcactgcgcctggccagccccgaaccccttgtggccttctcccaccacgtgctggacaagctcgtgcgtctggtcatcaggcccccgatcatcagtggccagattgtgaacctgggccgtggagcctttgaagcaatggcccatgtagtcagccttgttcaccggagcctggaggcagcccaggatgcccgcggtcactgcccacagctggctgcctacgtccactacgcctttcgccttcctggcactgagcccagcctcccggatggggcccctccagtgacagtgcaggctgccacactggcccgtggctctggtcgccccgcaagcctctacctggcgcgttccaagagcatcagcagcagcaaccctgacctcgccgtggcccctggctctgtggatgacgaggtttcccgcatcctggccagcaagggcatcgatcgctcacactcctgggtgaattccgcttatgctccaggaggcagtaaggctgtgctgcggcgggcgcccccttattgtggggccgaccccagacagctgcttcacgaggagctggctctgcagtgggtggtcagcagcagtgccgtacgcgaggccatcctccagcacgcctggttcttcttccagctcatggtgaagagtatggcgctgcacctgctgcttggccagcgactagacacaccccgcaagctgcgcttccccggacgcttcctggacgacatcactgccttggtgggctctgtgggcctggaggtcatcacccgtgtccacaaggatgtggagctggccgagcacctcaacgccagcctggctttcttcctcagtgaccttctgtccctggtggaccggggctttgtcttcagcctggtccgggcccactacaagcaggtggccacgcggctccagtcgtcccctaatccagcagccctgctgaccctgcgcatggaattcacccgcatcctgtgcagccacgagcactacgtgaccctcaacctcccctgctgccccctgtcacctccagcctcgccctccccctctgtgtcctccaccacctcccagagctccaccttctccagccaagccccggaccccaaggtgaccagcatgttcgaactgagtggaccattccggcagcagcacttcctagctgggctcctgctgacggagctggcactggccctcgaacctgaggctgaaggggcattcctgttgcacaagaaggccatcagtgctgtgcacagcctgctatgtggccatgacactgacccccgctacgccgaggccactgtgaaggctcgtgtggccgagctgtacctgccactgctatcgattgcacgggataccttgccacggctgcatgactttgctgagggcccaggtcagcggtcaagactggcctcaatgcttgactcagacacagaaggcgaaggggacattgcgggtaccatcaacccctctgtggccatggccattgctggtggccccctagcccctggctcccgggccagcatctcccaggggccaccaacggcttctcgcgcaggctgtgccctctctgctgagtcaagccggaccttgctggcgtgtgtgctgtgggtgctgaaaaacaccgagccggcgctcctgcagcgctgggccactgacctgacactcccccagctgggacgtctgttggatttgctgtacctttgcctagctgcctttgagtacaaggggaaaaaggcctttgaacgcatcaacagcctcacattcaaaaaatctctggatatgaaggcgcggctagaggaagccattctgggtaccatcggagctcgacaagaaatggttcggcgaagtcgtgagaggagcccgtttgggaatccggagaatgtgcgctggcggaagagcgtcacacactggaagcaaacctcagaccgcgtggacaagaccaaggatgaaatggaacacgaggccttggtggaagggaacctggcaaccgaggcaagcctagtggttctggacacactggagatcatcgtgcagacggtgatgctttcagaagcccgggagagcgtcttgggggcagtgctgaaggttgtgctgtacagcctgggcagtgcccagagtgccctcttcttgcagcatggcctggccacccagagggcccttgtgtccaagttcccggagctgctgttcgaggaggacacggagctgtgtgccgacctgtgcctgaggctcctacgacactgtggcagccgcatcagcaccatccgcacgcacgccagcgcctcgctgtacctgctcatgcgacagaacttcgagatcggccacaactttgcccgtgtgaagatgcaggtcaccatgtctctctcgtccctggtggggacgacgcagaacttcagtgaagagcacctgcgacgttcactcaaaaccatcctcacctatgctgaggaggacatggggctgcgggacagcaccttcgcagagcaggtccaggacctgatgttcaacctgcacatgatcctgacggacacggtgaagatgaaggaacaccaggaggaccctgagatgctcatcgacctcatgtacagaattgcccggggctaccagggctcaccggaccttcggctgacctggttgcagaacatggccgggaagcacgcggagctgggcaaccacgccgaggccgcccagtgcatggtgcacgcggccgccctcgtggctgagtacctcgccctgctcgaggaccaccgccacctgcccgtgggctgcgtttccttccagaacatctcatccaacgtgctagaggagtccgccatctccgacgacatcctgtcgcccgacgaggagggcttctgctccgggaagcacttcactgagctggggctggtagggttgctggaacaggcagccggctacttcaccatgggcgggctctacgaggcggtgaatgaggtctacaagaacctcatccccatcctggaagcccaccgtgactacaagaagctggccgcggtgcacggcaaactgcaggaggccttcaccaagatcatgcaccagagttccggctgggagcgcgtgttcgggacgtatttccgcgtgggcttctacggcgcccacttcggtgacctggatgagcaggagtttgtgtacaaggagccatcgatcacgaagctggcagagatctcacaccggctggaggagttctacacggagagatttggcgacgacgtcgttgagattatcaaagactctaaccctgtggacaagtccaagcttgactcacaaaaggcctacatccagatcacgtatgtggaaccgtactttgatacctacgagctcaaggaccgggtgacctactttgaccgcaactatgggcttcgcacattcctgttctgcacgccgttcacgccggatgggcgcgcacacggggagctgcccgagcaacacaagcgtaagacgctgctcagcaccgaccacgccttcccctacatcaagactcgcatccgtgtgtgccaccgggaggagacggtgctgacgccagtggaggtggccatcgaggacatgcagaagaagacacgggagctggcctttgccaccgagcaggacccaccagatgctaagatgctacagatggtgcttcagggctctgtagggcccaccgtgaaccagggtcccctggaggtggcccaggtgtttttagcagagatcccggaagaccccaagctcttccggcatcacaacaaattgcggctctgcttcaaggacttctgcaagaaatgtgaggatgcgctgcggaaaaataaggccctgattgggccggaccagaaggagtaccaccgtgagctggagcgcaactactgccgcctgcgggaggctctgcagcccctgcttacccagcgcctgccccagctgatggcacccaccccacccggcctcaggaactccttgaacagagcaagtttccgaaaggcagacctctgagcccacaaggaccaaagctgtacctagaggaaccagcacccgggcctcagctgtctgtgctgcgaggggagtctgccctggtgcccactgggctgtggggtgaccacactgtacttggggctgggccctctgcccctgtgtccccatctgtgtgcactgatgcttcctcccttttttaatttaaaatggtttttataagc

SEQ ID NO: 8014 - DNA, 7356 bp, Homo sapiens
  source 1..7356: mol_type = unassigned DNA
gacagacgaggtttgcgcttggctgggcatgttccgcggctactctgcggcgcgccaggcccccgctttccgcaccccgcgaccctagaagccaccgaaccgccggcgggccatggccactctgccgagcgcagagcgccgcgcgttcgcgctcaagatcaacaggtattcttcagcggaaataaggaaacagtttactctcccaccaaaccttggccagtaccatcgacagagcataagtacctctggcttcccctctcttcaactacctcagttttatgaccctgtggagccagtggactttgaaggacttctgatgacacacctgaacagcctggatgtgcagcttgcccaggagctcggggacttcactgatgacgacttggacgtggtgttcacgccaaaggaatgtaggactttgcagccctctttgccggaggaaggggttgaactggaccctcatgtcagggactgtgttcagacctacatccgtgagtggctaatcgtgaaccggaaaaaccaaggaagtccagaaatctgtggctttaaaaagactggatctcgaaaagattttcacaagacgcttccgaaacagacgtttgagtcggaaaccttggagtgcagtgaacccgctgctcaggcaggcccccgccacttaaacgtgctgtgcgacgtgtctgggaaaggccccgtcactgcctgtgactttgacctccgcagcctgcagcctgacaagcggctagaaaacctcctgcagcaagtgagtgccgaggactttgagaagcagaacgaggaggcccggaggaccaataggcaggccgagctctttgccctttacccatcagtggacgaggaggatgctgtggaaatacgtccagtaccagaatgtcccaaggaacacctgggcaacagaatattggtcaagttgctgaccttgaagttcgagattgaaattgagcccctgtttgccagcattgccctctacgatgttaaagaaaggaaaaagatctcagaaaattttcactgtgacctgaactctgaccagttcaaaggatttctgcgagctcacacgccttcagtggccgcatcaagtcaggcgagatctgcagtcttctcagtcacctacccgtcctcagacatctacctggtagtcaagattgaaaaagtcctgcagcagggagagattggagactgtgcagagccctacacggttatcaaagaaagtgatggtggaaagagtaaagaaaagattgaaaaactaaaactccaagctgaatccttctgccagcgtttggggaaataccggatgccctttgcctgggcacccataagcttatcaagcttcttcaatgtctccacccttgagagggaggtaactgatgtggactctgtggttgggagaagctcagtgggtgaacggaggacattggcccaatctagaaggctttctgaaagagccctctccttggaggaaaatggggttggatccaacttcaaaacctccactctgagcgttagcagctttttcaagcaggaaggagatcgccttagcgatgaagacttattcaagtttttagctgactacaaaagatcatcatccttacagagacgagtcaagtcaattccaggcttgctaagactggagatttctacagctccagagatcatcaattgctgtctgactcctgaaatgctgcccgtgaaaccctttcctgaaaaccggacacgcccgcacaaagagattttggaatttccaacacgagaagtatatgtccctcacactgtgtacagaaaccttctctatgtctacccacagaggctgaactttgtaaacaaactagcatcagcccggaacattacaataaagatccagtttatgtgtggagaagatgctagcaatgcgatgccggtcatctttggaaaatccagcgggcctgaatttctgcaggaagtgtacacagctgttacataccataataagtctcctgacttttatgaagaagtgaaaattaagctccccgctaagctcacagtaaatcaccacctcctgttcaccttctaccatatcagctgtcagcagaagcaaggagcctccgtggaaactctcctgggatattcatggctgccaattctcttaaatgaacgtcttcaaactggatcctactgtctcccagttgccttggaaaaattgccacccaactactccatgcattctgctgagaaagtcccattacagaatcctcccattaagtgggctgaaggacataagggagtatttaatattgaagtgcaagctgtttcttctgtacacacccaggacaaccacctggagaagttcttcaccctctgccactccctggagagccaggtgaccttccccatccgcgtgctggatcagaaaatcagcgagatggcgctggagcatgagctgaagctcagcatcatctgcctgaactcctcccgcctggagccgctcgtgctcttcctgcacctggtgctggacaagctcttccagctgtccgtgcagcccatggtcatcgctggccagacagccaacttctcccagtttgccttcgagtccgtggtggccatcgccaacagtctgcacaacagcaaggacctgagcaaggaccagcatgggaggaactgcctgctggcttcctacgtgcactacgtcttccgcctgccagaggtgcaaagggatgtgcccaagtcaggcgctcccactgccctcctagaccctcggagctaccacacgtatggccgcacatcagctgctgctgtgagttcaaagctgctgcaggcccgggtgatgagcagcagtaacccagacctcgcggggacacactccgcagcagacgaggaagtgaagaacatcatgtcttcaaagcatttccatgaggagcttgcccttcagatggtggtcagcaccggaatggtgagagaaacagtcttcaagtatgcctggttcttctttgagcttctggtgaaaagcatggcccagcacgtacataacatggacaaacgggacagttttcggaggactcgtttttctgaccgtttcatggatgacataactactattgttaatgtggtcacctcggaaattgcagcccttttagtaaaaccacagaaggaaaatgaacaggcggaaaagatgaacatcagcctggctttcttcttgtatgaccttctctccctcatggatcggggctttgtgtttaacctcatcagacattattgcagccagctgtcagccaagctcagtaaccttccaacgctcatttccatgaggctagagttcctgagaatcctctgtagccatgagcattacctcaatctgaaccttttttttatgaatgctgatactgctccaacatctccttgtccttccatatcttcccagaactcaagctcctgctccagcttccaggaccagaagatcgccagcatgttcgatctgacttccgagtaccgccagcagcacttcctcaccgggctcctcttcacagaactggctgctgccctggatgccgaaggggaaggaatcagcaaagtacaaaggaaagctgtcagtgcaattcacagcctgctaagttctcacgacctggacccacgctgtgtcaaaccagaggtgaaggtcaaaatcgccgccctttacctacctttagttggcatcattttggatgctttgccacagctctgtgactttacagttgcagatactcgcagataccgcaccagtggctcggatgaagaacaagaaggagccggtgccattaaccagaatgtggctctggccatagcagggaataatttcaatttgaaaacaagtggaatagtgctgtcttccttgccctataagcagtacaacatgctgaacgcggacactactcgcaacctcatgatctgcttcctctggatcatgaaaaatgctgatcagagcctcattaggaagtggattgctgacctgccatcaacgcagctcaacaggattttagatctacttttcatctgtgtgttatgttttgagtataagggaaaacagagttctgacaaagtcagtacccaagtcctgcagaagtcaagggatgtcaaggcccggctggaagaggctttgctccgtggggaaggggccagaggggagatgatgcgccgccgggctccagggaacgaccgatttccaggcctaaatgaaaatttgagatggaagaaagagcagacacattggcggcaagctaatgagaagctagataaaacaaaggccgagttagatcaagaagccttgatcagtggcaatctggctacagaagcacatttaatcatcctggatatgcaggaaaacattatccaggcgagctcggctctggactgtaaagacagcctgctgggaggtgttctgagggtgctggtgaattctctgaactgtgatcagagtaccacctacctgactcactgctttgcaacactccgtgctctcatcgccaagtttggagacttactctttgaagaggaggtggaacagtgtttcgacctatgtcaccaagtcctgcaccactgcagcagcagcatggatgtcacccggagccaagcctgtgccaccctttacctcctcatgaggttcagttttggagccaccagtaattttgcaagagtaaagatgcaagtaaccatgtccctggcatctttggtgggaagagcaccagactttaatgaagagcacctgagaagatccttgaggacaattttggcctattcagaagaggacacagccatgcagatgactccttttcccacccaggtggaggaacttctctgtaatctgaatagcatcttatatgacacagtgaaaatgagggaatttcaggaagatcctgagatgcttatggatctcatgtacagaattgccaagagttaccaggcatctcctgatctgcggctgacctggctccagaacatggcagagaaacacaccaagaagaagtgctacacggaggctgccatgtgcctggtgcacgccgctgcgttagtggctgagtatctgagcatgctggaggaccacagctacctgcccgtgggcagtgtcagcttccagaatatttcttccaatgtgctggaggagtctgtggtctctgaggacaccctgtcacctgacgaggatggggtgtgcgcaggccagtacttcaccgagagtggcctggtaggcctcctggagcaggccgcggagctcttcagcacgggaggcttatatgagacagttaatgaggtctacaagctggtcatccccatcctagaagcgcatcgagaattccggaagctgacactcactcacagcaagctgcagagagccttcgacagcatcgttaacaaggatcataagagaatgtttggaacctacttccgagttggtttctttggatccaaatttggggatttggatgaacaggagtttgtctacaaagagcctgcaattaccaagcttcctgagatctcacatagactagaggcattttatggtcaatgttttggtgcagaatttgtggaagtgattaaagactccactcctgtggacaaaaccaagttggatcctaacaaggcctacatacagatcacttttgtggagccctactttgatgagtatgagatgaaagacagggtcacatactttgagaagaatttcaacctccggaggttcatgtacaccaccccgttcaccctggaggggcggcctcggggagagctgcatgagcagtacagaaggaacacagtcctgaccactatgcacgccttcccctacatcaagaccaggatcagcgtcatccagaaggaggagtttgttttgacaccgattgaagttgccattgaagacatgaagaagaagaccctgcagttagcagttgccattaaccaggagccgcctgatgcaaagatgcttcagatggtgctgcaaggctctgtgggagctactgtaaatcagggaccactggaagtagcccaagtgtttttggctgaaattcctgctgatccaaaactctatcgacatcacaacaagttgaggttatgctttaaggaattcatcatgagatgtggtgaagctgtagagaaaaacaagcgtctcatcacggcagaccagagggaatatcagcaggaactcaaaaagaactataacaagctaaaagagaacctcaggccaatgatcgagcggaaaattccagaactgtacaagccaatattcagagttgagagtcaaaagagggactccttccacagatctagtttcaggaaatgtgaaacccagttgtcacagggcagctaagaaaagccatcttcattcgtggagactgtggccctgcaaccctggagaaggacttgctggtacttaaaaaatgggacatttgccacccaggactgactgtacactccctgatcagccagcactctggaagctttgggatcccaggaaccatggaattattcccaaatggactctgaccagatttttgccatactggggggtggcgggatggaggatgggtactcaggcatgactgcgtatttattaaagtgtgtttttccacaatgtaccaaacaaggcataagcagcttctcctgctgactggccaatcactgcccatctgagagatgatttcctctggcccatatttgaatttattggagtaactcaaattgcctgaggaaaaatggaaaaattatccaccagtcgattcaaactgaatttcactctttataggaaggcagggcaaacttgtaggagtacgaaacattttcaataaatctacaaagggaagccttactacaattccaaaaatcatcatggttggaaatttgggaggagattatttgtgaacttgttacccttttggtaatggtggactaattgctgtatagttatttttgttttattattactgttacattaatttaacatgcatttatagaagaatacattcaaagcactgatgtaggagatacacggtacttggagcagtcagccagaaatcacagatactgctttcacttaaatggaaacaattctccgataatgctttgctttttttcttatgtcactcttgtgtactatctatttttctcctctctgggaccaagtttctttttataaagcaataatatctctgttttcatttcagaacattgtgctgtctgtcagcatatgtatatcagctacaaaatatattcaactttgacttcttttgacaaaggactttaggaaaaagaggaacaaagacattatttgagaattaaattatatatttttaatatgactgtgaccttgactgataataaagatgtaataagaattgcaagctaaatgtt

SEQ ID NO: 8015 - DNA, 7452 bp, Homo sapiens
  source 1..7452: mol_type = unassigned DNA
gacagacgaggtttgcgcttggctgggcatgttccgcggctactctgcggcgcgccaggcccccgctttccgcaccccgcgaccctagaagccaccgaaccgccggcgggccatggccactctgccgagcgcagagcgccgcgcgttcgcgctcaagatcaacaggtattcttcagcggaaataaggaaacagtttactctcccaccaaaccttggccagtaccatcgacagagcataagtacctctggcttcccctctcttcaactacctcagttttatgaccctgtggagccagtggactttgaaggacttctgatgacacacctgaacagcctggatgtgcagcttgcccaggagctcggggacttcactgatgacgacttggacgtggtgttcacgccaaaggaatgtaggactttgcagccctctttgccggaggaaggggttgaactggaccctcatgtcagggactgtgttcagacctacatccgtgagtggctaatcgtgaaccggaaaaaccaaggaagtccagaaatctgtggctttaaaaagactggatctcgaaaagattttcacaagacgcttccgaaacagacgtttgagtcggaaaccttggagtgcagtgaacccgctgctcaggcaggcccccgccacttaaacgtgctgtgcgacgtgtctgggaaaggccccgtcactgcctgtgactttgacctccgcagcctgcagcctgacaagcggctagaaaacctcctgcagcaagtgagtgccgaggactttgagaagcagaacgaggaggcccggaggaccaataggcaggccgagctctttgccctttacccatcagtggacgaggaggatgctgtggaaatacgtccagtaccagaatgtcccaaggaacacctgggcaacagaatattggtcaagttgctgaccttgaagttcgagattgaaattgagcccctgtttgccagcattgccctctacgatgttaaagaaaggaaaaagatctcagaaaattttcactgtgacctgaactctgaccagttcaaaggatttctgcgagctcacacgccttcagtggccgcatcaagtcaggcgagatctgcagtcttctcagtcacctacccgtcctcagacatctacctggtagtcaagattgaaaaagtcctgcagcagggagagattggagactgtgcagagccctacacggttatcaaagaaagtgatggtggaaagagtaaagaaaagattgaaaaactaaaactccaagctgaatccttctgccagcgtttggggaaataccggatgccctttgcctgggcacccataagcttatcaagcttcttcaatgtctccacccttgagagggaggtaactgatgtggactctgtggttgggagaagctcagtgggtgaacggaggacattggcccaatctagaaggctttctgaaagagccctctccttggaggaaaatggggttggatccaacttcaaaacctccactctgagcgttagcagctttttcaagcaggaaggagatcgccttagcgatgaagacttattcaagtttttagctgactacaaaagatcatcatccttacagagacgagtcaagtcaattccaggcttgctaagactggagatttctacagctccagagatcatcaattgctgtctgactcctgaaatgctgcccgtgaaaccctttcctgaaaaccggacacgcccgcacaaagagattttggaatttccaacacgagaagtatatgtccctcacactgtgtacagaaaccttctctatgtctacccacagaggctgaactttgtaaacaaactagcatcagcccggaacattacaataaagatccagtttatgtgtggagaagatgctagcaatgcgatgccggtcatctttggaaaatccagcgggcctgaatttctgcaggaagtgtacacagctgttacataccataataagtctcctgacttttatgaagaagtgaaaattaagctccccgctaagctcacagtaaatcaccacctcctgttcaccttctaccatatcagctgtcagcagaagcaaggagcctccgtggaaactctcctgggatattcatggctgccaattctcttaaatgaacgtcttcaaactggatcctactgtctcccagttgccttggaaaaattgccacccaactactccatgcattctgctgagaaagtcccattacagaatcctcccattaagtgggctgaaggacataagggagtatttaatattgaagtgcaagctgtttcttctgtacacacccaggacaaccacctggagaagttcttcaccctctgccactccctggagagccaggtgaccttccccatccgcgtgctggatcagaaaatcagcgagatggcgctggagcatgagctgaagctcagcatcatctgcctgaactcctcccgcctggagccgctcgtgctcttcctgcacctggtgctggacaagctcttccagctgtccgtgcagcccatggtcatcgctggccagacagccaacttctcccagtttgccttcgagtccgtggtggccatcgccaacagtctgcacaacagcaaggacctgagcaaggaccagcatgggaggaactgcctgctggcttcctacgtgcactacgtcttccgcctgccagaggtgcaaagggatgtgcccaagtcaggcgctcccactgccctcctagaccctcggagctaccacacgtatggccgcacatcagctgctgctgtgagttcaaagctgctgcaggcccgggtgatgagcagcagtaacccagacctcgcggggacacactccgcagcagacgaggaagtgaagaacatcatgtcttcaaagatcgccgatcgcaactgcagccgaatgtcttactattgctctggcagtagtgatgctccaagttcacctgcagccccaaggccagccagcaaaaagcatttccatgaggagcttgcccttcagatggtggtcagcaccggaatggtgagagaaacagtcttcaagtatgcctggttcttctttgagcttctggtgaaaagcatggcccagcacgtacataacatggacaaacgggacagttttcggaggactcgtttttctgaccgtttcatggatgacataactactattgttaatgtggtcacctcggaaattgcagcccttttagtaaaaccacagaaggaaaatgaacaggcggaaaagatgaacatcagcctggctttcttcttgtatgaccttctctccctcatggatcggggctttgtgtttaacctcatcagacattattgcagccagctgtcagccaagctcagtaaccttccaacgctcatttccatgaggctagagttcctgagaatcctctgtagccatgagcattacctcaatctgaaccttttttttatgaatgctgatactgctccaacatctccttgtccttccatatcttcccagaactcaagctcctgctccagcttccaggaccagaagatcgccagcatgttcgatctgacttccgagtaccgccagcagcacttcctcaccgggctcctcttcacagaactggctgctgccctggatgccgaaggggaaggaatcagcaaagtacaaaggaaagctgtcagtgcaattcacagcctgctaagttctcacgacctggacccacgctgtgtcaaaccagaggtgaaggtcaaaatcgccgccctttacctacctttagttggcatcattttggatgctttgccacagctctgtgactttacagttgcagatactcgcagataccgcaccagtggctcggatgaagaacaagaaggagccggtgccattaaccagaatgtggctctggccatagcagggaataatttcaatttgaaaacaagtggaatagtgctgtcttccttgccctataagcagtacaacatgctgaacgcggacactactcgcaacctcatgatctgcttcctctggatcatgaaaaatgctgatcagagcctcattaggaagtggattgctgacctgccatcaacgcagctcaacaggattttagatctacttttcatctgtgtgttatgttttgagtataagggaaaacagagttctgacaaagtcagtacccaagtcctgcagaagtcaagggatgtcaaggcccggctggaagaggctttgctccgtggggaaggggccagaggggagatgatgcgccgccgggctccagggaacgaccgatttccaggcctaaatgaaaatttgagatggaagaaagagcagacacattggcggcaagctaatgagaagctagataaaacaaaggccgagttagatcaagaagccttgatcagtggcaatctggctacagaagcacatttaatcatcctggatatgcaggaaaacattatccaggcgagctcggctctggactgtaaagacagcctgctgggaggtgttctgagggtgctggtgaattctctgaactgtgatcagagtaccacctacctgactcactgctttgcaacactccgtgctctcatcgccaagtttggagacttactctttgaagaggaggtggaacagtgtttcgacctatgtcaccaagtcctgcaccactgcagcagcagcatggatgtcacccggagccaagcctgtgccaccctttacctcctcatgaggttcagttttggagccaccagtaattttgcaagagtaaagatgcaagtaaccatgtccctggcatctttggtgggaagagcaccagactttaatgaagagcacctgagaagatccttgaggacaattttggcctattcagaagaggacacagccatgcagatgactccttttcccacccaggtggaggaacttctctgtaatctgaatagcatcttatatgacacagtgaaaatgagggaatttcaggaagatcctgagatgcttatggatctcatgtacagaattgccaagagttaccaggcatctcctgatctgcggctgacctggctccagaacatggcagagaaacacaccaagaagaagtgctacacggaggctgccatgtgcctggtgcacgccgctgcgttagtggctgagtatctgagcatgctggaggaccacagctacctgcccgtgggcagtgtcagcttccagaatatttcttccaatgtgctggaggagtctgtggtctctgaggacaccctgtcacctgacgaggatggggtgtgcgcaggccagtacttcaccgagagtggcctggtaggcctcctggagcaggccgcggagctcttcagcacgggaggcttatatgagacagttaatgaggtctacaagctggtcatccccatcctagaagcgcatcgagaattccggaagctgacactcactcacagcaagctgcagagagccttcgacagcatcgttaacaaggatcataagagaatgtttggaacctacttccgagttggtttctttggatccaaatttggggatttggatgaacaggagtttgtctacaaagagcctgcaattaccaagcttcctgagatctcacatagactagaggcattttatggtcaatgttttggtgcagaatttgtggaagtgattaaagactccactcctgtggacaaaaccaagttggatcctaacaaggcctacatacagatcacttttgtggagccctactttgatgagtatgagatgaaagacagggtcacatactttgagaagaatttcaacctccggaggttcatgtacaccaccccgttcaccctggaggggcggcctcggggagagctgcatgagcagtacagaaggaacacagtcctgaccactatgcacgccttcccctacatcaagaccaggatcagcgtcatccagaaggaggagtttgttttgacaccgattgaagttgccattgaagacatgaagaagaagaccctgcagttagcagttgccattaaccaggagccgcctgatgcaaagatgcttcagatggtgctgcaaggctctgtgggagctactgtaaatcagggaccactggaagtagcccaagtgtttttggctgaaattcctgctgatccaaaactctatcgacatcacaacaagttgaggttatgctttaaggaattcatcatgagatgtggtgaagctgtagagaaaaacaagcgtctcatcacggcagaccagagggaatatcagcaggaactcaaaaagaactataacaagctaaaagagaacctcaggccaatgatcgagcggaaaattccagaactgtacaagccaatattcagagttgagagtcaaaagagggactccttccacagatctagtttcaggaaatgtgaaacccagttgtcacagggcagctaagaaaagccatcttcattcgtggagactgtggccctgcaaccctggagaaggacttgctggtacttaaaaaatgggacatttgccacccaggactgactgtacactccctgatcagccagcactctggaagctttgggatcccaggaaccatggaattattcccaaatggactctgaccagatttttgccatactggggggtggcgggatggaggatgggtactcaggcatgactgcgtatttattaaagtgtgtttttccacaatgtaccaaacaaggcataagcagcttctcctgctgactggccaatcactgcccatctgagagatgatttcctctggcccatatttgaatttattggagtaactcaaattgcctgaggaaaaatggaaaaattatccaccagtcgattcaaactgaatttcactctttataggaaggcagggcaaacttgtaggagtacgaaacattttcaataaatctacaaagggaagccttactacaattccaaaaatcatcatggttggaaatttgggaggagattatttgtgaacttgttacccttttggtaatggtggactaattgctgtatagttatttttgttttattattactgttacattaatttaacatgcatttatagaagaatacattcaaagcactgatgtaggagatacacggtacttggagcagtcagccagaaatcacagatactgctttcacttaaatggaaacaattctccgataatgctttgctttttttcttatgtcactcttgtgtactatctatttttctcctctctgggaccaagtttctttttataaagcaataatatctctgttttcatttcagaacattgtgctgtctgtcagcatatgtatatcagctacaaaatatattcaactttgacttcttttgacaaaggactttaggaaaaagaggaacaaagacattatttgagaattaaattatatatttttaatatgactgtgaccttgactgataataaagatgtaataagaattgcaagctaaatgtt

SEQ ID NO: 8016 - DNA, 7448 bp, Homo sapiens
  source 1..7448: mol_type = unassigned DNA
gacagacgaggtttgcgcttggctgggcatgttccgcggctactctgcggcgcgccaggcccccgctttccgcaccccgcgaccctagaagccaccgaaccgccggcgggccatggccactctgccgagcgcagagcgccgcgcgttcgcgctcaagatcaacaggtattcttcagcggaaataaggaaacagtttactctcccaccaaaccttggccagtaccatcgacagagcataagtacctctggcttcccctctcttcaactacctcagttttatgaccctgtggagccagtggactttgaaggacttctgatgacacacctgaacagcctggatgtgcagcttgcccaggagctcggggacttcactgatgacgacttggacgtggtgttcacgccaaaggaatgtaggactttgcagccctctttgccggaggaaggggttgaactggaccctcatgtcagggactgtgttcagacctacatccgtgagtggctaatcgtgaaccggaaaaaccaaggaagtccagaaatctgtggctttaaaaagactggatctcgaaaagattttcacaagacgcttccgaaacagacgtttgagtcggaaaccttggagtgcagtgaacccgctgctcaggcaggcccccgccacttaaacgtgctgtgcgacgtgtctgggaaaggccccgtcactgcctgtgactttgacctccgcagcctgcagcctgacaagcggctagaaaacctcctgcagcaagtgagtgccgaggactttgagaagcagaacgaggaggcccggaggaccaataggcaggccgagctctttgccctttacccatcagtggacgaggaggatgctgtggaaatacgtccagtaccagaatgtcccaaggaacacctgggcaacagaatattggtcaagttgctgaccttgaagttcgagattgaaattgagcccctgtttgccagcattgccctctacgatgttaaagaaaggaaaaagatctcagaaaattttcactgtgacctgaactctgaccagttcaaaggatttctgcgagctcacacgccttcagtggccgcatcaagtcaggcgagatctgcagtcttctcagtcacctacccgtcctcagacatctacctggtagtcaagattgaaaaagtcctgcagcagggagagattggagactgtgcagagccctacacggttatcaaagaaagtgatggtggaaagagtaaagaaaagattgaaaaactaaaactccaagctgaatccttctgccagcgtttggggaaataccggatgccctttgcctgggcacccataagcttatcaagcttcttcaatgtctccacccttgagagggaggtaactgatgtggactctgtggttgggagaagctcagtgggtgaacggaggacattggcccaatctagaaggctttctgaaagagccctctccttggaggaaaatggggttggatccaacttcaaaacctccactctgagcgttagcagctttttcaagcaggaaggagatcgccttagcgatgaagacttattcaagtttttagctgactacaaaagatcatcatccttacagagacgagtcaagtcaattccaggcttgctaagactggagatttctacagctccagagatcatcaattgctgtctgactcctgaaatgctgcccgtgaaaccctttcctgaaaaccggacacgcccgcacaaagagattttggaatttccaacacgagaagtatatgtccctcacactgtgtacagaaaccttctctatgtctacccacagaggctgaactttgtaaacaaactagcatcagcccggaacattacaataaagatccagtttatgtgtggagaagatgctagcaatgcgatgccggtcatctttggaaaatccagcgggcctgaatttctgcaggaagtgtacacagctgttacataccataataagtctcctgacttttatgaagaagtgaaaattaagctccccgctaagctcacagtaaatcaccacctcctgttcaccttctaccatatcagctgtcagcagaagcaaggagcctccgtggaaactctcctgggatattcatggctgccaattctcttaaatgaacgtcttcaaactggatcctactgtctcccagttgccttggaaaaattgccacccaactactccatgcattctgctgagaaagtcccattacagaatcctcccattaagtgggctgaaggacataagggagtatttaatattgaagtgcaagctgtttcttctgtacacacccaggacaaccacctggagaagttcttcaccctctgccactccctggagagccaggtgaccttccccatccgcgtgctggatcagaaaatcagcgagatggcgctggagcatgagctgaagctcagcatcatctgcctgaactcctcccgcctggagccgctcgtgctcttcctgcacctggtgctggacaagctcttccagctgtccgtgcagcccatggtcatcgctggccagacagccaacttctcccagtttgccttcgagtccgtggtggccatcgccaacagtctgcacaacagcaaggacctgagcaaggaccagcatgggaggaactgcctgctggcttcctacgtgcactacgtcttccgcctgccagaggtgcaaagggatgtgcccaagtcaggcgctcccactgccctcctagaccctcggagctaccacacgtatggccgcacatcagctgctgctgtgagttcaaagctgctgcaggcccgggtgatgagcagcagtaacccagacctcgcggggacacactccgcagcagacgaggaagtgaagaacatcatgtcttcaaagatcgccgatcgcaactgcagccgaatgtcttactattgctctggcagtagtgatgctccaagttcacctgcagccccaaggccagccagcaaaaagcatttccatgaggagcttgcccttcagatggtggtcagcaccggaatggtgagagaaacagtcttcaagtatgcctggttcttctttgagcttctggtgaaaagcatggcccagcacgtacataacatggacaaacgggacagttttcggaggactcgtttttctgaccgtttcatggatgacataactactattgttaatgtggtcacctcggaaattgcagcccttttagtaaaaccacagaaggaaaatgaacaggcggaaaagatgaacatcagcctggctttcttcttgtatgaccttctctccctcatggatcggggctttgtgtttaacctcatcagacattattgcagccagctgtcagccaagctcagtaaccttccaacgctcatttccatgaggctagagttcctgagaatcctctgtagccatgagcattacctcaatctgaaccttttttttatgaatgctgatactgctccaacatctccttgtccttccatatcttcccagaactcaagctcctgctccagcttccaggaccagaagatcgccagcatgttcgatctgacttccgagtaccgccagcagcacttcctcaccgggctcctcttcacagaactggctgctgccctggatgccgaaggggaaggaatcagcaaagtacaaaggaaagctgtcagtgcaattcacagcctgctaagttctcacgacctggacccacgctgtgtcaaaccagaggtgaaggtcaaaatcgccgccctttacctacctttagttggcatcattttggatgctttgccacagctctgtgactttacagttgcagatactcgcagataccgcaccagtggctcggatgaagaacaagaaggagccggtgccattaaccagaatgtggctctggccatagcagggaataatttcaatttgaaaacaagtggaatagtgctgtcttccttgccctataagcagtacaacatgctgaacgcggacactactcgcaacctcatgatctgcttcctctggatcatgaaaaatgctgatcagagcctcattaggaagtggattgctgacctgccatcaacgcagctcaacaggattttagatctacttttcatctgtgtgttatgttttgagtataagggaaaacagagttctgacaaagtcagtacccaagtcctgcagaagtcaagggatgtcaaggcccggctggaagaggctttgctccgtggggaaggggccagaggggagatgatgcgccgccgggctccagggaacgaccgatttccaggcctaaatgaaaatttgagatggaagaaagagcagacacattggcggcaagctaatgagaagctagataaaacaaaggccgagttagatcaagaagccttgatcagtggcaatctggctacagaagcacatttaatcatcctggatatgcaggaaaacattatccaggcgagctcggctctggactgtaaagacagcctgctgggaggtgttctgagggtgctggtgaattctctgaactgtgatcagagtaccacctacctgactcactgctttgcaacactccgtgctctcatcgccaagtttggagacttactctttgaagaggaggtggaacagtgtttcgacctatgtcaccaagtcctgcaccactgcagcagcagcatggatgtcacccggagccaagcctgtgccaccctttacctcctcatgaggttcagttttggagccaccagtaattttgcaagagtaaagatgcaagtaaccatgtccctggcatctttggtgggaagagcaccagactttaatgaagagcacctgagaagatccttgaggacaattttggcctattcagaagaggacacagccatgcagatgactccttttcccacccaggtggaggaacttctctgtaatctgaatagcatcttatatgacacagtgaaaatgagggaatttcaggaagatcctgagatgcttatggatctcatgtacagaattgccaagagttaccaggcatctcctgatctgcggctgacctggctccagaacatggcagagaaacacaccaagaagaagtgctacacggaggctgccatgtgcctggtgcacgccgctgcgttagtggctgagtatctgagcatgctggaggaccacagctacctgcccgtgggcagtgtcagcttccagaatatttcttccaatgtgctggaggagtctgtggtctctgaggacaccctgtcacctgacgaggatggggtgtgcgcaggccagtacttcaccgagagtggcctggtaggcctcctggagcaggccgcggagctcttcagcacgggaggcttatatgagacagttaatgaggtctacaagctggtcatccccatcctagaagcgcatcgagaattccggaagctgacactcactcacagcaagctgcagagagccttcgacagcatcgttaacaaggatcataagagaatgtttggaacctacttccgagttggtttctttggatccaaatttggggatttggatgaacaggagtttgtctacaaagagcctgcaattaccaagcttcctgagatctcacatagactagaggcattttatggtcaatgttttggtgcagaatttgtggaagtgattaaagactccactcctgtggacaaaaccaagttggatcctaacaaggcctacatacagatcacttttgtggagccctactttgatgagtatgagatgaaagacagggtcacatactttgagaagaatttcaacctccggaggttcatgtacaccaccccgttcaccctggaggggcggcctcggggagagctgcatgagcagtacagaaggaacacagtcctgaccactatgcacgccttcccctacatcaagaccaggatcagcgtcatccagaaggaggagtttgttttgacaccgattgaagttgccattgaagacatgaagaagaagaccctgcagttagcagttgccattaaccaggagccgcctgatgcaaagatgcttcagatggtgctgcaaggctctgtgggagctactgtaaatcagggaccactggaagtagcccaagtgtttttggctgaaattcctgctgatccaaaactctatcgacatcacaacaagttgaggttatgctttaaggaattcatcatgagatgtggtgaagctgtagagaaaaacaagcgtctcatcacggcagaccagagggaatatcagcaggaactcaaaaagaactataacaagctaaaagagaacctcaggccaatgatcgagcggaaaattccagaactgtacaagccaatattcagagttgagagtcaaaagagggactccttccacagatctagtttcaggaaatgtgaaacccagttgtcacagggcagctaagaaaagccatcttcattcgtggagactgtggccctgcaaccctggagaaggacttgctggtacttaaaaaatgggacatttgccacccaggactgactgtacactccctgatcagccagcactctggaagctttgggatcccaggaaccatggaattattcccaaatggactctgaccagatttttgccatactggggggtggcgggatggaggatgggtactcaggcatgactgcgtatttattaaagtgtgtttttccacaatgtaccaaacaaggcataagcagcttctcctgctgactggccaatcactgcccatctgagagatgatttcctctggcccatatttgaatttattggagtaactcaaattgcctgaggaaaaatggaaaaattatccaccagtcgattcaaactgaatttcactctttataggaaggcagggcaaacttgtaggagtacgaaacattttcaataaatctacaaagggaagccttactacaattccaaaaatcatcatggttggaaatttgggaggagattatttgtgaacttgttacccttttggtaatggtggactaattgctgtatagttatttttgttttattattactgttacattaatttaacatgcatttatagaagaatacattcaaagcactgatgtaggagatacacggtacttggagcagtcagccagaaatcacagatactgctttcacttaaatggaaacaattctccgataatgctttgctttttttcttatgtcactcttgtgtactatctatttttctcctctctgggaccaagtttctttttataaagcaataatatctctgttttcatttcagaacattgtgctgtctgtcagcatatgtatatcagctacaaaatatattcaactttgacttcttttgacaaaggactttaggaaaaagaggaacaaagacattatttgagaattaaattatatatttttaatatgactgtgaccttgactgataataaagatgtaataagaattgcaagctaaa

SEQ ID NO: 8017 - DNA, 6386 bp, Homo sapiens
  source 1..6386: mol_type = unassigned DNA
tacgcgccgtgtaactgtgaatctttcaaagcctcagttttatgaccctgtggagccagtggactttgaaggacttctgatgacacacctgaacagcctggatgtgcagcttgcccaggagctcggggacttcactgatgacgacttggacgtggtgttcacgccaaaggaatgtaggactttgcagccctctttgccggaggaaggggttgaactggaccctcatgtcagggactgtgttcagacctacatccgtgagtggctaatcgtgaaccggaaaaaccaaggaagtccagaaatctgtggctttaaaaagactggatctcgaaaagattttcacaagacgcttccgaaacagacgtttgagtcggaaaccttggagtgcagtgaacccgctgctcaggcaggcccccgccacttaaacgtgctgtgcgacgtgtctgggaaaggccccgtcactgcctgtgactttgacctccgcagcctgcagcctgacaagcggctagaaaacctcctgcagcaagtgagtgccgaggactttgagaagcagaacgaggaggcccggaggaccaataggcaggccgagctctttgccctttacccatcagtggacgaggaggatgctgtggaaatacgtccagtaccagaatgtcccaaggaacacctgggcaacagaatattggtcaagttgctgaccttgaagttcgagattgaaattgagcccctgtttgccagcattgccctctacgatgttaaagaaaggaaaaagatctcagaaaattttcactgtgacctgaactctgaccagttcaaaggatttctgcgagctcacacgccttcagtggccgcatcaagtcaggcgagatctgcagtcttctcagtcacctacccgtcctcagacatctacctggtagtcaagattgaaaaagtcctgcagcagggagagattggagactgtgcagagccctacacggttatcaaagaaagtgatggtggaaagagtaaagaaaagattgaaaaactaaaactccaagctgaatccttctgccagcgtttggggaaataccggatgccctttgcctgggcacccataagcttatcaagcttcttcaatgtctccacccttgagagggaggtaactgatgtggactctgtggttgggagaagctcagtgggtgaacggaggacattggcccaatctagaaggctttctgaaagagccctctccttggaggaaaatggggttggatccaacttcaaaacctccactctgagcgttagcagctttttcaagcaggaaggagatcgccttagcgatgaagacttattcaagtttttagctgactacaaaagatcatcatccttacagagacgagtcaagtcaattccaggcttgctaagactggagatttctacagctccagagatcatcaattgctgtctgactcctgaaatgctgcccgtgaaaccctttcctgaaaaccggacacgcccgcacaaagagattttggaatttccaacacgagaagtatatgtccctcacactgtgtacagaaaccttctctatgtctacccacagaggctgaactttgtaaacaaactagcatcagcccggaacattacaataaagatccagtttatgtgtggagaagatgctagcaatgcgatgccggtcatctttggaaaatccagcgggcctgaatttctgcaggaagtgtacacagctgttacataccataataagtctcctgacttttatgaagaagtgaaaattaagctccccgctaagctcacagtaaatcaccacctcctgttcaccttctaccatatcagctgtcagcagaagcaaggagcctccgtggaaactctcctgggatattcatggctgccaattctcttaaatgaacgtcttcaaactggatcctactgtctcccagttgccttggaaaaattgccacccaactactccatgcattctgctgagaaagtcccattacagaatcctcccattaagtgggctgaaggacataagggagtatttaatattgaagtgcaagctgtttcttctgtacacacccaggacaaccacctggagaagttcttcaccctctgccactccctggagagccaggtgaccttccccatccgcgtgctggatcagaaaatcagcgagatggcgctggagcatgagctgaagctcagcatcatctgcctgaactcctcccgcctggagccgctcgtgctcttcctgcacctggtgctggacaagctcttccagctgtccgtgcagcccatggtcatcgctggccagacagccaacttctcccagtttgccttcgagtccgtggtggccatcgccaacagtctgcacaacagcaaggacctgagcaaggaccagcatgggaggaactgcctgctggcttcctacgtgcactacgtcttccgcctgccagaggtgcaaagggatgtgcccaagtcaggcgctcccactgccctcctagaccctcggagctaccacacgtatggccgcacatcagctgctgctgtgagttcaaagctgctgcaggcccgggtgatgagcagcagtaacccagacctcgcggggacacactccgcagcagacgaggaagtgaagaacatcatgtcttcaaagcatttccatgaggagcttgcccttcagatggtggtcagcaccggaatggtgagagaaacagtcttcaagtatgcctggttcttctttgagcttctggtgaaaagcatggcccagcacgtacataacatggacaaacgggacagttttcggaggactcgtttttctgaccgtttcatggatgacataactactattgttaatgtggtcacctcggaaattgcagcccttttagtaaaaccacagaaggaaaatgaacaggcggaaaagatgaacatcagcctggctttcttcttgtatgaccttctctccctcatggatcggggctttgtgtttaacctcatcagacattattgcagccagctgtcagccaagctcagtaaccttccaacgctcatttccatgaggctagagttcctgagaatcctctgtagccatgagcattacctcaatctgaaccttttttttatgaatgctgatactgctccaacatctccttgtccttccatatcttcccagaactcaagctcctgctccagcttccaggaccagaagatcgccagcatgttcgatctgacttccgagtaccgccagcagcacttcctcaccgggctcctcttcacagaactggctgctgccctggatgccgaaggggaaggaatcagcaaagtacaaaggaaagctgtcagtgcaattcacagcctgctaagttctcacgacctggacccacgctgtgtcaaaccagaggtgaaggtcaaaatcgccgccctttacctacctttagttggcatcattttggatgctttgccacagctctgtgactttacagttgcagatactcgcagataccgcaccagtggctcggatgaagaacaagaaggagccggtgccattaaccagaatgtggctctggccatagcagggaataatttcaatttgaaaacaagtggaatagtgctgtcttccttgccctataagcagtacaacatgctgaacgcggacactactcgcaacctcatgatctgcttcctctggatcatgaaaaatgctgatcagagcctcattaggaagtggattgctgacctgccatcaacgcagctcaacaggattttagatctacttttcatctgtgtgttatgttttgagtataagggaaaacagagttctgacaaagtcagtacccaagtcctgcagaagtcaagggatgtcaaggcccggctggaagaggctttgctccgtggggaaggggccagaggggagatgatgcgccgccgggctccagggaacgaccgatttccaggcctaaatgaaaatttgagatggaagaaagagcagacacattggcggcaagctaatgagaagctagataaaacaaaggccgagttagatcaagaagccttgatcagtggcaatctggctacagaagcacatttaatcatcctggatatgcaggaaaacattatccaggcgagctcggctctggactgtaaagacagcctgctgggaggtgttctgagggtgctggtgaattctctgaactgtgatcagagtaccacctacctgactcactgctttgcaacactccgtgctctcatcgccaagtttggagacttactctttgaagaggaggtggaacagtgtttcgacctatgtcaccaagtcctgcaccactgcagcagcagcatggatgtcacccggagccaagcctgtgccaccctttacctcctcatgaggttcagttttggagccaccagtaattttgcaagagtaaagatgcaagtaaccatgtccctggcatctttggtgggaagagcaccagactttaatgaagagcacctgagaagatccttgaggacaattttggcctattcagaagaggacacagccatgcagatgactccttttcccacccaggtggaggaacttctctgtaatctgaatagcatcttatatgacacagtgaaaatgagggaatttcaggaagatcctgagatgcttatggatctcatgtacagaattgccaagagttaccaggcatctcctgatctgcggctgacctggctccagaacatggcagagaaacacaccaagaagaagtgctacacggaggctgccatgtgcctggtgcacgccgctgcgttagtggctgagtatctgagcatgctggaggaccacagctacctgcccgtgggcagtgtcagcttccagaatatttcttccaatgtgctggaggagtctgtggtctctgaggacaccctgtcacctgacgaggatggggtgtgcgcaggccagtacttcaccgagagtggcctggtaggcctcctggagcaggccgcggagctcttcagcacgggaggcttatatgagacagttaatgaggtctacaagctggtcatccccatcctagaagcgcatcgagaattccggaagctgacactcactcacagcaagctgcagagagccttcgacagcatcgttaacaaggatcataagagaatgtttggaacctacttccgagttggtttctttggatccaaatttggggatttggatgaacaggagtttgtctacaaagagcctgcaattaccaagcttcctgagatctcacatagactagaggcattttatggtcaatgttttggtgcagaatttgtggaagtgattaaagactccactcctgtggacaaaaccaagttggatcctaacaaggcctacatacagatcacttttgtggagccctactttgatgagtatgagatgaaagacagggtcacatactttgagaagaatttcaacctccggaggttcatgtacaccaccccgttcaccctggaggggcggcctcggggagagctgcatgagcagtacagaaggaacacagtcctgaccactatgcacgccttcccctacatcaagaccaggatcagcgtcatccagaaggaggagtttgttttgacaccgattgaagttgccattgaagacatgaagaagaagaccctgcagttagcagttgccattaaccaggagccgcctgatgcaaagatgcttcagatggtgctgcaaggctctgtgggagctactgtaaatcagggaccactggaagtagcccaagtgtttttggctgaaattcctgctgatccaaaactctatcgacatcacaacaagttgaggttatgctttaaggaattcatcatgagatgtggtgaagctgtagagaaaaacaagcgtctcatcacggcagaccagagggaatatcagcaggaactcaaaaagaactataacaagctaaaagagaacctcaggccaatgatcgagcggaaaattccagaactgtacaagccaatattcagagttgagagtcaaaagagggactccttccacagatctagtttcaggaaatgtgaaacccagttgtcacagggcagctaagaaaagccatcttcattcgtggagactgtggccctgcaaccctggagaaggacttgctggtacttaaaaaatgggacatttgccacccaggactgactgtacactccctgatcagccagcactctggaagctttgggatcccaggaaccatggaattattcccaaatggactctgaccagatttttgccatactggggggtggcgggatggaggatgggtactcaggcatgactgcgtatttattaaagtgtgtttttccacaatgtaccaaacaaggcataagcagcttctcctgctgactggcca

SEQ ID NO: 8018 - DNA, 2314 bp, Homo sapiens
  source 1..2314: mol_type = unassigned DNA
gcgtggggcacggaggggctcgcgctcccagaagccggcaggccttcccgcgggcgggcccgcagcgcgctccgccccggaaacacgcccatggccgccttggcgcgctttcaaacgctcaggtttcctaccttccggctgcttgggaacttctttcttgcccgccaagcccgcagccacccgggcgcggcgggactcctagacccggcgctgcgatgaagaggacccgcgacgaggtggatgcgacgctgcagatcgccaagctgaatgcggccgagctgctgccggcggtgcactgcctgggcttcggccctggggccagcggcgctgcagccggcgacttctgcctgctggagctggagcccacgctgtgccagcagctggaggatggacacagtcttgtgattcgtggtgataaagacgagcaagctgtgctgtgcagtaaagacaaaacatacgacttgaagatagcagacacttccaatatgttgcttttcattcctggttgtaaaactccggaccagttgaagaaggaagattcacactgtaacattattcacactgagatctttggtttttctaataattattgggaattaagaagacgtagacccaagttaaagaagctaaagaaacttttgatggaaaatccatatgaaggacctgacagtcaaaaagagaaggattcaaatagctcaaaatatacaactgaagatttgcttgatcaaattcaggcaagtgaggaagaaataatgacccaattacaagttctaaatgcctgtaagattggaggttattggaggattcttgaatttgattatgagatgaaacttctgaatcatgtaactcagcttgtggattctgaatcatggtcttttggtaaagttcctttgaacacatgccttcaggaactcggaccattggagccagaggaaatgatagaacactgtcttaaatgttatgggaagaaatatgtagatgaaggcgaagtttattttgagttggatgctgataaaatatgtagagcagcagcacgaatgctacttcagaatgcggtgaaattcaatctcgctgagtttcaagaagtgtggcagcagagtgttcctgaaggaatggtaactagtcttgatcagcttaagggtttagcgctggtggatagacactcgagaccagaaatcatatttttgctgaaagtagatgatttacctgaggataatcaggaacgttttaatagccttttctctctaagggagaagtggacagaagaagatattgctccatatattcaagatttgtgtggagagaagcaaaccataggtgcattactcactaaatattctcattcttcgatgcaaaatggtgttaaagtttataattcgagaagacccatttcttaaaagaacaacggtcttttcttcaggactcaagttgctttataaagttgctggatagaagaaaaataacttgtacttttatttctgacttttagaaacctagtcttctaaggcatttttctcctcatcttaagcattttgaaactactgttatttcttaaatgttataggatgtagctttaaaattatatttgtactatgtacacagtgtaaacaaggacaaaagaattctttcctatattatgtctgaggtctctatgatttatttaaagtttggctttttatatttaaaatgtcatttctttacttaggatttgatgttctaatcattaatacacttaagttttccagagaactaaatagtaatagtttcatagaagagaactatttattcacttaaatatcatttctcaagtgagtgagttcccctctacttttagccttccacccaaactggaagcctctaggtgctatcaattatttatatccatcgtttacatccatgaaattggctgaataattactcctctgcctggcgtagacatgcgctttgggaaaaaaacgagtttataatcctataatgaagaatactggcacaggcaatgctcactcgaaaacttcaagtaatttctagttggttttggaatgcttgataaagttcctttacagctttattttcctgatttgttttggtttagatcaaagttcaaattaattttaacttagctaatgaactcatcaccaggacagttggagggggtaggccgaggttaaatggtccacgtttcaaaaatgttaatggctaatccataattaaagaaggtttaactgttactgaagtttacaagttttattgtcatgaacatgaaatacaaacacgatggcttcgaaatgtctttcaataaatgtttctgcattta

SEQ ID NO: 8019 - DNA, 731 bp, Homo sapiens
  source 1..731: mol_type = unassigned DNA
ggggagggcggagttaggtcacgagggtgcgcatgcgcaaacagcacatccggtgtggtcgacgggtcctccaagagtttggggcgcggactggagtaccttgcgtgcagttatgtcggcgtcggtagtgtctgtcatttcgcggttcttagaagagtacttgagctccactccgcagcgtctgaagttgctggacgcgtacctgctgtatatactgctgaccggggcgctgcagttcggttactgtctcctcgtggggaccttccccttcaactcttttctctcgggcttcatctcttgtgtggggagtttcatcctagcggtttgcctgagaatacagatcaacccacagaacaaagcggatttccaaggcatctccccagagcgagcctttgctgattttctctttgccagcaccatcctgcaccttgttgtcatgaactttgttggctgactcattctcatttacttaattgaggagtaggagactaaaagaatgttcactctttgaatttcctggataagagttctggagatggcagcttattggacacatggattttcttcagatttgcacttactgctagctctgctttttatgcaggagaaaagcccagagttcactgtgtgtcagaacaactttctaacaaacatttattaatccagcctctgcctttcattaaatgtaaccttttgccttccaaattaaagaactccatgccactcctcca

SEQ ID NO: 8020 - DNA, 406 bp, Homo sapiens
  source 1..406: mol_type = unassigned DNA
atgaggaccctcgccatccttgctgccattctcctggtggccctgcaggcccaggctgagccactccaggcaagagctgatgaggttgctgcagccccggagcagattgcagcggacatcccagaagtggttgtttcccttgcatgggacgaaagcttggctccaaagcatccaggctcaaggaaaaacatggcctgctattgcagaataccagcgtgcattgcaggagaacgtcgctatggaacctgcatctaccagggaagactctgggcattctgctgctgagcttgcagaaaaagaaaaatgagctcaaaatttgctttgagagctacagggaattgctattactcctgtaccttctgctcaatttcctttcctcatcccaaataaatgccttgttacaaga

SEQ ID NO: 8021 - DNA, 485 bp, Homo sapiens
  source 1..485: mol_type = unassigned DNA
ctatagaagacctgggacagaggactgctgtctgccctctctggtcaccctgcctagctagaggatctgtgaccccagccatgaggaccctcgccatccttgctgccattctcctggtggccctgcaggcccaggctgagccactccaggcaagagctgatgaggttgctgcagccccggagcagattgcagcggacatcccagaagtggttgtttcccttgcatgggacgaaagcttggctccaaagcatccaggctcaaggaaaaacatggcctgctattgcagaataccagcgtgcattgcaggagaacgtcgctatggaacctgcatctaccagggaagactctgggcattctgctgctgagcttgcagaaaaagaaaaatgagctcaaaatttgctttgagagctacagggaattgctattactcctgtaccttctgctcaatttcctttcctcatcccaaataaatgccttgttacaag

SEQ ID NO: 8022 - DNA, 617 bp, Homo sapiens
  source 1..617: mol_type = unassigned DNA
ccttaaataaggaagtcctctcctctgtgtgcatggctgctcttgctacataagacctggaacacaggactgctgtctgccctctctgctcgccctgcctagcttgaggatctgtcaccccagccatgaggattatcgccctcctcgctgctattctcttggtagccctccaggtccgggcaggcccactccaggcaagaggtgatgaggctccaggccaggagcagcgtgggccagaagaccaggacatatctatttcctttgcatgggataaaagctctgctcttcaggtttcaggctcaacaaggggcatggtctgctcttgcagattagtattctgccggcgaacagaacttcgtgttgggaactgcctcattggtggtgtgagtttcacatactgctgcacgcgtgtcgattaacgttctgctgtccaagagaatgtcatgctgggaacgccatcatcggtggtgttagcttcacatgcttctgcagctgagcttgcagaatagagaaaaatgagctcataatttgctttgagagctacaggaaatggttgtttctcctatactttgtccttaacatctttcttgatcctaaatatatatctcgtaacaaga

SEQ ID NO: 8023 - DNA, 444 bp, Homo sapiens
  source 1..444: mol_type = unassigned DNA
tccactcctgctctccctcctgcaggtgaccccagccatgaggaccatcgccatccttgctgccattctcctggtggccctgcaggcccaggctgagtcactccaggaaagagctgatgaggctacaacccagaagcagtctggggaagacaaccaggaccttgctatctcctttgcaggaaatggactctctgctcttagaacctcaggttctcaggcaagagccacctgctattgccgaaccggccgttgtgctacccgtgagtccctctccggggtgtgtgaaatcagtggccgcctctacagactctgctgtcgctgagcttcctagatagaaaccaaagcagtgcaagattcagttcaaggtcctgaaaaaagaaaaacattttactctgtgtaccttgtgtctttctaaatttctctctccaaaataaagttcaagca

SEQ ID NO: 8024 - DNA, 469 bp, Homo sapiens
  source 1..469: mol_type = unassigned DNA
acacatctgctcctgctctctctcctccagcgaccctagccatgagaaccctcaccatcctcactgctgttctcctcgtggccctccaggccaaggctgagccactccaagctgaggatgatccactgcaggcaaaagcttatgaggctgatgcccaggagcagcgtggggcaaatgaccaggactttgccgtctcctttgcagaggatgcaagctcaagtcttagagctttgggctcaacaagggctttcacttgccattgcagaaggtcctgttattcaacagaatattcctatgggacctgcactgtcatgggtattaaccacagattctgctgcctctgagggatgagaacagagagaaatatattcataatttactttatgacctagaaggaaactgtcgtgtgtcctatacattgccatcaactttgtttcctcatctcaaataaagtcctttcagcaagttc

SEQ ID NO: 8025 - DNA, 478 bp, Homo sapiens
  source 1..478: mol_type = unassigned DNA
cttgactgtggcacctcccttcagttccgtcgacgaggttgtgcaatccaccagtcttataaatacagtgacgctccagcctctggaagcctctgtcagctcagcctccaaaggagccagcgtctccccagttcctgaaatcctgggtgttgcctgccagtcgccatgagaacttcctaccttctgctgtttactctctgcttacttttgtctgagatggcctcaggtggtaactttctcacaggccttggccacagatctgatcattacaattgcgtcagcagtggagggcaatgtctctattctgcctgcccgatctttaccaaaattcaaggcacctgttacagagggaaggccaagtgctgcaagtgagctgggagtgaccagaagaaatgacgcagaagtgaaatgaactttttataagcattcttttaataaaggaaaattgcttttgaagtatacctcctttgggccaaaa

SEQ ID NO: 8026 - DNA, 1158 bp, Homo sapiens
  source 1..1158: mol_type = unassigned DNA
cctggatctaccacctcctgcttcccaaggaccatgaaactcctgctgctggctcttcctatgcttgtgctcctaccccaagtgatcccagcctatagtggtgaaaaaaaatgctggaacagatcagggcactgcaggaaacaatgcaaagatggagaagcagtgaaagatacatgcaaaaatcttcgagcttgctgcattccatccaatgaagaccacaggcgagttcctgcgacatctcccacacccttgagtgactcaacaccaggaattattgatgatattttaacagtaaggttcacgacagactactttgaagtaagcagcaagaaagatatggttgaagagtctgaggcgggaaggggaactgagacctctcttccaaatgttcaccatagctcatgacttcctctcggctatcactcacccctgtcctcagagtgataaactaagtcacatacagataaagcactgaaaacaccacagtgaccctcccaccccccaccaatatgtaattctattaatagaaacagctgtgtaaagaagtctaaaattttcactatttccaatgataaactcttcagtgctcttcttgaaatgtcacattatttccacaacaagttataacctatttttagtatttcttgtttgctagtgacctatgcacaacttcaatagcttagttagctattccaacaacaatttcttcatgtatcgttctgtcttctcaacagctgtcttcatggcagcataagtggtcatgatcaaaattctaaatctttgcatctgtgagagtagctactatgacactaaaagctttttttctagaacaggagacacttcaggtgaaagcattcattctcctactaactatggccttggagccaggttttatctctcactgtaggaaattggccgccccaggtgtgagctatgaagactcctttttgccccagtggctttggggttgaaatgctgtcgaaaagcttttatggctctgtagacccatctttttgaccaagccttgatcacacatggacatccaagggtaatcatggacccccaattgtgggtgaaaggatggatcatttatctacctgattactgagagctttatttgtctccctctgatagcaaaaaaaaaaaaaaaaaaaaaaa

SEQ ID NO: 8027 - DNA, 1403 bp, Homo sapiens
  source 1..1403: mol_type = unassigned DNA
actgaagccgtggggacgcgcccagcggagctaatcagattacctggctggtgtttgcttgttctggagtgatcttctgactggaaaagaactatgtcatggatcaaggaaggagagctgtcactttgggagcggttctgtgccaacatcataaaggcaggcccaatgccgaaacacattgcattcataatggacgggaaccgtcgctatgccaagaagtgccaggtggagcggcaggaaggccactcacagggcttcaacaagctagctgagactctgcggtggtgtttgaacctgggcatcctagaggtgacagtctacgcattcagcattgagaacttcaaacgctccaagagtgaggtagacgggcttatggatctggcccggcagaagttcagccgcttgatggaagaaaaggagaaactgcagaagcatggggtgtgtatccgggtcctgggcgatctgcacttgttgcccttggatctccaggagctgattgcacaagctgtacaggccacgaagaactacaacaagtgtttcctgaatgtctgttttgcatacacatcccgtcatgagatcagcaatgctgtgagagagatggcctggggggtggagcaaggcctgttggatcccagtgatatctctgagtctctgcttgataagtgcctctataccaaccgctctcctcatcctgacatcttgatacggacttctggagaagtgcggctgagtgacttcttgctatggcagacctctcactcctgcctggtgttccaacccgttctgtggccagagtatacattttggaacctcttcgaggccatcctgcagttccagatgaaccatagcgtgcttcagaaggcccgagacatgtatgcagaggagcggaagaggcagcagctggagagggaccaggctacagtgacagagcagctgctgcgagaggggctccaagccagtggggacgcccagctccgaaggacacgcttgcacaaactctcggccagacgggaagagcgagtccaaggcttcctgcaggccttggaactcaagcgagctgactggctggcccgtctgggcactgcatcagcctgaatgaggctggccacctgccactttgccctgccctctgcctccagggctccactccccttccttttcttggtgaaaggcacctcctttcctgataatgaatggtgttccctttgcttggctggggagccccccaggccaggtttgctggccatagatacctttgggctgcctgggacaggctcctgaggaggattgagggtgaaagtctcccacgagtacactaaacctaggtctggtcaccaatagggtttggagagcaaagggccacaactcatcagctgcctgtctcttagatgcactttcttttt

SEQ ID NO: 8028 - DNA, 3245 bp, Homo sapiens
  source 1..3245: mol_type = unassigned DNA
cgcgcccagcggagctaatcagattacctggctggtgtttgcttgttctggagtgatcttctgactggaaaagaactatgtcatggatcaaggaaggagagctgtcactttgggagcggttctgtgccaacatcataaaggcaggcccaatgccgaaacacattgcattcataatggacgggaaccgtcgctatgccaagaagtgccaggtggagcggcaggaaggccactcacagggcttcaacaagctagctgagactctgcggtggtgtttgaacctgggcatcctagaggtgacagtctacgcattcagcattgagaacttcaaacgctccaagagtgaggtagacgggcttatggatctggcccggcagaagttcagccgcttgatggaagaaaaggagaaactgcagaagcatggggtgtgtatccgggtcctgggcgatctgcacttgttgcccttggatctccaggagctgattgcacaagctgtacaggccacgaagaactacaacaagtgtttcctgaatgtctgttttgcatacacatcccgtcatgagatcagcaatgctgtgagagagatggcctggggggtggagcaaggcctgttggatcccagtgatatctctgagtctctgcttgataagtgcctctataccaaccgctctcctcatcctgacatcttgatacggacttctggagaagtgcggctgagtgacttcttgctatggcagacctctcactcctgcctggtgttccaacccgttctgtggccagagtatacattttggaacctcttcgaggccatcctgcagttccagatgaaccatagcgtgcttcagcagaaggcccgagacatgtatgcagaggagcggaagaggcagcagctggagagggaccaggctacagtgacagagcagctgctgcgagaggggctccaagccagtggggacgcccagctccgaaggacacgcttgcacaaactctcggccagacgggaagagcgagtccaaggcttcctgcaggccttggaactcaagcgagctgactggctggcccgtctgggcactgcatcagcctgaatgaggctggccacctgccactttgccctgccctctgcctccagggctccactccccttccttttcttggtgaaaggcacctcctttcctgataatgaatggtgttccctttgcttggctggggagccccccaggccaggtttgctggccatagatacctttgggctgcctgggacaggctcctgaggaggattgagggtgaaagtctcccacgagtacactaaacctaggtctggtcaccaatagggtttggagagcaaagggccacaactcatcagctgcctgtctcttagatgcactttctttttccaccagcacatccttcaacacacagaatttcagggaagagttctccccaaaaccctagctctttacccttccattttagccttccacccagcttccacaaaagatttggctctaccttggatctgctagtaaataactaataggcaggcagttatttgggtaaggaaaaaaggggtgggagagacagaaaatttgcccatctgctgctcctcccccttggctctccacctgggatttgctattgaatctctaccctctcccaccacacagtactgattgctcactgaaagactcagcacccccaatggtgcgcggaagccaggcgggcgattacaatccaattacctattgtcgactcagcccacacaagcttttctcctcctcttgcagggcatggggccaggctccactcccaaatgagactggccccctccatggttcagggtaacagaagggcctgtaggccctggtgaactgaatccagcacaggcctcccctgtaacacaacaggactgagcagaaccaaacacttcttccaactgactctgctccctgccctcaccatctcaaactctgattcccactccactcttcgaggtttctctcagctttttgacctggctccctaagtaggccctagatgatttattcttggcatggcaaagcttgttctaggtcctctgcttgtgagggtcaaagctgtgtcctttcccttacctccctctgccaggacttgctgcagagctgctgagaggattagtgcctttgaagagctgtctgcctgagcaactctatttcaggtgccccacaccggcaagtaccagccagcaacaccaaccaaatgctactctctttaaagtccattttccttcttctttttttttttttttttggagacagcatctcaccctgtcctggctggtctcgaactcctgacctcaggtgatccgccggcctcaccctcccaaagtgctgggattacaggcatgagccaccatgccagacttcccattttactttctgcaagctgtttccctagcagctccctctaggggagaggtgaaatcttgcaagttgtagcaagagcacacaggaaacccctaactttcctataccccacccgcctcttcccctttctgtcccgggatacctggcggcaagagacttcttggctattgtccatgctcccagaatcaagcataaatgccagacacggcgattgagaagccaatcagtgaaccctttggcaaagcccccatccacacctggcactcccctctaccaatccctggcacagggttcctggagagcaggtgctgtacattttacagctttacaatggggctgttgacagccataattagggaggcatgaattatgcggctataatgcagagccctacaattaaggcgggaatgaggggctggaggcagcaaacggaatctgccctatgagcgtggctgttgagtcctgtctcctgggtctgactttccgtaatatgattggggtacagtagaggtgattaatggggctggcatctctctttggcctgaggttctgtattctgggaaaggtacacagggtggagtagggagaagctgccccaggaggcgatgtagtggtggaaagaagaggcagagaggtcgtcgtcgtcgcccagcagcaagggctgcaaaatagtagaactcgtggttgctttggacaggtgtgatttgtgcaagccaggttcaacccttgcctcaagaaatcagatgggaccaatttagtgtccttccacctgtgagccaagcccccatttgaggacatctatcgtattcttgtgtgctgggtctcaaatagaatttttaaagattc

SEQ ID NO: 8029 - DNA, 916 bp, Homo sapiens
  source 1..916: mol_type = unassigned DNA
gcgccacgtcatgaggaagtgccggcccactgaagccgtggggacgcgcccagcggagctaatcagattacctggctggtgtttgcttgttctggagtgatcttctgactggaaaagaactatgtcatggatcaaggaaggagagctgtcactttgggagcggttctgtgccaacatcataaaggcaggcccaatgccgaaacacattgcattcataatggacgggaaccgtcgctatgccaagaagtgccaggtggagcggcaggaaggccactcacagggcttcaacaagctagctgagactctgcggtggtgtttgaacctgggcatcctagaggtgacagtctacgcattcagcattgagaacttcaaacgctccaagagtgaggtagacgggcttatggatctggcccggcagaagttcagccgcttgatggaagaaaaggagaaactgcagaagcatggggtgtgtatccgggtcctgggcgatctgcacttgttgcccttggatctccaggagctgattgcacaagctgtacaggccacgaagaactacaacaatgatatctctgagtctctgcttgataagtgcctctataccaaccgctctcctcatcctgacatcttgatacggacttctggagaagtgcggctgagtgacttcttgctatggcagcagaaggcccgagacatgtatgcagaggagcggaagaggcagcagctggagagggaccaggctacagtgacagagcagctgctgcgagaggggctccaagccagtggggacgcccagctccgaaggacacgcttgcacaaactctcggccagacgggaagagcgagtccaaggcttcctgcaggccttggaactcaagcgagctgactggctggcccgtctgggcactgcatcagcctga

SEQ ID NO: 8030 - DNA, 718 bp, Homo sapiens
  source 1..718: mol_type = unassigned DNA
gcgccacgtcatgaggaagtgccggcccactgaagccgtggggacgcgcccagcggagctaatcagattacctggctggtgtttgcttgttctggagtgatcttctgactggaaaagaactatgtcatggatcaaggaaggagagctgtcactttgggagcggttctgtgccaacatcataaaggcaggcccaatgccgaaacacattgcattcataatggacgggaaccgtcgctatgccaagaagtgccaggtggagcggcaggaaggccactcacagggcttcaacaagctagctgagactctgcggtggtgtttgaacctgggcatcctagaggtgacagtctacgcattcagcattgagaacttcaaacgctccaagagtgaggtagacgggcttatggatctggcccggcagaagttcagccgcttgatggaagaaaaggagaaactgcagaagcatggggtgtgtatccgggtcctgggcgatctgcacttgttgcccttggatctccaggagctgattgcacaagctgtacaggccacgaagaactacaacaagtgtttcctgaatgtctgttttgcatacacatcccgtcatgagatcagcaatgctgtgagagagatggcctggggggtggagcaaggcctgttggatcccagtcgagacaggtttcaccatattggccaggctagtctcgaactcctgacgtcgtga

SEQ ID NO: 8031 - DNA, 979 bp, Homo sapiens
  source 1..979: mol_type = unassigned DNA
gcgccacgtcatgaggaagtgccggcccactgaagccgtggggacgcgcccagcggagctaatcagattacctggctggtgtttgcttgttctggagtgatcttctgactggaaaagaactatgtcatggatcaaggaaggagagctgtcactttgggagcggttctgtgccaacatcataaaggcaggcccaatgccgaaacacattgcattcataatggacgggaaccgtcgctatgccaagaagtgccaggtggagcggcaggaaggccactcacagggcttcaacaagctagctgagactctgcggtggtgtttgaacctgggcatcctagaggtgacagtctacgcattcagcattgagaacttcaaacgctccaagagtgaggtagacgggcttatggatctggcccggcagaagttcagccgcttgatggaagaaaaggagaaactgcagaagcatggggtgtgtatccgggtcctgggcgatctgcacttgttgcccttggatctccaggagctgattgcacaagctgtacaggccacgaagaactacaacaagtgtttcctgaatgtctgttttgcatacacatcccgtcatgagatcagcaatgctgtgagagagatggcctggggggtggagcaaggcctgttggatcccagtgatatctctgagtctctgcttgataagtgcctctataccaaccgctctcctcatcctgacatcttgatacggacttctggagaagtgcggctgagtgacttcttgctatggcagacctctcactcctgcctggtgttccaacccgttctgtggccagagtatacattttggaacctcttcgaggccatcctgcagttccagatgaaccatagcgtgcttcagcacccagggagcctcctgaccaaggcctggaagaagcccttccagcaagacggagagctctacggcaactgttcaagcccgaagtcctcatag

SEQ ID NO: 8032 - DNA, 850 bp, Homo sapiens
  source 1..850: mol_type = unassigned DNA
gaaggggtgaactagaggagaagagggtgactgggcggggagcagctgcgggagaagcaaagggacgactgagggaataatcaggagaccactgaggcgtgaagtactaggcgtgcgataactgaaggaattacctggctggtgtttgcttgttctggagtgatcttctgactggaaaagaactatgtcatggatcaaggaaggagagctgtcactttgggagcggttctgtgccaacatcataaaggcaggcccaatgccgaaacacattgcattcataatggacgggaaccgtcgctatgccaagaagtgccaggtggagcggcaggaaggccactcacagggcttcaacaagctagctgagactctgcggtggtgtttgaacctgggcatcctagaggtgacagtctacgcattcagcattgagaacttcaaacgctccaagagtgaggtagacgggcttatggatctggcccggcagaagttcagccgcttgatggaagaaaaggagaaactgcagaagcatggggtgtgtatccgggtcctgggcgatctgcacttgttgcccttggatctccaggagctgattgcacaagctgtacaggccacgaagaactacaacaagtgtttcctgaatgtctgttttgcatacacatcccgtcatgagatcagcaatgctgtgagagagatggcctggggggtggagcaaggcctgttggatcccaggtatcccgatgatatctctgagtctctgcttgataagtgcctctataccaaccgctctcctcatcctgacatcttgatacggacttctggagaagtgcggctgagtgacttcttgctatggcag

SEQ ID NO: 8033 - DNA, 573 bp, Homo sapiens
  source 1..573: mol_type = unassigned DNA
gctaatcaggtgccactgaactgaaggggtgaactagaggagaagagggtgactgggcggggagcagctgcgggagaagcaaagggacgactgagggaataatcaggagaccactgaggcgtgaagtactaggcgtgcgataactgaaggaattacctggctggtgtttgcttgttctggagtgatcttctgactggaaaagaactatgtcatggatcaaggaaggagagctgtcactttgggagcggttctgtgccaacatcataaaggcaggcccaatgccgaaacacattgcattcataatggacgggaaccgtcgctatgccaagaagtgccaggtggagcggcaggaaggccactcacagggcttcaacaagctagctgagactctgcggtggtgtttgaacctgggcatcctagaggtgacagtctacgcattcagcattgagaacttcaaacgctccaagagtgaggtagacgggcttatggatctggcccggcagaagttcagccgcttgatggaagaaaaggagaaactgcagaagcatggggtgtgtatccgggtcctgggcg

SEQ ID NO: 8034 - DNA, 492 bp, Homo sapiens
  source 1..492: mol_type = unassigned DNA
aatcaggtgccactgaactgaaggggtgaactagaggagaagagggtgactgggcggggagcagctgcgggagaagcaaagggacgactgagggaataatcaggagaccactgaggcgtgaagtactaggcgtgcgataactgaaggagttagtaactgggagcacagagttggaaacagcttaggggaagatggagaaggaagaaacggggaatgatcaagatattacctggctggtgtttgcttgttctggagtgatcttctgactggaaaagaactatgtcatggatcaaggaaggagagctgtcactttgggagcggttctgtgccaacatcataaaggcaggcccaatgccgaaacacattgcattcataatggacgggaaccgtcgctatgccaagaagtgccaggtggagcggcaggaaggccactcacagggcttcaacaagctagctgagactctgcggtggtgtttgaacctgggcatccta

SEQ ID NO: 8035 - DNA, 581 bp, Homo sapiens
  source 1..581: mol_type = unassigned DNA
aatcaggtgccactgaactgaaggggtgaactagaggagaagagggtgactgggcggggagcagctgcgggagaagcaaagggacgactgagggaataatcaggagaccactgaggcgtgaagtactaggcgtgcgataactgaaggagttagtaactgggagcacagagttggaaacagcttaggggaagatggagaaggaagaaacggggaatgatcaagatgtgggcaccatgatgtggcaggaaaccgacttagatgttcagaagaaattacctggctggtgtttgcttgttctggagtgatcttctgactggaaaagaactatgtcatggatcaaggaaggagagctgtcactttgggagcggttctgtgccaacatcataaaggcaggcccaatgccgaaacacattgcattcataatggacgggaaccgtcgctatgccaagaagtgccaggtggagcggcaggaaggccactcacagggcttcaacaagctagctgagactctgcggtggtgtttgaacctgggcatcctagaggtgacagtctacgcattcagcattgagaacttcaaacgc

SEQ ID NO: 8036 - DNA, 1072 bp, Homo sapiens
  source 1..1072: mol_type = unassigned DNA
ctgaagccgtggggacgcgcccagcggagctaatcagattacctggctggtgtttgcttgttctggagtgatcttctgactggaaaagaactatgtcatggatcaaggaaggagagctgtcactttgggagcggttctgtgccaacatcataaaggcaggcccaatgccgaaacacattgcattcataatggacgggaaccgtcgctatgccaagaagtgccaggtggagcggcaggaaggccactcacagggcttcaacaagctagctgagactctgcggtggtgtttgaacctgggcatcctagaggtgacagtctacgcattcagcattgagaacttcaaacgctccaagagtgaggtagacgggcttatggatctggcccggcagaagttcagccgcttgatggaagaaaagtgtttcctgaatgtctgttttgcatacacatcccgtcatgagatcagcaatgctgtgagagagatggcctggggggtggagcaaggcctgttggatcccagtgatatctctgagtctctgcttgataagtgcctctataccaaccgctctcctcatcctgacatcttgatacggacttctggagaagtgcggctgagtgacttcttgctatggcagacctctcactcctgcctggtgttccaacccgttctgtggccagagtatacattttggaacctcttcgaggccatcctgcagttccagatgaaccatagcgtgcttcagaaggcccgagacatgtatgcagaggagcggaagaggcagcagctggagagggaccaggctacagtgacagagcagctgctgcgagaggggctccaagccagtggggacgcccagctccgaaggacacgcttgcacaaactctcggccagacgggaagagcgagtccaaggcttcctgcaggccttggaactcaagcgagctgactggctggcccgtctgggcactgcatcagcctgaatgaggctggccacctgccactttgccctgccctctgcctccagggctccactccccttccttttcttggtgaaaggcacctcctttcctgataa

SEQ ID NO: 8037 - DNA, 556 bp, Homo sapiens
  source 1..556: mol_type = unassigned DNA
agaggagaagagggtgactgggcggggagcagctgcgggagaagcaaagggacgactgagggaataatcaggagaccactgaggcgtgaagtactaggcgtgcgataactgaaggagttagtaactgggagcacagagttggaaacagcttaggggaagatggagaaggaagaaacggggaatgatcaagatgtgggcaccatgatgtggcaggaaaccgacttagatgttcagaagaagtcagtgcagatacggaggaaatgggaatgggaagaagtctgcaaagccaggagaaccgaggaaaggcttttgcctccagagattacctggctggtgtttgcttgttctggagtgatcttctgactggaaaagaactatgtcatggatcaaggaaggagagctgtcactttgggagcggttctgtgccaacatcataaaggcaggcccaatgccgaaacacattgcattcataatggacgggaaccgtcgctatgccaagaagtgccaggtggagcggcaggaaggccactcacagggcttcaacaagctagctgag

SEQ ID NO: 8038 - DNA, 496 bp, Homo sapiens
  source 1..496: mol_type = unassigned DNA
agctaatcaggtgccactgaactgaaggggtgaactagaggagaagaggattacctggctggtgtttgcttgttctggagtgatcttctgactggaaaagaactatgtcatggatcaaggaaggagagctgtcactttgggagcggttctgtgccaacatcataaaggcaggcccaatgccgaaacacattgcattcataatggacgggaaccgtcgctatgccaagaagtgccaggtggagcggcaggaaggccactcacagggcttcaacaagctagctgagactctgcggtggtgtttgaacctgggcatcctagaggtgacagtctacgcattcagcattgagaacttcaaacgctccaagagtgaggtagacgggcttatggatctggcccggcagaagttcagccgcttgatggaagaaaaggagaaactgcagaagcatggggtgtgtatccgggtcctgggcgatctgcacttgttgcccttggatct

SEQ ID NO: 8039 - DNA, 582 bp, Homo sapiens
  source 1..582: mol_type = unassigned DNA
gagctaatcaggtgccactgaactgaagggattacctggctggtgtttgcttgttctggagtgatcttctgactggaaaagaactatgtcatggatcaaggaaggagagctgtcactttgggagcggttctgtgccaacatcataaaggcaggcccaatgccgaaacacattgcattcataatggacgggaaccgtcgctatgccaagaagtgccaggtggagcggcaggaaggccactcacagggcttcaacaagctagctgagactctgcggtggtgtttgaacctgggcatcctagaggtgacagtctacgcattcagcattgagaacttcaaacgctccaagagtgaggtagacgggcttatggatctggcccggcagaagttcagccgcttgatggaagaaaaggagaaactgcagaagcatggggtgtgtatccgggtcctgggcgatctgcacttgttgcccttggatctccaggagctgattgcacaagctgtacaggccacgaagaactacaacaagtgtttcctgaatgtctgttttgcatacacatcccgtcatgagatcagcaatgctgt

SEQ ID NO: 8040 - DNA, 1723 bp, Homo sapiens
  source 1..1723: mol_type = unassigned DNA
tttttttttttttcttcccctccctaaactcctctgtcagtctgtaaacattacctgagaattccccagccgaaacggctgctggggcaagaaacttcttgttagaactttccacctccggcttccccctccacctcttttaccgtcccaaccttaggagacgctttttctcccccagaggagaatttatctttttttttttttttttttttctttttctcacccggtgctttgcatttgggaagaggtgatttcaagagtggccaggtgggacgcctctctcctccttattcggtttactatttattgttcggggtgttttttaattcctgtattgctcggcccggggagtttcgccccctgcccggctccgcggcgcggaggatggtgtggaaacggctgggcgcgctggtgatgttccctctacagatgatctatctggtggtgaaagcagccgtcggactggtgctgcccgccaagctgcgggacctgtcgcgggagaacgtcctcatcaccggcggcgggagaggcatcgggcgtcagctcgcccgcgagttcgcggagcgcggcgccagaaagattgttctctggggccggactgagaaatgcctgaaggagacgacggaggagatccggcagatgggcactgagtgccattacttcatctgtgatgtgggcaaccgggaggaggtgtaccagacggccaaggccgtccgggagaaggtgggtgacatcaccatcctggtgaacaatgccgccgtggtccatgggaagagcctaatggacagtgatgatgatgccctcctcaagtcccaacacatcaacaccctgggccagttctggaccaccaaggccttcctgccacgtatgctggagctgcagaatggccacatcgtgtgcctcaactccgtgctggcactgtctgccatccccggtgccatcgactactgcacatccaaagcgtcagccttcgccttcatggagagcctgaccctggggctgctggactgtccgggagtcagcgccaccacagtgctgcccttccacaccagcaccgagatgttccagggcatgagagtcaggtttcccaacctctttcccccactgaagccggagacggtggcccggaggacagtggaagctgtgcagctcaaccaggccctcctcctcctcccatggacaatgcatgccctcgttatcttgaaaagcatacttccacaggctgcactcgaggagatccacaaattctcaggaacctacacctgcatgaacactttcaaagggcggacatagagacaggatgaagacatgcttgaggagccacggagtttgggggccacagcacctgggcacacacccgagcacctgtccattggcatgcttctgctgggtgagcaggacagctcctgtccccagcgaagaatccggctgcccctgggccagtcccaggacctttgcacaggactgatgggtataactgacccccacagggaggcaggaaaacagccagaagccaccttgacacttttgaacatttccagttctgtagagtttattgtcaattgcttctcaagtctaaccagcctcagcagtgtgcatagaccatttccaggagggtctgtccccagatgctctgcctcccgttccaaaacccactcatcctcagcttgcacaaactggttgaacggcaggaatgaaaaataaagagagatggcttttgtga

SEQ ID NO: 8041 - DNA, 826 bp, Homo sapiens
  source 1..826: mol_type = unassigned DNA
ggaagcggagacagagaccctagaggagaggctgcccccggaggggtgggagctgccagcccccaggggtgctcgaggggagcgaggccgctccagggaggtgggtgcccgccagaggggcggcgagggctgccgggacggttcacgcagcggccagcagactggctgcgtgttgcaatgtctggtggcgtttgcagcatcctgtccgtgtgtgcagctggggtaacctcgggccggcggaggagcgcgtgtggctcgtaggccctgcggccggaggctgctggcaccttgcatctcatttacagctccgggttcagccacagattgttctctggggccggactgagaaatgcctgaaggagacgacggaggagatccggcagatgggcactgagtgccattacttcatctgtgatgtgggcaaccgggaggaggtgtaccagacggccaaggccgtccgggagaaggtgggtgacatcaccatcctggtgaacaatgccgccgtggtccatgggaagagcctaatggacagtgatgatgatgccctcctcaagtcccaacacatcaacaccctgggccagttctggaccaccaaggccttcctgccacgtatgctggagctgcagaatggccacatcgtgtgcctcaactccgtgctggcactgtctgccatccccggtgccatcgactactgcacatccaaagcgtcagccttcgccttcatggagagcctgaccctggggctgctggactgtccgggagtcagcgccaccacagtgctgcccttccacaccagcaccgagatgttccagggcatgagagtcag

SEQ ID NO: 8042 - DNA, 496 bp, Homo sapiens
  source 1..496: mol_type = unassigned DNA
atacttgctggtctgatccatgcacaaggcggggctgctaggcctctgtgcccgggcttggaattcggtgcggatggccagctccgggatgacccgccgggacccgctcgcaaataaggtggccctggtaacggcctccaccgacgggatcggcttcgccatcgcccggcgtttggcccaggacggggcccatgtggtcgtcagcagccggaagcagcagaatgtggaccaggcggtggccacgctgcagggggaggggctgagcgtgacgggcaccgtgtgccatgtggggaaggcggaggaccgggagcggctggtggccacgctctggatggacaaggaaaaagaggaaagcatgaaagaaaccctgcggataagaaggttaggcgagccagaggattgtgctggcatcgtgtctttcctgtgctctgaagatgccagctacatcactggggaaacagtggtggtgggtggaggaaccccgtcccgcctctga

SEQ ID NO: 8043 - DNA, 1443 bp, Homo sapiens
  source 1..1443: mol_type = unassigned DNA
aaaggcaagccccagtcaggcggaaggtagatggtggaggggcgccgcggcggatggaggtgcccagggccacagaccgctcacagcggtaccggggcggggagcagggcgggcagggaatcggcccgcccttcgtcctgcccctcgccctactctgtcaccgcccctgggaagagtggaacccatacttgctggtctgatccatgcacaaggcggggctgctaggcctctgtgcccgggcttggaattcggtgcggatggccagctccgggatgacccgccgggacccgctcgcaaataaggtggccctggtaacggcctccaccgacgggatcggcttcgccatcgcccggcgtttggcccaggacggggcccatgtggtcgtcagcagccggaagcagcagaatgtggaccaggcggtggccacgctgcagggggaggggctgagcgtgacgggcaccgtgtgccatgtggggaaggcggaggaccgggagcggctggtggccacggctgtgaagcttcatggaggtatcgatatcctagtctccaatgctgctgtcaaccctttctttggaagcataatggatgtcactgaggaggtgtgggacaagactctggacattaatgtgaaggccccagccctgatgacaaaggcagtggtgccagaaatggagaaacgaggaggcggctcagtggtgatcgtgtcttccatagcagccttcagtccatctcctggcttcagtccttacaatgtcagtaaaacagccttgctgggcctgaccaagaccctggccatagagctggccccaaggaacattagggtgaactgcctagcacctggacttatcaagactagcttcagcaggatgctctggatggacaaggaaaaagaggaaagcatgaaagaaaccctgcggataagaaggttaggcgagccagaggattgtgctggcatcgtgtctttcctgtgctctgaagatgccagctacatcactggggaaacagtggtggtgggtggaggaaccccgtcccgcctctgaggaccgggagacagcccacaggccagagttgggctctagctcctggtgctgttcccgcattcacccactggcctttcccacctctgctcaccttactgttcacctcatcaaatcagttctgccctgtgaaaagatccagccttccctgccgtcaaggtggcgtcttactcgggatttctgctgttgttgtggccttgggtaaaggcctcccctgagaacacaggacaggcctgctgacaaggctgagtctaccttggcaaagaccaagatattttttcccgggccactggggaatctgaggggtgatgggagagaaggaacctggagtggaaggagcagagttgcaaattaacaacttgcaaatgaggtgcaaataaaatgcagatgattgcgcggctttgaa

SEQ ID NO: 8044 - DNA, 586 bp, Homo sapiens
  source 1..586: mol_type = unassigned DNA
atacttgctggtctgatccatgcacaaggcggggctgctaggcctctgtgcccgggcttggaattcggtgcggatggccagctccgggatgacccgccgggacccgctcgcaaataaggtggccctggtaacggcctccaccgacgggatcggcttcgccatcgcccggcgtttggcccaggacggggcccatgtggtcgtcagcagccggaagcagcagaatgtggaccaggcggtggccacgctgcagggggaggggctgagcgtgacgggcaccgtgtgccatgtggggaaggcggaggaccgggagcggctggtggccacggctgtgaagcttcatggaggtatcgatatcctagtctccaatgctgctgtcaaccctttctttggaagcataatggatgtcactgaggaggtgtgggacaagaggcggctcagtggtgatcgtgtcttccatagcagccttcagtccatctcctctctggatggacaaggaaaaagaggaaagcatgaaagaaaccctgcggataagaaggttaggcgagccagaggattgtgctggcatcgtgtctttcctgtgctctga

SEQ ID NO: 8045 - DNA, 619 bp, Homo sapiens
  source 1..619: mol_type = unassigned DNA
atacttgctggtctgatccatgcacaaggcggggctgctaggcctctgtgcccgggcttggaattcggtgcggatggccagctccgggatgacccgccgggacccgctcgcaaataaggtggccctggtaacggcctccaccgacgggatcggcttcgccatcgcccggcgtttggcccaggacggggcccatgtggtcgtcagcagccggaagcagcagaatgtggaccaggcggtggccacgctgcagggggaggggctgagcgtgacgggcaccgtgtgccatgtggggaaggcggaggaccgggagcggctggtggccacgactctggacattaatgtgaaggccccagccctgatgacaaaggcagtggtgccagaaatggagaaacgaggaggcggctcagtggtgatcgtgtcttccatagcagccttcagtccatctcctctctggatggacaaggaaaaagaggaaagcatgaaagaaaccctgcggataagaaggttaggcgagccagaggattgtgctggcatcgtgtctttcctgtgctctgaagatgccagctacatcactggggaaacagtggtggtgggtggaggaaccccgtcccgcctctga

SEQ ID NO: 8046 - DNA, 785 bp, Homo sapiens
  source 1..785: mol_type = unassigned DNA
tccatgcacaaggcggggctgctaggcctctgtgcccgggcttggaattcggtgcggatggccagctccgggatgacccgccgggacccgctcgcaaataaggtggccctggtaacggcctccaccgacgggatcggcttcgccatcgcccggcgtttggcccaggacggggcccatgtggtcgtcagcagccggaagcagcagaatgtggaccaggcggtggccacgctgcagggggaggggctgagcgtgacgggcaccgtgtgccatgtggggaaggcggaggaccgggagcggctggtggccacgctctggatggacaaggaaaaagaggaaagcatgaaagaaaccctgcggataagaaggttaggcgagccagaggattgtgctggcatcgtgtctttcctgtgctctgaagatgccagctacatcactggggaaacagtggtggtgggtggaggaaccccgtcccgcctctgaggaccgggagacagcccacaggccagagttgggctctagctcctggtgctgttcccgcattcacccactggcctttcccacctctgctcaccttactgttcacctcatcaaatcagttctgccctgtgaaaagatccagccttccctgccgtcaaggtggcgtcttactcgggatttctgctgttgttgtggccttgggtaaaggcctcccctgagaacacaggacaggcctgctgacaaggctgagtctaccttggcaaagaccaagatattttttcccgggccactggggaatctgaggggtg

SEQ ID NO: 8047 - DNA, 727 bp, Homo sapiens
  source 1..727: mol_type = unassigned DNA
ggtctgatccatgcacaaggcggggctgctaggcctctgtgcccgggcttggaattcggtgcggatggccagctccgggatgacccgccgggacccgctcgcaaataaggtggccctggtaacggcctccaccgacgggatcggcttcgccatcgcccggcgtttggcccaggacggggcccatgtggtcgtcagcagccggaagcagcagaatgtggaccaggcggtggccacgctgcagggggaggggctgagcgtgacgggcaccgtgtgccatgtggggaaggcggaggaccgggagcggctggtggccacggctgtgaagcttcatggaggtatcgatatcctagtctccaatgctgctgtcaaccctttctttggaagcataatggatgtcactgaggaggtgtgggacaagctctggatggacaaggaaaaagaggaaagcatgaaagaaaccctgcggataagaaggttaggcgagccagaggattgtgctggcatcgtgtctttcctgtgctctgaagatgccagctacatcactggggaaacagtggtggtgggtggaggaaccccgtcccgcctctgaggaccgggagacagcccacaggccagagttgggctctagctcctggtgctgttcccgcattcacccactggcctttcccacctctgctcaccttactgttcacctcatcaaatcagttctgccctgtgaaaagatcca

SEQ ID NO: 8048 - DNA, 754 bp, Homo sapiens
  source 1..754: mol_type = unassigned DNA
atacttgctggtctgatccatgcacaaggcggggctgctaggcctctgtgcccgggcttggaattcggtgcggatggccagctccgggatgacccgccgggacccgctcgcaaataaggtggccctggtaacggcctccaccgacgggatcggcttcgccatcgcccggcgtttggcccaggacggggcccatgtggtcgtcagcagccggaagcagcagaatgtggaccaggcggtggccacgctgcagggggaggggctgagcgtgacgggcaccgtgtgccatgtggggaaggcggaggaccgggagcggctggtggccacgactctggacattaatgtgaaggccccagccctgatgacaaaggcagtggtgccagaaatggagaaacgaggaggcggctcagtggtgatcgtgtcttccatagcagccttcagtccatctcctggcttcagtccttacaatgtcagtaaaacagccttgctgggcctgaccaagaccctggccatagagctggccccaaggaacattagggtgaactgcctagcacctggacttatcaagactagcttcagcaggatgctctggatggacaaggaaaaagaggaaagcatgaaagaaaccctgcggataagaaggttaggcgagccagaggattgtgctggcatcgtgtctttcctgtgctctgaagatgccagctacatcactggggaaacagtggtggtgggtggaggaaccccgtcccgcctctga

SEQ ID NO: 8049 - DNA, 1089 bp, Homo sapiens
  source 1..1089: mol_type = unassigned DNA
cctactctgtcaccgcccctgggaagagtggaacccatacttgctggtctgatccatgcacaaggcggggctgctaggcctctgtgcccgggcttggaattcggtgcggatggccagctccgggatgacccgccgggacccgctcgcaaataaggtggccctggtaacggcctccaccgacgggatcggcttcgccatcgcccggcgtttggcccaggacggggcccatgtggtcgtcagcagccggaagcagcagaatgtggaccaggcggtggccacgctgcagggggaggggctgagcgtgacgggcaccgtgtgccatgtggggaaggcggaggaccgggagcggctggtggccacggctgtgaagcttcatggaggtatcgatatcctagtctccaatgctgctgtcaaccctttctttggaagcataatggatgtcactgaggaggtgtgggacaagaggcggctcagtggtgatcgtgtcttccatagcagccttcagtccatctcctctctggatggacaaggaaaaagaggaaagcatgaaagaaaccctgcggataagaaggttaggcgagccagaggattgtgctggcatcgtgtctttcctgtgctctgaagatgccagctacatcactggggaaacagtggtggtgggtggaggaaccccgtcccgcctctgaggaccgggagacagcccacaggccagagttgggctctagctcctggtgctgttcccgcattcacccactggcctttcccacctctgctcaccttactgttcacctcatcaaatcagttctgccctgtgaaaagatccagccttccctgccgtcaaggtggcgtcttactcgggatttctgctgttgttgtggccttgggtaaaggcctcccctgagaacacaggacaggcctgctgacaaggctgagtctaccttggcaaagaccaagatattttttcccgggccactggggaatctgaggggtgatgggagagaaggaacctggagtggaaggagcagagttgcaaattaacaacttgcaaatgaggtgcaaataaaatgcagatgattgcgcggctttgaa

SEQ ID NO: 8050 - DNA, 1003 bp, Homo sapiens
  source 1..1003: mol_type = unassigned DNA
atgcacaaggcggggctgctaggcctctgtgcccgggcttggaattcggtgcggatggccagctccgggatgacccgccgggacccgctcgcaaataaggtggccctggtaacggcctccaccgacgggatcggcttcgccatcgcccggcgtttggcccaggacggggcccatgtggtcgtcagcagccggaagcagcagaatgtggaccaggcggtggccacgctgcagggggaggggctgagcgtgacgggcaccgtgtgccatgtggggaaggcggaggaccgggagcggctggtggccacgactctggacattaatgtgaaggccccagccctgatgacaaaggcagtggtgccagaaatggagaaacgaggaggcggctcagtggtgatcgtgtcttccatagcagccttcagtccatctcctctctggatggacaaggaaaaagaggaaagcatgaaagaaaccctgcggataagaaggttaggcgagccagaggattgtgctggcatcgtgtctttcctgtgctctgaagatgccagctacatcactggggaaacagtggtggtgggtggaggaaccccgtcccgcctctgaggaccgggagacagcccacaggccagagttgggctctagctcctggtgctgttcccgcattcacccactggcctttcccacctctgctcaccttactgttcacctcatcaaatcagttctgccctgtgaaaagatccagccttccctgccgtcaaggtggcgtcttactcgggatttctgctgttgttgtggccttgggtaaaggcctcccctgagaacacaggacaggcctgctgacaaggctgagtctaccttggcaaagaccaagatattttttcccgggccactggggaatctgaggggtgatgggagagaaggaacctggagtggaaggagcagagttgcaaattaacaacttgcaaatgaggtgcaaataaaatgcagatgattgcgcggctttgaa

SEQ ID NO: 8051 - DNA, 2322 bp, Homo sapiens
  source 1..2322: mol_type = unassigned DNA
gcaatccaagactgcttagggttcggaattacaaaaccaaattccctgctaaggctaaagttgatctgaacaaaagtaagggcaaggcaaagagaatagacattagacagggacctgaaaggatccagaaatgggactttacatcccacagaggaaacagacacagggtttcctcatgttgcccaggctggtctcggacacttgaattcaagcaatctgccggccccgccgggtgtgccgcatgagggcgcgggccgcccaaggaccgcgagtggggccgcgagtgctgagcccggcgcgcccgagccgctcctcctcccggcctgctccctgggcggagccggggcagtgcggctctgggctggccgaaggggtggcgctgcgatcccgcagggcagcgacgcgactctggtgcgggccgtcttcttccccccgagctgggcgtgcgcggccgcaatgaactgggagctgctgctgtggctgctggtgctgtgcgcgctgctcctgctcttggtgcagctgctgcgcttcctgagggctgacggcgacctgacgctactatgggccgagtggcagggacgacgcccagaatgggagctgactgatatggtggtgtgggtgactggagcctcgagtggaattggtgaggagctggcttaccagttgtctaaactaggagtttctcttgtgctgtcagccagaagagtgcatgagctggaaagggtgaaaagaagatgcctagagaatggcaatttaaaagaaaaagatatacttgttttgccccttgacctgaccgacactggttcccatgaagcggctaccaaagctgttctccaggagtttggtagaatcgacattctggtcaacaatggtggaatgtcccagcgttctctgtgcatggataccagcttggatgtctacagaaagctaatagagcttaactacttagggacggtgtccttgacaaaatgtgttctgcctcacatgatcgagaggaagcaaggaaagattgttactgtgaatagcatcctgggtatcatatctgtacctctttccattggatactgtgctagcaagcatgctctccggggtttttttaatggccttcgaacagaacttgccacatacccaggtataatagtttctaacatttgcccaggacctgtgcaatcaaatattgtggagaattccctagctggagaagtcacaaagactataggcaataatggagaccagtcccacaagatgacaaccagtcgttgtgtgcggctgatgttaatcagcatggccaatgatttgaaagaagtttggatctcagaacaacctttcttgttagtaacatatttgtggcaatacatgccaacctgggcctggtggataaccaacaagatggggaagaaaaggattgagaactttaagagtggtgtggatgcagactcttcttattttaaaatctttaagacaaaacatgactgaaaagagcacctgtacttttcaagccactggagggagaaatggaaaacatgaaaacagcaatcttcttatgcttctgaataatcaaagactaatttgtgattttactttttaatagatatgactttgcttccaacatggaatgaaataaaaaataaataataaaagattgccatgaatcttgcaaaaaaggtattaactcatactatattcttggataaaataaccttttaaaatactttagcacatatgcttaaaatctaagttaacagatttgtcttagtccatttgtgctgctataacaaaataccacagatttggtaatttataaacaacagaaatctgtttttcctggctcttgaggctgggaattccaagaccaatgcaccagcagaattagtgtctggtgaaggctgatctctgcttccaagatggcacctcattgctgcatcctccacagtggaggaatgtatgtcctcacatggtggaagggacagaagggaaagaggagcaaaatgctttcaaaagagcatttaatctcattcattactcagtcacctcttaaaggccacatcctttaatactgttgctttggggattaagtttcgacatgaattttggaggggacaaaaacatccaaaccatagcaacataaatgtatagaatatttcacacaaagcagagtgctgggtaatgaccagatataaagaagtatttgaaatgaccttacctccaagatgcttatactcttagaaaagttgacaggtacagatggctgtaatttgaagcagcaggtaggattcattgcacctattattcattaaacacctgttgtatgtcttctactgt

SEQ ID NO: 8052 - DNA, 1318 bp, Homo sapiens
  source 1..1318: mol_type = unassigned DNA
ggagccggggcagtgcggctctgggctggccgaaggggtggcgctgcgatcccgcagggcagcgacgcgactctggtgcgggccgtcttcttccccccgagctgggcgtgcgcggccgcaatgaactgggagctgctgctgtggctgctggtgctgtgcgcgctgctcctgctcttggtgcagctgctgcgcttcctgagggctgacggcgacctgacgctactatgggccgagtggcagggacgacgcccagaatgggagctgactgatatggtggtgtgggtgactggagcctcgagtggaattggtgaggagctggcttaccagttgtctaaactaggagtttctcttgtgctgtcagccagaagagtgcatgagctggaaagggtgaaaagaagatgcctagagaatggcaatttaaaagaaaaagatatacttgttttgccccttgacctgaccgacactggttcccatgaagcggctaccaaagctgttctccaggagtttggtagaatcgacattctggtcaacaatggtggaatgtcccagcgttctctgtgcatggataccagcttggatgtctacagaaagctaatagagcttaactacttagggacggtgtccttgacaaaatgtgttctgcctcacatgatcgagaggaagcaaggaaagattgttactgtgaatagcatcctgggtatcatatctgtacctctttccattggatactgtgctagcaagcatgctctccggggtttttttaatggccttcgaacagaacttgccacatacccaggtataatagtttctaacatttgcccaggacctgtgcaatcaaatattgtggagaattccctagctggagaagtcacaaagactataggcaataatggagaccagtcccacaagatgacaaccagtcgttgtgtgcggctgatgttaatcagcatggccaatgatttgaaagaagtttggatctcagaacaacctttcttgttagtaacatatttgtggcaatacatgccaacctgggcctggtggataaccagatggggaagaaaaggattgagaactttaagagtggtgtggatgcagactcttcttattttaaaatctttaagacaaaacatgactgaaaagagcacctgtacttttcaagccactggagggagaaatggaaaacatgaaaacagcaatcttcttatgcttctgaataatcaaagactaatttgtgattttactttttaatagatatgactttgcttccaacatggaatgaaataaaaaataaataataaaagattgccatgaatcttgc

SEQ ID NO: 8053 - DNA, 1194 bp, Homo sapiens
  source 1..1194: mol_type = unassigned DNA
gcttagggttcggaattacaaaaccaaattccctgctaaggctaaagttgatctgaacaaaagtaagggcaaggcaaagagaatagacattagacagggacctgaaaggatccagaaatgggactttacatcccacagaggaaacagaatgggagctgactgatatggtggtgtgggtgactggagcctcgagtggaattggtgaggagctggcttaccagttgtctaaactaggagtttctcttgtgctgtcagccagaagagtgcatgagctggaaagggtgaaaagaagatgcctagagaatggcaatttaaaagaaaaagatatacttgttttgccccttgacctgaccgacactggttcccatgaagcggctaccaaagctgttctccaggagtttggtagaatcgacattctggtcaacaatggtggaatgtcccagcgttctctgtgcatggataccagcttggatgtctacagaaagctaatagagcttaactacttagggacggtgtccttgacaaaatgtgttctgcctcacatgatcgagaggaagcaaggaaagattgttactgtgaatagcatcctgggtatcatatctgtacctctttccattggatactgtgctagcaagcatgctctccggggtttttttaatggccttcgaacagaacttgccacatacccaggtataatagtttctaacatttgcccaggacctgtgcaatcaaatattgtggagaattccctagctggagaagtcacaaagactataggcaataatggagaccagtcccacaagatgacaaccagtcgttgtgtgcggctgatgttaatcagcatggccaatgatttgaaagaagtttggatctcagaacaacctttcttgttagtaacatatttgtggcaatacatgccaacctgggcctggtggataaccaacaagatggggaagaaaaggattgagaactttaagagtggtgtggatgcagactcttcttattttaaaatctttaagacaaaacatgactgaaaagagcacctgtacttttcaagccactggagggagaaatggaaaacatgaaaacagcaatcttcttatgcttctgaataatcaaagactaatttgtgattttactttttaatagatatgactttgcttccaacatggaatgaaataaaaaataaataat

SEQ ID NO: 8054 - DNA, 1386 bp, Homo sapiens
  source 1..1386: mol_type = unassigned DNA
tggggccgcgagtgctgagcccggcgcgcccgagccgctcctcctcccggcctgctccctgggcggagccggggcagtgcggctctgggctggccgaaggggtggcgctgcgatcccgcagggcagcgacgcgactctggtgcgggccgtcttcttccccccgagctgggcgtgcgcggccgcaatgaactgggagctgctgctgtggctgctggtgctgtgcgcgctgctcctgctcttggtgcagctgctgcgcttcctgagggctgacggcgacctgacgctactatgggccgagtggcagggacgacgcccagaatgggagctgactgatatggtggtgtgggtgactggagcctcgagtggaattggtgaggagctggcttaccagttgtctaaactaggagtttctcttgtgctgtcagccagaagagtgcatgagctggaaagggtgaaaagaagatgcctagagaatggcaatttaaaagaaaaagatatacttgttttgccccttgacctgaccgacactggttcccatgaagcggctaccaaagctgttctccaggagtttggtagaatcgacattctggtcaacaatggtggaatgtcccagcgttctctgtgcatggataccagcttggatgtctacagaaagctaatagagcttaactacttagggacggtgtccttgacaaaatgtgttctgcctcacatgatcgagaggaagcaaggaaagattgttactgtgaatagcatcctgggtatcatatctgtacctctttccattggatactgtgctagcaagcatgctctccggggtttttttaatggccttcgaacagaacttgccacatacccaggtataatagtttctaacatttgcccaggacctgtgcaatcaaatattgtggagaattccctagctggagaagtcacaaagactataggcaataatggagaccagtcccacaagatgacaaccagtcgttgtgtgcggctgatgttaatcagcatggccaatgatttgaaagaagtttggatctcagaacaacctttcttgttagtaacatatttgtggcaatacatgccaacctgggcctggtggataaccaacaagatggggaagaaaaggattgagaactttaagagtggtgtggatgcagactcttcttattttaaaatctttaagacaaaacatgactgaaaagagcacctgtacttttcaagccactggagggagaaatggaaaacatgaaaacagcaatcttcttatgcttctgaataatcaaagactaatttgtgattttactttttaatagatatgactttgcttccaacatggaatgaaataaaaaataaataataaaagattgccatgaatcttgc

SEQ ID NO: 8055 - DNA, 582 bp, Homo sapiens
  source 1..582: mol_type = unassigned DNA
atgcactctaactgggtccctctgaggcttgtgaatggaaaaccctcttgctttcaaatgcttgaaaacaagaaagatgctactattgatgcctcaaatacatacacagggtttcctcatgttgcccaggctggtctcggacacttgaattcaagcaatctgccggccccgccgggtgtgccgcatgagggcgcgggccgcccaaggaccgcgagtggggccgcgagtgctgagcccggcgcgcccgagccgctcctcctcccggcctgctccctgggcggagccggggcagtgcggctctgggctggccgaaggggtggcgctgcgatcccgcagggcagcgacgcgactctggtgcgggccgtcttcttccccccgagctgggcgtgcgcggccgcaatgaactgggagctgctgctgtggctgctggtgctgtgcgcgctgctcctgctcttggtgcagctgctgcgcttcctgagggctgacggcgacctgacgctactatgggccgagtggcagggacgacgcccagaatgggagctgactgatatggtggtgtgggtgactggagcctcgagtgga

SEQ ID NO: 8056 - DNA, 2864 bp, Homo sapiens
  source 1..2864: mol_type = unassigned DNA
atctgaaaaattaataattccttaattatcaaatatccattatttaaatttataattgtgtcataaatattgtcataaatagatttgctgttttaaagcttgttccttcattttctctgttttgttttagataaacattgtcataaatagatttgttgttttaaagcttgttccttcattttctctgattgttttgttttagattcagaggttacttatgcttgtttgttacatggatgttacatgtgtaatgggggatattggacttctagtgtactcatcacccatatactgaacactgtactcaaaagggattgaaagaaactaggaaacttggcaggaagatcattcttaagccaggaaaaaaatttttaatgctcacatgtgaacatgtgatggtcataccagaaggagcacccacctccctccctctgtgacagacacattttcttagccttcacctttccttctttcaagttgctgaaaatccacagtgtttctgttcatttgttactttcattctcacctatcttctctcttgctccatctaccagaacaataattccccatataatacttctcacttcacttttcaacgcaggacctcttgttgggtctgatctgtttgtctgtccgctttatcaatattatcagatgtaagtttacatgaatacacacacatattcactaaactgaggggaaaaaatgccttgtaggtcataaaaaagcagggaaattcccaacaattcatatttgatccctggatccaggggtggcagcaataagcctgctttagatatttactccccattttatgatccggtggtttggtttttcaaatgatgatatggctcctttcgcaatgacttgatgtttaggaggtgtgcttcaataaatacattttaaaatcaacaatcaagttagagttgtacaaatggctctgaaatgtcccactacactgttagaccaagggcacagattgtgcttctgtactatttatcctagtatccctcggcatatattaactgctctaaaaatctccttggctacacgctgcatcaaatcaaagttaaatgttataccacctttctattctatttttaatattcaaagagggtgctcagattttagaacaaatttcaatgtttaagtacacacaaaaaaatcattaactcatatatttcaagagtaggaaatgggaactggtgttaaaactcttataacaaatgtcactgtcttaagggacagtgtttaaaaacgcatacctggccgggcgcggtggctcatgcctgtaatcccagcactttgggaggccgaggccggcggatcacaaggaaaacaaactcaggaagaaaaagaaaagcagaagtgatcaaggagagcgctcgagttgcaatattttcctttggctgctgacaggcagttactataaagcattgtgcatggacaccatcttcttgtattatacaagaaaggagtgtacctatcacacacagggggaaaaatgctcttttgggtgctaggcctcctaatcctctgtggttttctgtggactcgtaaaggaaaactaaagattgaagacatcactgataagtacatttttatcactggatgtgactcgggctttggaaacttggcagccagaacttttgataaaaagggatttcatgtaatcgctgcctgtctgactgaatcaggatcaacagctttaaaggcagaaacctcagagagacttcgtactgtgcttctggatgtgaccgacccagagaatgtcaagaggactgcccagtgggtgaagaaccaagttggggagaaaggtctctggggtctgatcaataatgctggtgttcccggcgtgctggctcccactgactggctgacactagaggactacagagaacctattgaagtgaacctgtttggactcatcagtgtgacactaaatatgcttcctttggtcaagaaagctcaagggagagttattaatgtctccagtgttggaggtcgccttgcaatcgttggagggggctatactccatccaaatatgcagtggaaggtttcaatgacagcttaagacgggacatgaaagcttttggtgtgcacgtctcatgcattgaaccaggattgttcaaaacaaacttggcagatccagtaaaggtaattgaaaaaaaactcgccatttgggagcagctgtctccagacatcaaacaacaatatggagaaggttacattgaaaaaagtctagacaaactgaaaggcaataaatcctatgtgaacatggacctctctccggtggtagagtgcatggaccacgctctaacaagtctcttccctaagactcattatgccgctggaaaagatgccaaaattttctggatacctctgtctcacatgccagcagctttgcaagactttttattgttgaaacagaaagcagagctggctaatcccaaggcagtgtgactcagctaaccacaaatgtctcctccaggctatgaaattggccgatttcaagaacacatctccttttcaaccccattccttatctgctccaacctggactcatttagatcgtgcttatttggattgcaaaagggagtcccaccatcgctggtggtatcccagggtccctgctcaagttttctttgaaaaggagggctggaatggtacatcacataggcaagtcctgccctgtatttaggctttgcctgcttggtgtgatgtaagggaaattgaaagacttgcccattcaaaatgatctttaccgtggcctgccccatgcttatggtccccagcatttacagtaacttgtgaatgttaagtatcatctcttatctaaatattaaaagataagtcaaacatt

SEQ ID NO: 8057 - DNA, 1917 bp, Homo sapiens
  source 1..1917: mol_type = unassigned DNA
aggaagaaaatataaagtacacttttaaaacatgaagtcttcatagcagcttatagtcgttcagagaaacatgttccactgagaatgacttgagagagaggattacatcattatgccagaaggaagaagccactgtgcatgctctatcaccagcctcaccctcctggtcagccttacaagagtgacactggatatactccagaagttggacccaccacagcctgcacactggacttcttggcttttatgagctattcaagagatatttagtcatcacgttgtgtcacaatgggagtgactcacagagcaaggagagaacctgaggattcctcacacatgtagtactcagagctctacggaaacccaggcacctcgacctcaagaggatcagcctggccagggtggcacaactcttccttccccgtgcacagcaggaaagctgccatcagctgagcaagtccaccaacagtttctgtgtcccacttcatctttaataaggacaccatcttcttgtattatacaagaaaggagtgtacctatcacacacagggggaaaaatgctcttttgggtgctaggcctcctaatcctctgtggttttctgtggactcgtaaaggaaaactaaagattgaagacatcactgataagtacatttttatcactggatgtgactcgggctttggaaacttggcagccagaacttttgataaaaagggatttcatgtaatcgctgcctgtctgactgaatcaggatcaacagctttaaaggcagaaacctcagagagacttcgtactgtgcttctggatgtgaccgacccagagaatgtcaagaggactgcccagtgggtgaagaaccaagttggggagaaaggtctctggggtctgatcaataatgctggtgttcccggcgtgctggctcccactgactggctgacactagaggactacagagaacctattgaagtgaacctgtttggactcatcagtgtgacactaaatatgcttcctttggtcaagaaagctcaagggagagttattaatgtctccagtgttggaggtcgccttgcaatcgttggagggggctatactccatccaaatatgcagtggaaggtttcaatgacagcttaagacgggacatgaaagcttttggtgtgcacgtctcatgcattgaaccaggattgttcaaaacaaacttggcagatccagtaaaggtaattgaaaaaaaactcgccatttgggagcagctgtctccagacatcaaacaacaatatggagaaggttacattgaaaaaagtctagacaaactgaaaggcaataaatcctatgtgaacatggacctctctccggtggtagagtgcatggaccacgctctaacaagtctcttccctaagactcattatgccgctggaaaagatgccaaaattttctggatacctctgtctcacatgccagcagctttgcaagactttttattgttgaaacagaaagcagagctggctaatcccaaggcagtgtgactcagctaaccacaaatgtctcctccaggctatgaaattggccgatttcaagaacacatctccttttcaaccccattccttatctgctccaacctggactcatttagatcgtgcttatttggattgcaaaagggagtcccaccatcgctggtggtatcccagggtccctgctcaagttttctttgaaaaggagggctggaatggtacatcacataggcaagtcctgccctgtatttaggctttgcctgcttggtgtgatgtaagggaaattgaaagacttgcccattcaaaatgatctttaccgtggcctgccccatgcttatggtccccagcatttacagtaacttgtgaatgttaagtatcatctcttatctaaatattaaaagataagtcaaacatt

SEQ ID NO: 8058 - DNA, 1465 bp, Homo sapiens
  source 1..1465: mol_type = unassigned DNA
agattttaagcccattctgcagtggaatttcatgaactagcaagaggacaccatcttcttgtattatacaagaaaggagtgtacctatcacacacagggggaaaaatgctcttttgggtgctaggcctcctaatcctctgtggttttctgtggactcgtaaaggaaaactaaagattgaagacatcactgataagtacatttttatcactggatgtgactcgggctttggaaacttggcagccagaacttttgataaaaagggatttcatgtaatcgctgcctgtctgactgaatcaggatcaacagctttaaaggcagaaacctcagagagacttcgtactgtgcttctggatgtgaccgacccagagaatgtcaagaggactgcccagtgggtgaagaaccaagttggggagaaaggtctctggggtctgatcaataatgctggtgttcccggcgtgctggctcccactgactggctgacactagaggactacagagaacctattgaagtgaacctgtttggactcatcagtgtgacactaaatatgcttcctttggtcaagaaagctcaagggagagttattaatgtctccagtgttggaggtcgccttgcaatcgttggagggggctatactccatccaaatatgcagtggaaggtttcaatgacagcttaagacgggacatgaaagcttttggtgtgcacgtctcatgcattgaaccaggattgttcaaaacaaacttggcagatccagtaaaggtaattgaaaaaaaactcgccatttgggagcagctgtctccagacatcaaacaacaatatggagaaggttacattgaaaaaagtctagacaaactgaaaggcaataaatcctatgtgaacatggacctctctccggtggtagagtgcatggaccacgctctaacaagtctcttccctaagactcattatgccgctggaaaagatgccaaaattttctggatacctctgtctcacatgccagcagctttgcaagactttttattgttgaaacagaaagcagagctggctaatcccaaggcagtgtgactcagctaaccacaaatgtctcctccaggctatgaaattggccgatttcaagaacacatctccttttcaaccccattccttatctgctccaacctggactcatttagatcgtgcttatttggattgcaaaagggagtcccaccatcgctggtggtatcccagggtccctgctcaagttttctttgaaaaggagggctggaatggtacatcacataggcaagtcctgccctgtatttaggctttgcctgcttggtgtgatgtaagggaaattgaaagacttgcccattcaaaatgatctttaccgtggcctgccccatgcttatggtccccagcatttacagtaacttgtgaatgttaagtatcatctcttatctaaatattaaaagataagtcaaacatt

SEQ ID NO: 8059 - DNA, 1044 bp, Homo sapiens
  source 1..1044: mol_type = unassigned DNA
cggaaacccaggcacctcgacctcaagaggatcagcctggccagggtggcacaactcttccttccccgtgcacagcaggaaagctgccatcagctgagcaagtccaccaacagtttctgtgtcccacttcatctttaataaggaaaactaaagattgaagacatcactgataagtacatttttatcactggatgtgactcgggctttggaaacttggcagccagaacttttgataaaaagggatttcatgtaatcgctgcctgtctgactgaatcaggatcaacagctttaaaggcagaaacctcagagagacttcgtactgtgcttctggatgtgaccgacccagagaatgtcaagaggactgcccagtgggtgaagaaccaagttggggagaaaggtctctggggtctgatcaataatgctggtgttcccggcgtgctggctcccactgactggctgacactagaggactacagagaacctattgaagtgaacctgtttggactcatcagtgtgacactaaatatgcttcctttggtcaagaaagctcaagggagagttattaatgtctccagtgttggaggtcgccttgcaatcgttggagggggctatactccatccaaatatgcagtggaaggtttcaatgacagcttaagacgggacatgaaagcttttggtgtgcacgtctcatgcattgaaccaggattgttcaaaacaaacttggcagatccagtaaaggtaattgaaaaaaaactcgccatttgggagcagctgtctccagacatcaaacaacaatatggagaaggttacattgaaaaaagtctagacaaactgaaaggcaataaatcctatgtgaacatggacctctctccggtggtagagtgcatggaccacgctctaacaagtctcttccctaagactcattatgccgctggaaaagatgccaaaattttctggatacctctgtctcacatgccagcagctttgcaagactttttattgttgaaacagaaagcagagctggctaatcccaaggcagtgtga

SEQ ID NO: 8060 - DNA, 1678 bp, Homo sapiens
  source 1..1678: mol_type = unassigned DNA
atgtagtactcagagctctacggaaacccaggcacctcgacctcaagaggatcagcctggccagggtggcacaactcttccttccccgtgcacagcaggaaagctgccatcagctgagcaagtccaccaacagtttctgtgtcccacttcatctttaataagtttgaagataattgggagtctgacagaacaattaaaattgaattattgtttctaatagattttaagcccattctgcagtggaatttcatgaactagcaagaggacaccatcttcttgtattatacaagaaaggagtgtacctatcacacacagggggaaaaatgctcttttgggtgctaggcctcctaatcctctgtggttttctgtggactcgtaaaggaaaactaaagattgaagacatcactgataagtacatttttatcactggatgtgactcgggctttggaaacttggcagccagaacttttgataaaaagggatttcatgtaatcgctgcctgtctgactgaatcaggatcaacagctttaaaggcagaaacctcagagagacttcgtactgtgcttctggatgtgaccgacccagagaatgtcaagaggactgcccagtgggtgaagaaccaagttggggagaaaggtctctggggtctgatcaataatgctggtgttcccggcgtgctggctcccactgactggctgacactagaggactacagagaacctattgaagtgaacctgtttggactcatcagtgtgacactaaatatgcttcctttggtcaagaaagctcaagggagagttattaatgtctccagtgttggaggtcgccttgcaatcgttggagggggctatactccatccaaatatgcagtggaaggtttcaatgacagcttaagacgggacatgaaagcttttggtgtgcacgtctcatgcattgaaccaggattgttcaaaacaaacttggcagatccagtaaaggtaattgaaaaaaaactcgccatttgggagcagctgtctccagacatcaaacaacaatatggagaaggttacattgaaaaaagtctagacaaactgaaaggcaataaatcctatgtgaacatggacctctctccggtggtagagtgcatggaccacgctctaacaagtctcttccctaagactcattatgccgctggaaaagatgccaaaattttctggatacctctgtctcacatgccagcagctttgcaagactttttattgttgaaacagaaagcagagctggctaatcccaaggcagtgtgactcagctaaccacaaatgtctcctccaggctatgaaattggccgatttcaagaacacatctccttttcaaccccattccttatctgctccaacctggactcatttagatcgtgcttatttggattgcaaaagggagtcccaccatcgctggtggtatcccagggtccctgctcaagttttctttgaaaaggagggctggaatggtacatcacataggcaagtcctgccctgtatttaggctttgcctgcttggtgtgatgtaagggaaattgaaagacttgcccattcaaaatgatctttaccgtggcctgccccatgcttatggtccccagcatttacagtaacttgtgaatgttaagtatcatctcttatctaaatattaaaagataagtcaa

SEQ ID NO: 8061 - DNA, 1402 bp, Homo sapiens
  source 1..1402: mol_type = unassigned DNA
atagcagcttatagtcgttcagagaaacatgttccactgagaatgacttgagagagaggattacatcattatgccagaaggaagaagccactgtgcatgctctatcaccagcctcaccctcctggtcagccttacaagagtgacactggatatactccagaagttggacccaccacagcctgcacactggagacaccatcttcttgtattatacaagaaaggagtgtacctatcacacacagggggaaaaatgctcttttgggtgctaggcctcctaatcctctgtggttttctgtggactcgtaaaggaaaactaaagattgaagacatcactgataagtacatttttatcactggatgtgactcgggctttggaaacttggcagccagaacttttgataaaaagggatttcatgtaatcgctgcctgtctgactgaatcaggatcaacagctttaaaggcagaaacctcagagagacttcgtactgtgcttctggatgtgaccgacccagagaatgtcaagaggactgcccagtgggtgaagaaccaagttggggagaaaggtctctggggtctgatcaataatgctggtgttcccggcgtgctggctcccactgactggctgacactagaggactacagagaacctattgaagtgaacctgtttggactcatcagtgtgacactaaatatgcttcctttggtcaagaaagctcaagggagagttattaatgtctccagtgttggaggtcgccttgcaatcgttggagggggctatactccatccaaatatgcagtggaaggtttcaatgacagcttaagacgggacatgaaagcttttggtgtgcacgtctcatgcattgaaccaggattgttcaaaacaaacttggcagatccagtaaaggtaattgaaaaaaaactcgccatttgggagcagctgtctccagacatcaaacaacaatatggagaaggttacattgaaaaaagtctagacaaactgaaaggcaataaatcctatgtgaacatggacctctctccggtggtagagtgcatggaccacgctctaacaagtctcttccctaagactcattatgccgctggaaaagatgccaaaattttctggatacctctgtctcacatgccagcagctttgcaagactttttattgttgaaacagaaagcagagctggctaatcccaaggcagtgtgactcagctaaccacaaatgtctcctccaggctatgaaattggccgatttcaagaacacatctccttttcaaccccattccttatctgctccaacctggactcatttagatcgtgcttatttggattgcaaaagggagtcccaccatcgctggtggtatcccagggtccctgctcaagttttctttgaaaagga

SEQ ID NO: 8062 - DNA, 1817 bp, Homo sapiens
  source 1..1817: mol_type = unassigned DNA
atttatttttaagaaacagaggaaggtgaataagagaagtgaaattaaataatcctattttaacttttttactaggaaaacaaactcaggaagaaaaagaaaagcagaagtgatcaaggagagcgctcgagttgcaatattttcctttggctgctgacaggcagttactataaagcattgtgcatggtaggaaaatggaggctaagaaaagttaatttgtccgagggccctctgatgatagtgaaactgggatggaacctctgcctgcttgcttctgaggtctgggctcctaactactgctctactgcctcgagccaagagatttacgccctattaagcaatttgttgtgcgataaattggaagacacagcagataagcaaacaactcaagcaaccaggacaccatcttcttgtattatacaagaaaggagtgtacctatcacacacagggggaaaaatgctcttttgggtgctaggcctcctaatcctctgtggttttctgtggactcgtaaaggaaaactaaagattgaagacatcactgataagtacatttttatcactggatgtgactcgggctttggaaacttggcagccagaacttttgataaaaagggatttcatgtaatcgctgcctgtctgactgaatcaggatcaacagctttaaaggcagaaacctcagagagacttcgtactgtgcttctggatgtgaccgacccagagaatgtcaagaggactgcccagtgggtgaagaaccaagttggggagaaaggtctctggggtctgatcaataatgctggtgttcccggcgtgctggctcccactgactggctgacactagaggactacagagaacctattgaagtgaacctgtttggactcatcagtgtgacactaaatatgcttcctttggtcaagaaagctcaagggagagttattaatgtctccagtgttggaggtcgccttgcaatcgttggagggggctatactccatccaaatatgcagtggaaggtttcaatgacagcttaagacgggacatgaaagcttttggtgtgcacgtctcatgcattgaaccaggattgttcaaaacaaacttggcagatccagtaaaggtaattgaaaaaaaactcgccatttgggagcagctgtctccagacatcaaacaacaatatggagaaggttacattgaaaaaagtctagacaaactgaaaggcaataaatcctatgtgaacatggacctctctccggtggtagagtgcatggaccacgctctaacaagtctcttccctaagactcattatgccgctggaaaagatgccaaaattttctggatacctctgtctcacatgccagcagctttgcaagactttttattgttgaaacagaaagcagagctggctaatcccaaggcagtgtgactcagctaaccacaaatgtctcctccaggctatgaaattggccgatttcaagaacacatctccttttcaaccccattccttatctgctccaacctggactcatttagatcgtgcttatttggattgcaaaagggagtcccaccatcgctggtggtatcccagggtccctgctcaagttttctttgaaaaggagggctggaatggtacatcacataggcaagtcctgccctgtatttaggctttgcctgcttggtgtgatgtaagggaaattgaaagacttgcccattcaaaatgatctttaccgtggcctgccccatgcttatggtccccagcatttacagtaacttgtgaatgttaagtatcatctcttatctaaatattaaaagataagtcaaacatt

SEQ ID NO: 8063 - DNA, 524 bp, Homo sapiens
  source 1..524: mol_type = unassigned DNA
tactcagagctctacggaaacccaggcacctcgacctcaagaggatcagcctggccagggtggcacaactcttccttccccgtgcacagcaggaaagctgccatcagctgagcaagtccaccaacagtttctgtgtcccacttcatctttaataaggaaaacaaactcaggaagaaaaagaaaagcagaagtgatcaaggagagcgctcgagttgcaatattttcctttggctgctgacaggcagttactataaagcattgtgcatggacaccatcttcttgtattatacaagaaaggagtgtacctatcacacacagggggaaaaatgctcttttgggtgctaggcctcctaatcctctgtggttttctgtggactcgtaaaggaaaactaaagattgaagacatcactgataagtacatttttatcactggatgtgactcgggctttggaaacttggcagccagaacttttgataaaaagggatttcatgtaatcgctgcctgtctgactgaatcaggatca

SEQ ID NO: 8064 - DNA, 1658 bp, Homo sapiens
  source 1..1658: mol_type = unassigned DNA
gagcttactctggctttgccgagatggggctgccccagccagggctgtggctgaagaggctctgggtgctcttggaggtggctgtgcatgtggtcgtgggtaaagtgcttctgatattgtttccagacagagtcaagcggaacatcctggccatgggcgagaagacgggtatgaccaggaacccccatttcagccacgacaactggataccaacctttttcagcacccagtatttctggttcgtcttgaaggtccgttggcagcgactagaggacacgactgagctagggggtctggccccaaactgcccggtggtccgcctctcaggacagaggtgcaacatttgggagtttatgcaaggtaataggccactggtgctgaattttggaagttgtacctgaccttcatttatgttcaaatttgaccagttcaagaggcttattgaagactttagttccatagcagattttcttgtcatttacattgaagaagcacatgcatcagggtaaatctggcccttggaactacaacccagaggaagttcgtgctgttctggaaaagctccacagttaatctggacagatacctcaattctaggtgaccaacgggagggcttctcaaggcttagctctccctgagacccagctggcttttacccttgacctgtgtccctagctgaatcactagctcagatttttctgatctaagcaaacaactcccagctgaggaatgcaggccacagcacccaatcaagacaaattgttattatcagaaaatgaagcaacacttgagctgttcaggccagttccctgttgaagaaacagttccctgttgaagaaagtagagcctgacactgctcccactttggagaccacattccctgcacacggtctttgagagagcagttgcactctacaggcacacttctgaggtacggtatctctctccagccactctgataccaagtaattcaagctggcattccttctattagggaaattcattttacccaatttgcatttatggaattgatcatttaagacactaaattagtttttagaaccaattatgggaagaattccagttgttaggaagagatgaggagttggaagaggagggattagaaacaggaggaggcagtcatcctctccttgccaaaagatttaaacctgtccacattggtggtgatgatgggtgagtttccatggtaacacatccctaattttaccagggaagaggagagtactcactttaccatctttgaatatatttcatagaaatctagctctctgtaccctgaaatcttccactagcctcacttttcaacagagtcatctagaagggagggttggcttcccaaaagcataaccttgaccaaaccaaacaataggcaccagcaatgctgtcattcagttatgcagaagctcatttgtgaaattctgtttctctgatttcttcgcaagtctcttaatggtcatttgtgttagattacatcaaactgatggatagccattggtattcatctattttaactctgtgtctttacatatttgtttatgatggccacagcctaaagtacacacggctgtgacttgattcaaaagaaaatgttataagatgcagtaaactaataacagaattattaaaatatatcaggc

SEQ ID NO: 8065 - DNA, 1861 bp, Homo sapiens
  source 1..1861: mol_type = unassigned DNA
agagcttactctggctttgccgagatggggctgccccagccagggctgtggctgaagaggctctgggtgctcttggaggtggctgtgcatgtggtcgtgggtaaagtgcttctgatattgtttccagacagagtcaagcggaacatcctggccatgggcgagaagacgggtatgaccaggaacccccatttcagccacgacaactggataccaacctttttcagcacccagtatttctggttcgtcttgaaggtccgttggcagcgactagaggacacgactgagctagggggtctggccccaaactgcccggtggtccgcctctcaggacagaggtgcaacatttgggagtttatgcaaggtaataggccactggtgctgaattttggaagttgtacctgaccttcatttatgttcaaatttgaccagttcaagaggcttattgaagactttagttccatagcagattttcttgtcatttacattgaagaagcacatgcatcagatggctgggcttttaagaacaacatggacatcagaaatcaccagaaccttcaggatcgcctgcaggcagcccatctactgctggccaggagcccccagtgccctgtggtggtggacaccatgcagaaccagagcagccagctctacgcagcactgcctgagaggctctacataatccaggagggcaggatcctctacaagggtaaatctggcccttggaactacaacccagaggaagttcgtgctgttctggaaaagctccacagttaatctggacagatacctcaattctaggtgaccaacgggagggcttctcaaggcttagctctccctgagacccagctggcttttacccttgacctgtgtccctagctgaatcactagctcagatttttctgatctaagcaaacaactcccagctgaggaatgcaggccacagcacccaatcaagacaaattgttattatcagaaaatgaagcaacacttgagctgttcaggccagttccctgttgaagaaacagttccctgttgaagaaagtagagcctgacactgctcccactttggagaccacattccctgcacacggtctttgagagagcagttgcactctacaggcacacttctgaggtacggtatctctctccagccactctgataccaagtaattcaagctggcattccttctattagggaaattcattttacccaatttgcatttatggaattgatcatttaagacactaaattagtttttagaaccaattatgggaagaattccagttgttaggaagagatgaggagttggaagaggagggattagaaacaggaggaggcagtcatcctctccttgccaaaagatttaaacctgtccacattggtggtgatgatgggtgagtttccatggtaacacatccctaattttaccagggaagaggagagtactcactttaccatctttgaatatatttcatagaaatctagctctctgtaccctgaaatcttccactagcctcacttttcaacagagtcatctagaagggagggttggcttcccaaaagcataaccttgaccaaaccaaacaataggcaccagcaatgctgtcattcagttatgcagaagctcatttgtgaaattctgtttctctgatttcttcgcaagtctcttaatggtcatttgtgttagattacatcaaactgatggatagccattggtattcatctattttaactctgtgtctttacatatttgtttatgatggccacagcctaaagtacacacggctgtgacttgattcaaaagaaaatgttataagatgcagtaaactaataacagaattattaaaatatatcaggcta

SEQ ID NO: 8066 - DNA, 606 bp, Homo sapiens
  source 1..606: mol_type = unassigned DNA
atggggctgccccagccagggctgtggctgaagaggctctgggtgctcttggaggtggctgtgcatgtggtcgtgggtaaagtgcttctgatattgtttccagacagagtcaagcggaacatcctggccatgggcgagaagacgggtatgaccaggaacccccatttcagccacgacaactggataccaacctttttcagcacccagtatttctggttcgtcttgaaggtccgttggcagcgactagaggacacgactgagctagggggtctggccccaaactgcccggtggtccgcctctcaggacagaggtgcaacatttgggagtttatgcaagatggctgggcttttaagaacaacatggacatcagaaatcaccagaaccttcaggatcgcctgcaggcagcccatctactgctggccaggagcccccagtgccctgtggtggtggacaccatgcagaaccagagcagccagctctacgcagcactgcctgagaggctctacataatccaggagggcaggatcctctacaagggtaaatctggcccttggaactacaacccagaggaagttcgtgctgttctggaaaagctccacagttaa

SEQ ID NO: 8067 - DNA, 626 bp, Homo sapiens
  source 1..626: mol_type = unassigned DNA
atggggctgccccagccagggctgtggctgaagaggctctgggtgctcttggaggtggctgtgcatgtggtcgtggcacccagtatttctggttcgtcttgaaggtccgttggcagcgactagaggacacgactgagctagggggtctggccccaaactgcccggtggtccgcctctcaggacagaggtgcaacatttgggagtttatgcaaggtaataggccactggtgctgaattttggaagttgtacctgaccttcatttatgttcaaatttgaccagttcaagaggcttattgaagactttagttccatagcagattttcttgtcatttacattgaagaagcacatgcatcagatggctgggcttttaagaacaacatggacatcagaaatcaccagaaccttcaggatcgcctgcaggcagcccatctactgctggccaggagcccccagtgccctgtggtggtggacaccatgcagaaccagagcagccagctctacgcagcactgcctgagaggctctacataatccaggagggcaggatcctctacaagggtaaatctggcccttggaactacaacccagaggaagttcgtgctgttctggaaaagctccacagttaa

SEQ ID NO: 8068 - DNA, 558 bp, Homo sapiens
  source 1..558: mol_type = unassigned DNA
atggggctgccccagccagggctgtggctgaagaggctctgggtgctcttggaggtggctgtgcatgtggtcgtgggtaaagtgcttctgatattgtttccagacagagtcaagcggaacatcctggccatgggcgagaagacgggtaataggccactggtgctgaattttggaagttgtacctgaccttcatttatgttcaaatttgaccagttcaagaggcttattgaagactttagttccatagcagattttcttgtcatttacattgaagaagcacatgcatcagatggctgggcttttaagaacaacatggacatcagaaatcaccagaaccttcaggatcgcctgcaggcagcccatctactgctggccaggagcccccagtgccctgtggtggtggacaccatgcagaaccagagcagccagctctacgcagcactgcctgagaggctctacataatccaggagggcaggatcctctacaagggtaaatctggcccttggaactacaacccagaggaagttcgtgctgttctggaaaagctccacagttaa

SEQ ID NO: 8069 - DNA, 406 bp, Homo sapiens
  source 1..406: mol_type = unassigned DNA
atggggctgccccagccagggctgtggctgaagaggctctgggtgctcttggaggtggctgtgcatgtggtcgtgggtaaagtgcttctgatattgtttccagacagagtcaagcggaacatcctggccatgggcgagaagacgggtatgaccaggaacccccatttcagccacgacaactggataccaacctttttcagcacccagtatttctggttcgtcttgaaggtccgttggcagcgactagaggacacgactgagctagggggtctggccccaaactgcccggtggtccgcctctcaggacagaggtgcaacatttgggagtttatgcaagggtaaatctggcccttggaactacaacccagaggaagttcgtgctgttctggaaaagctccacagttaa

SEQ ID NO: 8070 - DNA, 1049 bp, Homo sapiens
  source 1..1049: mol_type = unassigned DNA
aagggaactgactcaggaggcagagaagatgggcatcctcagcgtagacttgctgatcacactgcaaattctgccagtttttttctccaactgcctcttcctggctctctatgactcggtcattctgctcaagcacgtggtgctgctgttgagccgctccaagtccactcgcggagagtggcggcgcatgctgacctcagagggactgcgctgcgtctggaagagcttcctcctcgatgcctacaaacagctaaattgtcctccatcaggttttagcaaagatggacacattttatgactagtatatgaagcttataaaagcagactactggtctactcacatttggatttatggatggtgaaattgggtgaggatgcccccaattccagtgtggtgcatgtctccagtacagaaggaggtgacaacagtggcaatggtacccaggagaagatagctgagggagccacatgccaccttcttgactttgccagccctgagcgcccactagtggtcaactttggctcagccacttgacctcctttcacgagccagctgccagccttccgcaaactggtggaagagttctcctcagtggctgacttcctgctggtctacattgatgaggctcatccatcagatggctgggcgataccgggggactcctctttgtcttttgaggtgaagaagcaccagaaccaggaagatcgatgtgcagcagcccagcagcttctggagcgtttctccttgccgccccagtgccgagttgtggctgaccgcatggacaataacgccaacatagcttacggggtagcctttgaacgtgtgtgcattgtgcagagacagaaaattgcttatctgggaggaaagggccccttctcctacaaccttcaagaagtccggcattggctggagaagaatttcagcaagagatgaaagaaaactagattagctggttaaaggtatgattataagagagcttattgttttaaaaagttatataaaggcaaggaaattaagaactgaatccatatttcaacagagccctatt

SEQ ID NO: 8071 - DNA, 1462 bp, Homo sapiens
  source 1..1462: mol_type = unassigned DNA
tcttaccagtaggtagcctggaaaaaaaagagaagcaacagttcctgagggaagaatgcattaacaactcggatgggtgctgtctgccagcactgcagaggaacctacggagagggctgctgggagagaatgctcatacctcccaaggcgtcagcctgccctcccgcccccaagttgctttgctcaagagggtgaaggggaaccagagcgcacaagggaactgactcaggaggcagagaagatgggcatcctcagcgtagacttgctgatcacactgcaaattctgccagtttttttctccaactgcctcttcctggctctctatgactcggtcattctgctcaagcacgtggtgctgctgttgagccgctccaagtccactcgcggagagtggcggcgcatgctgacctcagagggactgcgctgcgtctggaagagcttcctcctcgatgcctacaaacaggtgaaattgggtgaggatgcccccaattccagtgtggtgcatgtctccagtacagaaggaggtgacaacagtggcaatggtacccaggagaagatagctgagggagccacatgccaccttcttgactttgccagccctgagcgcccactagtggtcaactttggctcagccacttgacctcctttcacgagccagctgccagccttccgcaaactggtggaagagttctcctcagtggctgacttcctgctggtctacattgatgaggctcatccatcagatggctgggcgataccgggggactcctctttgtcttttgaggtgaagaagcaccagaaccaggaagatcgatgtgcagcagcccagcagcttctggagcgtttctccttgccgccccagtgccgagttgtggctgaccgcatggacaataacgccaacatagcttacggggtagcctttgaacgtgtgtgcattgtgcagagacagaaaattgcttatctgggaggaaagggccccttctcctacaaccttcaagaagtccggcattggctggagaagaatttcagcaagagatgaaagaaaactagattagctggttaaaggtatgattataagagagcttattgttttaaaaagttatataaaggcaaggaaattaagaactgaatccatatttcaacagagccctattggcttactgaaagacaggagtttatctatcggaagaacatgaatctctaacagctccatacttctttcactactcaaatggcattgggctgagtaagtaaccatatcacctctcttcttagtaaaaagccctatgtgaaaagatcccaagatggagaggaagaaacgctaattcagcatgtgttcattctgcattgagaaggaactgatacatctgatgcatgctttgagaccagaagaaaagacttacctgaataattactacattagggaagctactgtctacgttaagataaagggtattgcctt

SEQ ID NO: 8072 - DNA, 6136 bp, Homo sapiens
  source 1..6136: mol_type = unassigned DNA
gggcttccttttaatttagttttttttccccttctcccccaacccccaaccttcccccttacctcccccaccccctttatcaccaccccccttttaaataagagggtgaaggggaaccagagcgcacaagggaactgactcaggaggcagagaagatgggcatcctcagcgtagacttgctgatcacactgcaaattctgccagtttttttctccaactgcctcttcctggctctctatgactcggtcattctgctcaagcacgtggtgctgctgttgagccgctccaagtccactcgcggagagtggcggcgcatgctgacctcagagggactgcgctgcgtctggaagagcttcctcctcgatgcctacaaacaggtgaaattgggtgaggatgcccccaattccagtgtggtgcatgtctccagtacagaaggaggtgacaacagtggcaatggtacccaggagaagatagctgagggagccacatgccaccttcttgactttgccagccctgagcgcccactagtggtcaactttggctcagccacttgacctcctttcacgagccagctgccagccttccgcaaactggtggaagagttctcctcagtggctgacttcctgctggtctacattgatgaggctcatccatcagatggctgggcgataccgggggactcctctttgtcttttgaggtgaagaagcaccagaaccaggaagatcgatgtgcagcagcccagcagcttctggagcgtttctccttgccgccccagtgccgagttgtggctgaccgcatggacaataacgccaacatagcttacggggtagcctttgaacgtgtgtgcattgtgcagagacagaaaattgcttatctgggaggaaagggccccttctcctacaaccttcaagaagtccggcattggctggagaagaatttcagcaagagatgaaagaaaactagattagctggttaaaggtatgattataagagagcttattgttttaaaaagttatataaaggcaaggaaattaagaactgaatccatatttcaacagagccctattggcttactgaaagacaggagtttatctatcggaagaacatgaatctctaacagctccatacttctttcactactcaaatggcattgggctgagtaagtaaccatatcacctctcttcttagtaaaaagccctatgtgaaaagatcccaagatggagaggaagaaacgctaattcagcatgtgttcattctgcattgagaaggaactgatacatctgatgcatgctttgagaccagaagaaaagacttacctgaataattactacattagggaagctactgtctacgttaagataaagggtattgccttggctctatttggcatggatggagcccagttggaaaattcccaaatattacaacaagtccttgaacccaggccatgtggttagacgttggtgttaaggttagaccttatgttagagtcatttctgatgttccagcttctagccatgtagtgctctcagtcttcataccccagaaattattggtatatttgtagataccgagaatgatccctcagtctgagaggttagaatgatcatctgtaatctgagggttaatttctaggcaggtggagagagtggtaaaaaagaaatgaaattgacaagctaggaaagaggaggcagaaagatttggaaaattcacagagtttcacccttaagctgtagagagtgggtcacatttgttagccacggaaacatagaaacatacacaaggccagaaaaagaagaaggagctcaactaaaagtggcatagagaatacacatataaaaacaatatatttgtcatatgctcctagagaggagaaaggggtgattgaaagaaaaaaaaatacttaaatatttgtaattgtgaggggtttcttttggaaataattacttttgaaccatgtatgtggtatgtatattttcagtgggttaattataccccatgatacctattaaaggaaaaccagtgggtctggtggtgctggtcttttcctccccattcctacaatttctatgtggcccaagtcattcctaatcttggtctctatagcagtgttctctctgaatgctgagctgaagaaattatacgtacatacacacatacatacatacatacaaatatatgtatatatattctcagctgctgcgggaggtaggtaccatggccattcagcacagccttgatttcctcccaaagtaggtgagctatagtgaagaataggtgcaaacaaacaagcttacttccattgcaaaatagaagaagaggaagttagagataattctgatcaatcattttggaggctttgttataaggcaacccccggtatatcatggaatttccattgacatttgaatttggacttggatcttcccttggtcccattagctgaggtttagtaatctaaagtccctatagtatatgattataatgctattttaaaaaatatatatataaaatatttttttctttttaaaatagacactatagttttacccataagtaatatttaaagattatagctcccaaaagaatggaccaaccactttcgtatcataatttctttttggtaaatatgagactattatgaaatcatagtatatgattgtatttaaaggtacaatcaaaggatcttttgtccattccattaataactgaataaaaaataaataaaatggatagaaaaaaactaaagttgaaaatacattcttaaactagttgtctgaattgagaaaagagtgagaactaggtgtgcaagaaccaaacgtattttattttattttttaaatgggagcaacatatcagtcgtgtcaccagctggtatattgtgtaaatattaaagctccattgggactgatttttcatggcaacatcagctttctaatgttctaaattctataaaaaccacccacaaagaaacaaagcaaatttcattatctaatgagttgctggaaaatcatattgagaataattatttcagattcctcagttgttaacttctacattcaaggcttatctctgcccccattgatttttaacctcaaaatggtgttgagatttacgtggaaccctaaagcagtaaaataaaaaacctggttgcagcacattcacactgttgtccttaaaattccccttttttctctatgtacgataaagtaacagtatgtcagataagccggtggggggatgagattaggctgaggcagtgctagtcaactggggaaaaggatgatggaaaaatcacccagttgtgctatatttttaaagaaggaggtcgtttatgtgtgcagacaattctccctgaggttagcccaatggagaaatgaagcagaggaaggaaacatagaaagacatgggctatcagggaggaagatgttcaatagaacatgcaagaatttctggaagaaaggctgtggaagggccaatggagaaaatgaatggacaaagctcaggaatcctacgctatgtagaatgtcttggtgttatcagggttaagcctgtaattatgtaacctatttatcgcaacatgaatttttatgatttcttgtgatgtattcttttatgaaattaacaagaactcattattttgaggtagaggaaaatcaatgctttatctgatatgctgagaaattattagattgccaatactcatgtgcgtttcatgtgttttataaggtttgttcctttgaagaattgtagttcttagtcccacagggaaatgtgtatctatttatatatcatagtataaatctatgatatatttatatcatatataaaagtctgagttctctttcttagtccctaatcatgtttctcccataggctgtgtttacatggagctatcggtttagccttttaagcttcattagcttgtctattattgaaatagtttccaagaaattttagatattatcataacatctgggtctactcaaacacttattgtttgaaagacttatgtcttggacctatcaaaaactgactttatttattgcttagtgaaaatactagtgggatcaacaatgattttcttgaatgggcatgaatggagatgcccgcacagtaatgtagaaatgtttcatacagctattaaaatgtaactgacctccttagaggcagattagtaactgttcctactttgtatagctaagtgacagtcacttaacttacatgactttcttttttcacattgggtctctggtcctgtgtcttcacctcatttatagcacgtctccttgatttttggtagtatcaacttcccagtgatctgttcagttaagttcttctcccgttaaccaggaagtgcttattctctcatcacagtgggaagaatagcctattgtctttcattttgcctgagtgtattttactatttgggctctgaaataaaaattatgaaatatggtgaggtcacatgttggtgctgccttgctgcataaaattctagagggcaggttagagacagtatgtatgccttcgggaaaattcaaaggtggattacaaggtgtcctcagcatgccctatggcctatgtgcgaagcaagaagaattgactgatttacaggacttctctttatgtcaatcttaagaggatggatgaatctggacatttgttccacccgacctctgactgatggtttggaaaataactttaattaggatcatatgaccattgaaaaaggaaaaatgtagactctgacttccgtcccactgaaggattaatgaaaacctttactagcatttagagcttttcagaacatccccactgtcatgtgtctcagcagtggagactgcaagtaaggcttttaattttaggaggtttttttttttttttttttttccctaaatggtatggccaaaagtcagagttaaaatatatatagttagattccaacttcctccttcactctaaaaatagaatccaaacccactcttcatatatgcttccagaatggggcttaagtaccaatctctgctttgcaatgggcacaatcttggtcatgtcctgaggctctctaagaaaagagaggatctaggatgggagagctagaaagttgctaactgggaagaacaaggccctgagggcttggtctaccaatctgggaagatttgaaaacaaacttctcgcaactgaaggaaggctgaaggctgctgcaagtcattgagtgactttaggatgagcaaaacattgggccacttcctaatgccctatgtgtatagtaccagaagcaaggtctcagacttaacagacccagctctgttccaaggtgagtctgaaccaatagaaagcaaacatgtgcagatatccaaacaagactgctcatgcaagtcggggctggctacccgtcttaggcagcaacagcagagctccagggagcttattcaatatttactgagacttcgaagacccagcagatgtttaatgaagtcactattttggctcaaaccctccacttctccccctcccctcaaaaagccaacaggtaaacacataaatgaaagaaacccacagaaggggatgggaaataaagaaaattctctcaagacttctccaggcccatgtcactggtcagcgtggtttttatgtgtattaggattgggggatgtgaagaaataagtatccagtactttataaccaaagcaattaaatgatattgggtagggaatgttggccagttttgtttagttttgcatcacattgtcaccagactcactagcccaagtaatcgggcgcccgaagagggagacagagatgtgcagagttgaccagtgtgcggatgataactactgacgaaagagtcatcgactcagttagtggttggatgtagtcacattagtttgcctctccccatctttgtctccctggcaaggagaatatgcgggacatgatgctaagagtcctgggtaaatgtggtgagaatgcacgcgtgcatatgctacacatatgtgcttctcagttgcagaaaatgaactgctttgggagattatcagtagaaagagtgttatcatattggtgctgagtgctatgtgtgcttatacaatttgttcttgtattttaataaactttgaataaaagaataaa

SEQ ID NO: 8073 - DNA, 491 bp, Homo sapiens
  source 1..491: mol_type = unassigned DNA
gaggagcagctggttgatccaggagagacagggaggcgctgagatgagatgagctctctcccttatgtggagaagtccttttaggaatctgccatgtttaaatgactttggacttgggccggaactacacatcagctctcctgggcctctagcttgccaactacggacactgtgacttttcagccatcacaattgttatttagggagaaagaagagattgagtcacagtttcagaaaagaaagggtagcctggaaaaaaaagagaagcaacagttcctgagggaagaatgcattaacaactcggatgggtgctgtctgccagcactgcagaggaacctacggagagggctgctgggagagaatgctcatacctcccaaggcgtcagcctgccctcccgcccccaagttgctttgctcaagagggtgaaggggaaccagagcgcacaagggaactgactcaggaggcagagaagatgggcatcctcagcgta

SEQ ID NO: 8074 - DNA, 417 bp, Homo sapiens
  source 1..417: mol_type = unassigned DNA
gcagagagaggcactttgcaccacagacagatagcaagaagggaaagacagagagtgagaaaaaagaggagtcagtcgctcctggggaagggagagagtgagactgggagaaagagaagcacagaaagtgtgtgtaaaacggagtaaagaaagaaaaaaaaaaaactacccttaaagcacatttaaaaaaaaaaaaaactctggcaattcaagaaagaaacaggctacgtttaaagagcatagagacaatgaaaggctaaagaaaattttaaaatctctgccacagtctcataggtgcttggaaatgaaagtagaactgcctgtctttaacggactctgacagagagggtgaaggggaaccagagcgcacaagggaactgactcaggaggcagagaagatgggcatcctcagcgtag

SEQ ID NO: 8075 - DNA, 569 bp, Homo sapiens
  source 1..569: mol_type = unassigned DNA
aaagtgcttgcaattgcatagagcaaagagcatgctgaacagtgatgttccagtttaaaaggacagagctgcaaacaaaggactttggacttgggccggaactacacatcagctctcctgggcctctagcttgccaactacggacactgtgacttttcagccatcacaattgttaggtagcctggaaaaaaaagagaagcaacagttcctgagggaagaatgcattaacaactcggatgggtgctgtctgccagcactgcagaggaacctacggagagggctgctgggagagaatgctcatacctcccaaggcgtcagcctgccctcccgcccccaagttgctttgctcaagagggtgaaggggaaccagagcgcacaagggaactgactcaggaggcagagaagatgggcatcctcagcgtagacttgctgatcacactgcaaattctgccagtttttttctccaactgcctcttcctggctctctatgactcggtcattctgctcaagcacgtggtgctgctgttgagccgctccaagtccactcgcggagagtggcggcgcatgct

SEQ ID NO: 8076 - DNA, 1049 bp, Homo sapiens; identical to SEQ ID NO: 8070
  source 1..1049: mol_type = unassigned DNA

SEQ ID NO: 8077 - DNA, 6367 bp, Homo sapiens
  source 1..6367: mol_type = unassigned DNA
agactggtctagcctcccagcctacatctttcttcagtgctggatgcttcctgccctcaaacatcggactccaagttcttcagttttgagactcagactgactgtccttgctcctcaagcttgcagacagcctattgtgggacgttgtgatcattaggtagcctggaaaaaaaagagaagcaacagttcctgagggaagaatgcattaacaactcggatgggtgctgtctgccagcactgcagaggaacctacggagagggctgctgggagagaatgctcatacctcccaaggcgtcagcctgccctcccgcccccaagttgctttgctcaagagggtgaaggggaaccagagcgcacaagggaactgactcaggaggcagagaagatgggcatcctcagcgtagacttgctgatcacactgcaaattctgccagtttttttctccaactgcctcttcctggctctctatgactcggtcattctgctcaagcacgtggtgctgctgttgagccgctccaagtccactcgcggagagtggcggcgcatgctgacctcagagggactgcgctgcgtctggaagagcttcctcctcgatgcctacaaacaggtgaaattgggtgaggatgcccccaattccagtgtggtgcatgtctccagtacagaaggaggtgacaacagtggcaatggtacccaggagaagatagctgagggagccacatgccaccttcttgactttgccagccctgagcgcccactagtggtcaactttggctcagccacttgacctcctttcacgagccagctgccagccttccgcaaactggtggaagagttctcctcagtggctgacttcctgctggtctacattgatgaggctcatccatcagatggctgggcgataccgggggactcctctttgtcttttgaggtgaagaagcaccagaaccaggaagatcgatgtgcagcagcccagcagcttctggagcgtttctccttgccgccccagtgccgagttgtggctgaccgcatggacaataacgccaacatagcttacggggtagcctttgaacgtgtgtgcattgtgcagagacagaaaattgcttatctgggaggaaagggccccttctcctacaaccttcaagaagtccggcattggctggagaagaatttcagcaagagatgaaagaaaactagattagctggttaaaggtatgattataagagagcttattgttttaaaaagttatataaaggcaaggaaattaagaactgaatccatatttcaacagagccctattggcttactgaaagacaggagtttatctatcggaagaacatgaatctctaacagctccatacttctttcactactcaaatggcattgggctgagtaagtaaccatatcacctctcttcttagtaaaaagccctatgtgaaaagatcccaagatggagaggaagaaacgctaattcagcatgtgttcattctgcattgagaaggaactgatacatctgatgcatgctttgagaccagaagaaaagacttacctgaataattactacattagggaagctactgtctacgttaagataaagggtattgccttggctctatttggcatggatggagcccagttggaaaattcccaaatattacaacaagtccttgaacccaggccatgtggttagacgttggtgttaaggttagaccttatgttagagtcatttctgatgttccagcttctagccatgtagtgctctcagtcttcataccccagaaattattggtatatttgtagataccgagaatgatccctcagtctgagaggttagaatgatcatctgtaatctgagggttaatttctaggcaggtggagagagtggtaaaaaagaaatgaaattgacaagctaggaaagaggaggcagaaagatttggaaaattcacagagtttcacccttaagctgtagagagtgggtcacatttgttagccacggaaacatagaaacatacacaaggccagaaaaagaagaaggagctcaactaaaagtggcatagagaatacacatataaaaacaatatatttgtcatatgctcctagagaggagaaaggggtgattgaaagaaaaaaaaatacttaaatatttgtaattgtgaggggtttcttttggaaataattacttttgaaccatgtatgtggtatgtatattttcagtgggttaattataccccatgatacctattaaaggaaaaccagtgggtctggtggtgctggtcttttcctccccattcctacaatttctatgtggcccaagtcattcctaatcttggtctctatagcagtgttctctctgaatgctgagctgaagaaattatacgtacatacacacatacatacatacatacaaatatatgtatatatattctcagctgctgcgggaggtaggtaccatggccattcagcacagccttgatttcctcccaaagtaggtgagctatagtgaagaataggtgcaaacaaacaagcttacttccattgcaaaatagaagaagaggaagttagagataattctgatcaatcattttggaggctttgttataaggcaacccccggtatatcatggaatttccattgacatttgaatttggacttggatcttcccttggtcccattagctgaggtttagtaatctaaagtccctatagtatatgattataatgctattttaaaaaatatatatataaaatatttttttctttttaaaatagacactatagttttacccataagtaatatttaaagattatagctcccaaaagaatggaccaaccactttcgtatcataatttctttttggtaaatatgagactattatgaaatcatagtatatgattgtatttaaaggtacaatcaaaggatcttttgtccattccattaataactgaataaaaaataaataaaatggatagaaaaaaactaaagttgaaaatacattcttaaactagttgtctgaattgagaaaagagtgagaactaggtgtgcaagaaccaaacgtattttattttattttttaaatgggagcaacatatcagtcgtgtcaccagctggtatattgtgtaaatattaaagctccattgggactgatttttcatggcaacatcagctttctaatgttctaaattctataaaaaccacccacaaagaaacaaagcaaatttcattatctaatgagttgctggaaaatcatattgagaataattatttcagattcctcagttgttaacttctacattcaaggcttatctctgcccccattgatttttaacctcaaaatggtgttgagatttacgtggaaccctaaagcagtaaaataaaaaacctggttgcagcacattcacactgttgtccttaaaattccccttttttctctatgtacgataaagtaacagtatgtcagataagccggtggggggatgagattaggctgaggcagtgctagtcaactggggaaaaggatgatggaaaaatcacccagttgtgctatatttttaaagaaggaggtcgtttatgtgtgcagacaattctccctgaggttagcccaatggagaaatgaagcagaggaaggaaacatagaaagacatgggctatcagggaggaagatgttcaatagaacatgcaagaatttctggaagaaaggctgtggaagggccaatggagaaaatgaatggacaaagctcaggaatcctacgctatgtagaatgtcttggtgttatcagggttaagcctgtaattatgtaacctatttatcgcaacatgaatttttatgatttcttgtgatgtattcttttatgaaattaacaagaactcattattttgaggtagaggaaaatcaatgctttatctgatatgctgagaaattattagattgccaatactcatgtgcgtttcatgtgttttataaggtttgttcctttgaagaattgtagttcttagtcccacagggaaatgtgtatctatttatatatcatagtataaatctatgatatatttatatcatatataaaagtctgagttctctttcttagtccctaatcatgtttctcccataggctgtgtttacatggagctatcggtttagccttttaagcttcattagcttgtctattattgaaatagtttccaagaaattttagatattatcataacatctgggtctactcaaacacttattgtttgaaagacttatgtcttggacctatcaaaaactgactttatttattgcttagtgaaaatactagtgggatcaacaatgattttcttgaatgggcatgaatggagatgcccgcacagtaatgtagaaatgtttcatacagctattaaaatgtaactgacctccttagaggcagattagtaactgttcctactttgtatagctaagtgacagtcacttaacttacatgactttcttttttcacattgggtctctggtcctgtgtcttcacctcatttatagcacgtctccttgatttttggtagtatcaacttcccagtgatctgttcagttaagttcttctcccgttaaccaggaagtgcttattctctcatcacagtgggaagaatagcctattgtctttcattttgcctgagtgtattttactatttgggctctgaaataaaaattatgaaatatggtgaggtcacatgttggtgctgccttgctgcataaaattctagagggcaggttagagacagtatgtatgccttcgggaaaattcaaaggtggattacaaggtgtcctcagcatgccctatggcctatgtgcgaagcaagaagaattgactgatttacaggacttctctttatgtcaatcttaagaggatggatgaatctggacatttgttccacccgacctctgactgatggtttggaaaataactttaattaggatcatatgaccattgaaaaaggaaaaatgtagactctgacttccgtcccactgaaggattaatgaaaacctttactagcatttagagcttttcagaacatccccactgtcatgtgtctcagcagtggagactgcaagtaaggcttttaattttaggaggtttttttttttttttttttttccctaaatggtatggccaaaagtcagagttaaaatatatatagttagattccaacttcctccttcactctaaaaatagaatccaaacccactcttcatatatgcttccagaatggggcttaagtaccaatctctgctttgcaatgggcacaatcttggtcatgtcctgaggctctctaagaaaagagaggatctaggatgggagagctagaaagttgctaactgggaagaacaaggccctgagggcttggtctaccaatctgggaagatttgaaaacaaacttctcgcaactgaaggaaggctgaaggctgctgcaagtcattgagtgactttaggatgagcaaaacattgggccacttcctaatgccctatgtgtatagtaccagaagcaaggtctcagacttaacagacccagctctgttccaaggtgagtctgaaccaatagaaagcaaacatgtgcagatatccaaacaagactgctcatgcaagtcggggctggctacccgtcttaggcagcaacagcagagctccagggagcttattcaatatttactgagacttcgaagacccagcagatgtttaatgaagtcactattttggctcaaaccctccacttctccccctcccctcaaaaagccaacaggtaaacacataaatgaaagaaacccacagaaggggatgggaaataaagaaaattctctcaagacttctccaggcccatgtcactggtcagcgtggtttttatgtgtattaggattgggggatgtgaagaaataagtatccagtactttataaccaaagcaattaaatgatattgggtagggaatgttggccagttttgtttagttttgcatcacattgtcaccagactcactagcccaagtaatcgggcgcccgaagagggagacagagatgtgcagagttgaccagtgtgcggatgataactactgacgaaagagtcatcgactcagttagtggttggatgtagtcacattagtttgcctctccccatctttgtctccctggcaaggagaatatgcgggacatgatgctaagagtcctgggtaaatgtggtgagaatgcacgcgtgcatatgctacacatatgtgcttctcagttgcagaaaatgaactgctttgggagattatcagtagaaagagtgttatcatattggtgctgagtgctatgtgtgcttatacaatttgttcttgtattttaataaactttgaataaaagaataaa

SEQ ID NO: 8078 - DNA, 915 bp, Homo sapiens
  source 1..915: mol_type = unassigned DNA
atgcctcgccaggccacgtcgcggttggtggtcggagagggcgaggggtcccagggggcttcggggcctgcagccaccatgctccgctccctgctgcttcactccttgaggctctgcgcccagaccgcctcgtgcctcgtgctcttcccgcgcttcctcggcacggccttcatgctctggcttctcgatttcttgtgtatccgcaagcatttcctgggccgccgccgccgggggcagcccgagcccgaagtggagctcaacagtgaaggcgaggaggtgcctcccgatgacccgcccatctgcgtgtccgacgacaaccgcctgtgcaccctggcgtcgctcaaggcggtgtggcatggccagaagttggatttcttcaagcaggcgcacgagggcggtccggcgcccaactccgaggtggttctgcccgacggcttccagagccagcacatcctcgactacgcgcaagggaaccgcccgctggttctcaatttcggcagctgcacctgaccaccgttcatggcgcgcatgagcgccttccagcgcctggtcactaagtaccagcgcgacgtcgacttcctcatcatctacatcgaggaagcgcacccctccgacggctgggtcaccacggactctccctacatcatcccacagcaccggagcctggaggaccgggtcagcgcagcgagggtactgcagcaaggtgcacccggctgcgctctggtcctcgacaccatggccaactccagcagctcggcctatggcgcctacttcgagcgtctctatgtcatccagagtggcactattatgtaccagggcggccgtggccccgacggctaccaggtctctgagctgcgcacttggttggaacgctatgatgagcaactgcacggcgctcggccccggagggtgtaa

SEQ ID NO: 8079 - DNA, 1441 bp, Homo sapiens
  source 1..1441: mol_type = unassigned DNA
attttgaaaatcttgttgattctggggagccgagcgcgcggcgcgagcgtcacgccagacagcggcccgcgcgccttctcctcggcgtcggccgccgccgcctcccagaacctcctcgtgccctcgcgtgccaggcccgcggcggccgaaatccgcggttcacagcatgtccgcctcggcccctgctgcggagggggagggaacccccacccagcccgcgtccgagaaagaacccgaaatgcccggtcccagagaggagagcgaggaggaagaggacgaggacgacgaggaggaggaggaggaggaaaaaggaaaggggcagaaactttgtgaaattgagaggatacatttttttctaagtaagaagaaaaccgatgaacttagaaatctacacaaactgctttacaacaggccaggcactgtgtcctcattaaagaagaatgtgggtcagttcagtggctttccatttgaaaaaggaagtgtccaatataaaaagaaggaagaaatgttgaaaaaatttagaaatgccatgttaaagagcatctgtgaggttcttgatttggagagatcaggtgtaaatagtgaactagtgaagaggatcttgaatttcttaatgcatccaaagccttctggcaaaccattgccgaaatctaaaaaaacttgtagcaaaggcagtaaaaaggaacggaacagttctggaatggcaaggaaggctaagcgaaccaaatgtcctgaaattctgtcagatgaatctagtagtgatgaagatgaaaagaaaaacaaggaagagtcttcagatgatgaagataaagaaagtgaagaggagccaccaaaaaagacagccaaaagagaaaaacctaaacagaaagctacttctaaaagtaaaaaatctgtgaaaagtgccaatgttaagaaagcagatagcagcaccaccaagaagaatcaaaacagttccaaaaaagaaagtgagtctgaggatagttcagatgatgaacctttaattaaaaagttgaagaaaccccctacagatgaagagttaaaggaaacaataaagaaattactggccagtgctaacttggaagaagtcacaatgaaacagatttgcaaaaaggtctatgaaaattatcctacttatgatttaactgaaagaaaagatttcataaaaacaactgtaaaagagctaatttcttgagatagaggacagagaagatgactcgttcccatagatttgaagatctgatttataccattataccagcaaagagaatgtatttccttttctaaatccttgttaagcaacgttagtagaacttactgctgacctttttatcttgagtgttatgtgaatttgagtttgctgttttaaattgcatttctatgccatttttagtttaaaatcttgcatggcattaattgttccttgcttttatagttgtatttt

SEQ ID NO: 8080 - DNA, 3427 bp, Homo sapiens
  source 1..3427: mol_type = unassigned DNA
tccgcgctgccaggccgcctcgcctcccgctcccgcccgccccgcgggacacagcccgcccgcactccggggcccgagcgccgaccacactccaggcgcagccggggagagccccgcgcgcgcatccctccgcccgcggccgaggcgacccctcgcggtcccgcccgcccgagcttcccgcggaggcacccggccgccccgcctcccccgccccgcgcccgccaactcccagctcgcggccctgattggtcgccgcattcccgctctccttcccgaaccgccattttgaaaatcttgttgattctggggagccgagcgcgcggcgcgagcgtcacgccagacagcggcccgcgcgccttctcctcggcgtcggccgccgccgcctcccagaacctcctcgtgccctcgcgtgccaggcccgcggcggccgaaatccgcggttcacagcatgtccgcctcggcccctgctgcggagggggagggaacccccacccagcccgcgtccgagaaagaacccgaaatgcccggtcccagagaggagagcgaggaggaagaggacgaggacgacgaggaggaggaggaggaggaaaaagaaaagagtctcatcgtggaaggcaagagggaaaagaaaaaagtagagaggttgacaatgcaagtctcttccttacagagagagccatttacaattgcacaaggaaaggggcagaaactttgtgaaattgagaggatacatttttttctaagtaagaagaaaaccgatgaacttagaaatctacacaaactgctttacaacaggccaggcactgtgtcctcattaaagaagaatgtgggtcagttcagtggctttccatttgaaaaaggaagtgtccaatataaaaagaaggaagaaatgttgaaaaaatttagaaatgccatgttaaagagcatctgtgaggttcttgatttggagagatcaggtgtaaatagtgaactagtgaagaggatcttgaatttcttaatgcatccaaagccttctggcaaaccattgccgaaatctaaaaaaacttgtagcaaaggcagtaaaaaggaacggaacagttctggaatggcaaggaaggctaagcgaaccaaatgtcctgaaattctgtcagatgaatctagtagtgatgaagatgaaaagaaaaacaaggaagagtcttcagatgatgaagataaagaaagtgaagaggagccaccaaaaaagacagccaaaagagaaaaacctaaacagaaagctacttctaaaagtaaaaaatctgtgaaaagtgccaatgttaagaaagcagatagcagcaccaccaagaagaatcaaaacagttccaaaaaagaaagtgagtctgaggatagttcagatgatgaacctttaattaaaaagttgaagaaaccccctacagatgaagagttaaaggaaacaataaagaaattactggccagtgctaacttggaagaagtcacaatgaaacagatttgcaaaaaggtctatgaaaattatcctacttatgatttaactgaaagaaaagatttcataaaaacaactgtaaaagagctaatttcttgagatagaggacagagaagatgactcgttcccatagatttgaagatctgatttataccattataccagcaaagagaatgtatttccttttctaaatccttgttaagcaacgttagtagaacttactgctgacctttttatcttgagtgttatgtgaatttgagtttgctgttttaaattgcatttctatgccatttttagtttaaaatcttgcatggcattaattgttccttgcttttatagttgtattttgtacattttggatttctttatataaggtcatagattcttgagctgttgtggtttttagtgcacttaatattagcttgcttaaggcatacttttaatcaagtagaacaaaaactattatcaccaggatttatacatacagagattgtagtatttagtatatgaaatattttgaatacacatctctgtcagtgtgaaaattcagcggcagtgtgtccatcatattaaaaatatacaagctacagttgtccagatcactgaattggaacttttctcctgcatgtgtatatatgtcaaattgtcagcatgacaaaagtgacagatgttatttttgtatttttaaaaaacaattggttgtatataaagtttttttatttcttttgtgcagatcactttttaaactcacataggtaggtatctttatagttgtagactatggaatgtcagtgttcagccaaacagtatgatggaacagtgaaagtcaattcagtgatggcaacactgaaggaacagttaccctgctttgcctcgaaagtgtcatcaatttgtaattttagtattaactctgtaaaagtgtctgtaggtacgttttatattatataaggacagaccaaaaatcaacctatcaaagcttcaaaaactttgggaaagggtgggattaagtacaagcacatttggcttacagtaaatgaactgatttttattaactgcttttgcccatataaaatgctgatatttactggaaacctagccagcttcacgattatgactaaagtaccagattataatgccagaatataatgtgcaggcaatcgtggatgtctctgacaaagtgtgtctcaaaaataatatacttttacattaaagaaatttaatgtttctctggagttggggctcttggctttcagagtttggttaatcagtgttgattctagatgatcaacataatggaccactcctgaatgagacttaattttgtctttcaaatttactgtcttaaatcagtttattaaatctgaattttaaaacatgctgtttatgacacaatgacacatttgttgcaccaattaagtgttgaaaaatatctttgcatcatagaacagaaatatataaaaatatatgttgaatgttaacaggtattttcacaggtttgtttcttgatagttactcagacactagggaaaggtaaatacaagtgaacaaaataagcaactaaatgagacctaataattggccttcgattttaaatatttgttcttataaaccttgtcaataaaaataaatctaaatcactggtgttttaagtcacttgcatttgatatcttataggtgtatatagcatttccttatggggaataattctgaaaagggatttttaaattgattcagccctataacctatacaatttggaatactcttttgtggtaatggaccattttcttggagtgacttcacaaaactgaataattaaggttaattttatgaccatttgctataaagaaggtaagtagtcatgcatagagtatttggaagtgaggaaatggagttgttctgtatgaaagttcttgatgagtacgcacacttattaaatggatgtatcacca

SEQ ID NO: 8081 - DNA, 3195 bp, Homo sapiens
  source 1..3195: mol_type = unassigned DNA
agtcggcctgcgctcctcagcctggcggttctacctccgagggttcgcccgcccttggttttccttacaccttagcctttggctcctttgaccactcgaagccccacagcgtgttccagcggacttcaccagcagacccagaagtggtgggtgaaacactgcctctgttcctccttgagcctgtcgggagctgctgcctgccaccaccatgtctgctgcaaatcctgagactccaaactcaaccatctccagagaggccagcacccagtcttcatcagctgcagctagccaaggctgggtgttaccagaaggcaaaatcgtgccaaacactgtttttgttggtggaattgatgctaggatggatgaaactgagattggaagctgctttggtagatacggttcagtgaaagaagtgaagataatcacgaatcgaactggtgtgtccaaaggctatggatttgtttcgtttgttaatgacgtggatgtccagaagatagtaggatcacagatacatttccatggtaaaaagctgaagctgggccctgcaatcaggaaacaaaagttatgtgctcgtcatgtgcagccacgtcctttggtagttaatcctcctcctccaccacagtttcagaacgtctggcggaatccaaacactgaaacctacctgcagccccaaatcacgccgaatcctgtaactcagcacgttcaggcttattctgcttatccacattcaccaggtcaggtcatcactggatgtcagttgcttgtatataattatcaggaatatcctacttatcccgattcagcatttcaggtcaccactggatatcagttgcctgtatataattatcagccatttcctgcttatccaagttcaccatttcaggtcactgctggatatcagttgcctgtatataattatcaggcatttcctgcttatccaagttcaccatttcaggtcaccactggatatcagttgcctgtatataattatcaggcatttcctgcttatccaagttcaccatttcaggtcaccactggatatcagttgcctgtatataattatcaggcatttcctgcttatccaagttcaccatttcaggtcaccactggatatcagttgcctgtatataattatcaggcatttcctgcttatccaaattcagcagttcaggtcaccactggatatcagttccatgtatacaattaccagatgccaccgcagtgccctgttggggagcaaaggagaaatctgtggaccgaagcatacaaatggtggtatcttgtctgtttaatccagagaagagactgataaattccgttgttactcaagatgactgcttcaagggtaaaagagtgcatcgctttagaagaagtttggcagtatttaaatctgttggatcctctcagctatctagtttcatgggaagttgctggttttgaatattaagctaaaagttttccactattacagaaattctgaattttggtaaatcacactgaaactttctgtataacttgtattattagactctctagttttatcttaacactgaaactgttcttcattagatgtttatttagaacctggttctgtgtttaatatatagtttaaagtaacaaataatcgagactgaaagaatgttaagatttatctgcaaggatttttaaaaaattgaaacttgcattttaagtgtttaaaagcaaatactgactttcaaaaaagtttttaaaacctgatttgaaagctaacaattttgatagtctgaacacaagcatttcacttctccaagaagtacctgtgaacagtacaatatttcagtattgagctttgcatttatgatttatctagaaatttacctcaaaagcagaatttttaaaactgcatttttaatcagtggaactcaatgtatagttagctttattgaagtcttatccaaacccagtaaaacagattctaagcaaacagtccaatcagtgagtcataatgtttattcaaagtattttatcttttatctagaatccacatatgtatgtccaatttgattgggatagtagttaggataactaaaattctgggcctaattttttaaagaatccaagacaaactaaactttactgggtatataaccttctcaatgagttaccattcttttttataaaaaaaattgttccttgaaatgctaaacttaatggctgtatgtgaaatttgcaaaatactggtattaaagaacgctgcagcttttttatgtcactcaaaggttaatcggagtatctgaaaggaattgtttttataaaaacattgaagtattagttacttgctataaatagatttttatttttgttttttagcctgttatatttccttctgtaaaataaaatatgtccagaagaggcatgttgtttctagattaggtagtgtcctcattttatattgtgaccacacagctagagcaccagagcccttttgctatactcacagtcttgttttcccagcctcttttactagtctttcaggaggtttgctcttagaactggtgatgtaaagaatggaagtagctgtatgagcagttcaaaggccaagccgtggaatggtagcaatgggatataatacctttctaagggaaacatttgtatcagtatcatttgatctgccatggacatgtgtttaaagtggctttctggcccttctttcaatggcttcttccctaaaacgtggagactctaagttaatgtcgttactatgggccatattactaatgcccactggggtctatgatttctcaaaattttcattcggaatccgaaggatacagtctttaaactttagaattcccaagaaggctttattacacctcagaaattgaaagcaccatgactttgtccattaaaaaattatccatagtttttttagtgcttttaacattccgacatacatcattctgtgattaaatctccagatttctgtaaatgatacctacattctaaagagttaattctaattattccgatatgaccttaaggaaaagtaaaggaataaatttttgtctttgttgaagtatttaatagagtaaggtaaagaagatattaagtccctttcaaaatggaaaattaattctaaactgagaaaaatgttcctactacctattgctgatactgtctttgcataaatgaataaaaataaactttttttcttca

SEQ ID NO: 8082 - DNA, 3756 bp, Homo sapiens
  source 1..3756: mol_type = unassigned DNA
cacgcgccccgatacccggcacaggagccacctcccagagccccgcagtccatgcctcagtcggcctgcgctcctcagcctggcggttctacctccgagggttcgcccgcccttggttttccttacaccttagcctttggctcctttgaccactcgaagccccacagcgtgttccagcggacttcaccagcagacccagaagtggtgggtgaaacactgcctctgttcctccttgagcctgtcgggagctgctgcctgccaccaccatgtctgctgcaaatcctgagactccaaactcaaccatctccagagaggccagcacccagtcttcatcagctgcagctagccaaggctgggtgttaccagaaggcaaaatcgtgccaaacactgtttttgttggtggaattgatgctaggatggatgaaactgagattggaagctgctttggtagatacggttcagtgaaagaagtgaagataatcacgaatcgaactggtgtgtccaaaggctatggatttgtttcgtttgttaatgacgtggatgtccagaagatagtaggatcacagatacatttccatggtaaaaagctgaagctgggccctgcaatcaggaaacaaaagttatgtgctcgtcatgtgcagccacgtcctttggtagttaatcctcctcctccaccacagtttcagaacgtctggcggaatccaaacactgaaacctacctgcagccccaaatcacgccgaatcctgtaactcagcacgttcaggcttattctgcttatccacattcaccaggtcaggtcatcactggatgtcagttgcttgtatataattatcaggaatatcctacttatcccgattcagcatttcaggtcaccactggatatcagttgcctgtatataattatcagccatttcctgcttatccaagatcaccatttcaggtcactgctggatatcagttgcctgtatataattatcaggcatttcctgcttatccaaattcaccatttcaagtcgccactggatatcagttccctgtatacaattatcagccatttcctgcttatccaagttcaccatttcaggtcactgctggatatcagttgcctgtatataattatcaggcatttcctgcttatccaaattcaccatttcaagtcgccactggatatcagttccctgtatacaattatcaggcatttcctgcttatccaaattcaccagttcaggtcaccactggatatcagttgcctgtatacaattatcaggcatttcctgcttatccaagttcaccatttcaggtcaccactggatatcagttgcctgtatataattatcaggcatttcctgcttatccaagttcaccatttcaggtcaccactggatatcagttgcctgtatataattatcaggcatttcctgcttatccaagttcaccatttcaggtcaccactggatatcagttgcctgtatataattatcaggcatttcctgcttatccaagttcaccatttcaggtcaccactggatatcagttgcctgtatataattatcaggcatttcctgcttatccaagttcaccatttcaggtcaccactggatatcagttgcctgtatataattatcaggcatttcctgcttatccaagttcaccatttcaggtcaccactggatatcagttgcctgtatataattatcaggcatttcctgcttatccaaattcagcagttcaggtcaccactggatatcagttccatgtatacaattaccagatgccaccgcagtgccctgttggggagcaaaggagaaatctgtggaccgaagcatacaaatggtggtatcttgtctgtttaatccagagaagagactgataaattccgttgttactcaagatgactgcttcaagggtaaaagagtgcatcgctttagaagaagtttggcagtatttaaatctgttggatcctctcagctatctagtttcatgggaagttgctggttttgaatattaagctaaaagttttccactattacagaaattctgaattttggtaaatcacactgaaactttctgtataacttgtattattagactctctagttttatcttaacactgaaactgttcttcattagatgtttatttagaacctggttctgtgtttaatatatagtttaaagtaacaaataatcgagactgaaagaatgttaagatttatctgcaaggatttttaaaaaattgaaacttgcattttaagtgtttaaaagcaaatactgactttcaaaaaagtttttaaaacctgatttgaaagctaacaattttgatagtctgaacacaagcatttcacttctccaagaagtacctgtgaacagtacaatatttcagtattgagctttgcatttatgatttatctagaaatttacctcaaaagcagaatttttaaaactgcatttttaatcagtggaactcaatgtatagttagctttattgaagtcttatccaaacccagtaaaacagattctaagcaaacagtccaatcagtgagtcataatgtttattcaaagtattttatcttttatctagaatccacatatgtatgtccaatttgattgggatagtagttaggataactaaaattctgggcctaattttttaaagaatccaagacaaactaaactttactgggtatataaccttctcaatgagttaccattcttttttataaaaaaaattgttccttgaaatgctaaacttaatggctgtatgtgaaatttgcaaaatactggtattaaagaacgctgcagcttttttatgtcactcaaaggttaatcggagtatctgaaaggaattgtttttataaaaacattgaagtattagttacttgctataaatagatttttatttttgttttttagcctgttatatttccttctgtaaaataaaatatgtccagaagaggcatgttgtttctagattaggtagtgtcctcattttatattgtgaccacacagctagagcaccagagcccttttgctatactcacagtcttgttttcccagcctcttttactagtctttcaggaggtttgctcttagaactggtgatgtaaagaatggaagtagctgtatgagcagttcaaaggccaagccgtggaatggtagcaatgggatataatacctttctaagggaaacatttgtatcagtatcatttgatctgccatggacatgtgtttaaagtggctttctggcccttctttcaatggcttcttccctaaaacgtggagactctaagttaatgtcgttactatgggccatattactaatgcccactggggtctatgatttctcaaaattttcattcggaatccgaaggatacagtctttaaactttagaattcccaagaaggctttattacacctcagaaattgaaagcaccatgactttgtccattaaaaaattatccatagtttttttagtgcttttaacattccgacatacatcattctgtgattaaatctccagatttctgtaaatgatacctacattctaaagagttaattctaattattccgatatgaccttaaggaaaagtaaaggaataaatttttgtctttgttgaagtatttaatagagtaaggtaaagaagatattaagtccctttcaaaatggaaaattaattctaaactgagaaaaatgttcctactacctattgctgatactgtctttgcataaatgaataaaaataaactttttttcttc

SEQ ID NO: 8083 - DNA, 3914 bp, Homo sapiens
  source 1..3914: mol_type = unassigned DNA
agtcggcctgcgctcctcagcctggcggttctacctccgagggttcgcccgcccttggttttccttacaccttagcctttggctcctttgaccactcgaagccccacagcgtgttccagcggacttcaccagcagacccagaagtggtgggtgaaacactgcctctgttcctccttgagcctgtcgggagctgctgcctgccaccaccatgtctgctgcaaatcctgagactccaaactcaaccatctccagagaggccagcacccagtcttcatcagctgcagctagccaaggctgggtgttaccagaaggcaaaatcgtgccaaacactgtttttgttggtggaattgatgctaggatggatgaaactgagattggaagctgctttggtagatacggttcagtgaaagaagtgaagataatcacgaatcgaactggtgtgtccaaaggctatggatttgtttcgtttgttaatgacgtggatgtccagaagatagtaggatcacagatacatttccatggtaaaaagctgaagctgggccctgcaatcaggaaacaaaagttatgtgctcgtcatgtgcagccacgtcctttggtagttaatcctcctcctccaccacagtttcagaacgtctggcggaatccaaacactgaaacctacctgcagccccaaatcacgccgaatcctgtaactcagcacgttcaggcttattctgcttatccacattcaccaggtcaggtcatcactggatgtcagttgcttgtatataattatcaggaatatcctacttatcccgattcagcatttcaggtcaccactggatatcagttgcctgtatataattatcagccatttcctgcttatccaagatcaccatttcaggtcactgctggatatcagttgcctgtatataattatcaggcatttcctgcttatccaaattcaccatttcaagtcgccactggatatcagttccctgtatacaattatcagccatttcctgcttatccaagttcaccatttcaggtcactgctggatatcagttgcctgtatataattatcaggcatttcctgcttatccaaattcaccatttcaagtcgccactggatatcagttccctgtatacaattatcagccatttcctgcttatccaagttcaccatttcaggtcactgctggatatcagttgcctgtatataattatcaggcatttcctgcttatccaaattcaccatttcaagtcgccactggatatcagttccctgtatacaattatcaggcatttcctgcttatccaaattcaccagttcaggtcaccactggatatcagttgcctgtatacaattatcaggcatttcctgcttatccaaattcaccagttcaggtcaccactggatatcagttgcctgtatacaattatcaggcatttcctgcttatccaagttcaccatttcaggtcaccactggatatcagttgcctgtatataattatcaggcatttcctgcttatccaagttcaccatttcaggtcaccactggatatcagttgcctgtatataattatcaggcatttcctgcttatccaagttcaccatttcaggtcaccactggatatcagttgcctgtatataattatcaggcatttcctgcttatccaagttcaccatttcaggtcaccactggatatcagttgcctgtatataattatcaggcatttcctgcttatccaagttcaccatttcaggtcaccactggatatcagttgcctgtatataattatcaggcatttcctgcttatccaagttcaccatttcaggtcaccactggatatcagttgcctgtatataattatcaggcatttcctgcttatccaaattcagcagttcaggtcaccactggatatcagttccatgtatacaattaccagatgccaccgcagtgccctgttggggagcaaaggagaaatctgtggaccgaagcatacaaatggtggtatcttgtctgtttaatccagagaagagactgataaattccgttgttactcaagatgactgcttcaagggtaaaagagtgcatcgctttagaagaagtttggcagtatttaaatctgttggatcctctcagctatctagtttcatgggaagttgctggttttgaatattaagctaaaagttttccactattacagaaattctgaattttggtaaatcacactgaaactttctgtataacttgtattattagactctctagttttatcttaacactgaaactgttcttcattagatgtttatttagaacctggttctgtgtttaatatatagtttaaagtaacaaataatcgagactgaaagaatgttaagatttatctgcaaggatttttaaaaaattgaaacttgcattttaagtgtttaaaagcaaatactgactttcaaaaaagtttttaaaacctgatttgaaagctaacaattttgatagtctgaacacaagcatttcacttctccaagaagtacctgtgaacagtacaatatttcagtattgagctttgcatttatgatttatctagaaatttacctcaaaagcagaatttttaaaactgcatttttaatcagtggaactcaatgtatagttagctttattgaagtcttatccaaacccagtaaaacagattctaagcaaacagtccaatcagtgagtcataatgtttattcaaagtattttatcttttatctagaatccacatatgtatgtccaatttgattgggatagtagttaggataactaaaattctgggcctaattttttaaagaatccaagacaaactaaactttactgggtatataaccttctcaatgagttaccattcttttttataaaaaaaattgttccttgaaatgctaaacttaatggctgtatgtgaaatttgcaaaatactggtattaaagaacgctgcagcttttttatgtcactcaaaggttaatcggagtatctgaaaggaattgtttttataaaaacattgaagtattagttacttgctataaatagatttttatttttgttttttagcctgttatatttccttctgtaaaataaaatatgtccagaagaggcatgttgtttctagattaggtagtgtcctcattttatattgtgaccacacagctagagcaccagagcccttttgctatactcacagtcttgttttcccagcctcttttactagtctttcaggaggtttgctcttagaactggtgatgtaaagaatggaagtagctgtatgagcagttcaaaggccaagccgtggaatggtagcaatgggatataatacctttctaagggaaacatttgtatcagtatcatttgatctgccatggacatgtgtttaaagtggctttctggcccttctttcaatggcttcttccctaaaacgtggagactctaagttaatgtcgttactatgggccatattactaatgcccactggggtctatgatttctcaaaattttcattcggaatccgaaggatacagtctttaaactttagaattcccaagaaggctttattacacctcagaaattgaaagcaccatgactttgtccattaaaaaattatccatagtttttttagtgcttttaacattccgacatacatcattctgtgattaaatctccagatttctgtaaatgatacctacattctaaagagttaattctaattattccgatatgaccttaaggaaaagtaaaggaataaatttttgtctttgttgaagtatttaatagagtaaggtaaagaagatattaagtccctttcaaaatggaaaattaattctaaactgagaaaaatgttcctactacctattgctgatactgtctttgcataaatgaataaaaataaactttttttcttc

SEQ ID NO: 8084 - DNA, 1891 bp, Homo sapiens
  source 1..1891: mol_type = unassigned DNA
ctggcggttctacctccgagggttcgcccgcccttggttttccttacaccttagcctttggctcctttgaccactcgaagccccacagcgtgttccagcggacttcaccagcagacccagaagtggtgggtgaaacactgcctctgttcctccttgagcctgtcgggagctgctgcctgccaccaccatgtctgctgcaaatcctgagactccaaactcaaccatctccagagaggccagcacccagtcttcatcagctgcagctagccaaggctgggtgttaccagaaggcaaaatcgtgccaaacactgtttttgttggtggaattgatgctaggatggatgaaactgagattggaagctgctttggtagatacggttcagtgaaagaagtgaagataatcacgaatcgaactggtgtgtccaaaggctatggatttgtttcgtttgttaatgacgtggatgtccagaagatagtaggatcacagatacatttccatggtaaaaagctgaagctgggccctgcaatcaggaaacaaaagttatgtgctcgtcatgtgcagccacgtcctttggtagttaatcctcctcctccaccacagtttcagaacgtctggcggaatccaaacactgaaacctacctgcagccccaaatcacgccgaatcctgtaactcagcacgttcaggcttattctgcttatccacattcaccaggtcaggtcatcactggatgtcagttgcttgtatataattatcaggaatatcctacttatcccgattcagcatttcaggtcaccactggatatcagttgcctgtatataattatcagccatttcctgcttatccaagatcaccatttcaggtcactgctggatatcagttgcctgtatataattatcaggcatttcctgcttatccaaattcaccatttcaagtcgccactggatatcagttccctgtatacaattatcagccatttcctgcttatccaagttcaccatttcaggtcactgctggatatcagttgcctgtatataattatcaggcatttcctgcttatccaaattcaccatttcaagtcgccactggatatcagttccctgtatacaattatcagccatttcctgcttatccaagttcaccatttcaggtcactgctggatatcagttgcctgtatataattatcaggcatttcctgcttatccaaattcaccatttcaagtcgccactggatatcagttccctgtatacaattatcaggcatttcctgcttatccaaattcaccagttcaggtcaccactggatatcagttgcctgtatacaattatcaggcatttcctgcttatccaaattcaccatttcaagtcgccactggatatcagttccctgtatacaattatcaggcatttcctgcttatccaaattcaccagttcaggtcaccactggatatcagttgcctgtatacaattatcaggcatttcctgcttatccaaattcagcagttcaggtcaccactggatatcagttccatgtatacaattaccagatgccaccgcagtgccctgttggggagcaaaggagaaatctgtggaccgaagcatacaaatggtggtatcttgtctgtttaatccagagaagagactgataaattccgttgttactcaagatgactgcttcaagggtaaaagagtgcatcgctttagaagaagtttggcagtatttaaatctgttggatcctctcagctatctagtttcatgggaagttgctggttttgaatattaagctaaaagttttccactattacagaaattctgaattttggtaaatcacactgaaactttctgtataacttgtattattagactctctagttttatcttaacactg

SEQ ID NO: 8085 - DNA, 2405 bp, Homo sapiens
  source 1..2405: mol_type = unassigned DNA
ctcagcctggcggttctacctccgagggttcgcccgcccttggttttccttacaccttagcctttggctcctttgaccactcgaagccccacagcgtgttccagcggacttcaccagcagacccagaagtggtgggtgaaacactgcctctgttcctccttgagcctgtcgggagctgctgcctgccaccaccatgtctgctgcaaatcctgagactccaaactcaaccatctccagagaggccagcacccagtcttcatcagctgcagctagccaaggctgggtgttaccagaaggcaaaatcgtgccaaacactgtttttgttggtggaattgatgctaggatggatgaaactgagattggaagctgctttggtagatacggttcagtgaaagaagtgaagataatcacgaatcgaactggtgtgtccaaaggctatggatttgtttcgtttgttaatgacgtggatgtccagaagatagtaggatcacagatacatttccatggtaaaaagctgaagctgggccctgcaatcaggaaacaaaagttatgtgctcgtcatgtgcagccacgtcctttggtagttaatcctcctcctccaccacagtttcagaacgtctggcggaatccaaacactgaaacctacctgcagccccaaatcacgccgaatcctgtaactcagcacgttcaggcttattctgcttatccacattcaccaggtcaggtcatcactggatgtcagttgcttgtatataattatcaggaatatcctacttatcccgattcagcatttcaggtcaccactggatatcagttgcctgtatataattatcagccatttcctgcttatccaagatcaccatttcaggtcactgctggatatcagttgcctgtatataattatcaggcatttcctgcttatccaaattcaccatttcaagtcgccactggatatcagttccctgtatacaattatcagccatttcctgcttatccaagttcaccatttcaggtcactgctggatatcagttgcctgtatataattatcaggcatttcctgcttatccaaattcaccatttcaagtcgccactggatatcagttccctgtatacaattatcaggcatttcctgcttatccaaattcaccagttcaggtcaccactggatatcagttgcctgtatacaattatcaggcatttcctgcttatccaaattcaccagttcaggtcaccactggatatcagttgcctgtatacaattatcaggcatttcctgcttatccaagttcaccatttcaggtcaccactggatatcagttgcctgtatataattatcaggcatttcctgcttatccaagttcaccatttcaggtcaccactggatatcagttgcctgtatataattatcaggcatttcctgcttatccaagttcaccatttcaggtcaccactggatatcagttgcctgtatataattatcaggcatttcctgcttatccaagttcaccatttcaggtcaccactggatatcagttgcctgtatataattatcaggcatttcctgcttatccaagttcaccatttcaggtcaccactggatatcagttgcctgtatataattatcaggcatttcctgcttatccaagttcaccatttcaggtcaccactggatatcagttgcctgtatataattatcaggcatttcctgcttatccaaattcagcagttcaggtcaccactggatatcagttccatgtatacaattaccagatgccaccgcagtgccctgttggggagcaaaggagaaatctgtggaccgaagcatacaaatggtggtatcttgtctgtttaatccagagaagagactgataaattccgttgttactcaagatgactgcttcaagggtaaaagagtgcatcgctttagaagaagtttggcagtatttaaatctgttggatcctctcagctatctagtttcatgggaagttgctggttttgaatattaagctaaaagttttccactattacagaaattctgaattttggtaaatcacactgaaactttctgtataacttgtattattagactctctagttttatcttaacactgaaactgttcttcattagatgtttatttagaacctggttctgtgtttaatatatagtttaaagtaacaaataatcgagactgaaagaatgttaagatttatctgcaaggatttttaaaaaattgaaacttgcattttaagtgtttaaaagcaaatactgactttcaaaaaagtttttaaaacctgatttgaaagctaacaattttgatagtctgaacacaagcatttcacttctccaagaagtacctgtgaacagtacaatatttcagtattgagctttgcatttatgattta

SEQ ID NO: 8086 - DNA, 1352 bp, Homo sapiens
  source 1..1352: mol_type = unassigned DNA
cacgcgccccgatacccggcacaggagccacctcccagagccccgcagtccatgcctcagtcggcctgcgctcctcagcctggcggttctacctccgagggttcgcccgcccttggttttccttacaccttagcctttggctcctttgaccactcgaagccccacagcgtgttccagcggacttcaccagcagacccagaagtggtgggtgaaacactgcctctgttcctccttgagcctgtcgggagctgctgcctgccaccaccatgtctgctgcaaatcctgagactccaaactcaaccatctccagagaggccagcacccagtcttcatcagctgcagctagccaaggctgggtgttaccagaaggcaaaatcgtgccaaacactgtttttgttggtggaattgatgctaggatggatgaaactgagattggaagctgctttggtagatacggttcagtgaaagaagtgaagataatcacgaatcgaactggtgtgtccaaaggctatggatttgtttcgtttgttaatgacgtggatgtccagaagatagtaggatcacagatacatttccatggtaaaaagctgaagctgggccctgcaatcaggaaacaaaagttatgtgctcgtcatgtgcagccacgtcctttggtagttaatcctcctcctccaccacagtttcagaacgtctggcggaatccaaacactgaaacctacctgcagccccaaatcacgccgaatcctgtaactcagcacgttcaggcttattctgcttatccacattcaccaggtcaggtcatcactggatgtcagttgcttgtatataattatcaggaatatcctacttatcccgattcagcatttcaggtcaccactggatatcagttgcctgtatataattatcagccatttcctgcttatccaagatcaccatttcaggtcactgctggatatcagttgcctgtatataattatcaggcatttcctgcttatccaaattcaccatttcaagtcgccactggatatcagttccctgtatacaattatcagccatttcctgcttatccaagttcaccatttcaggtcactgctggatatcagttgcctgtatataattatcaggcatttcctgcttatccaaattcaccatttcaagtcgccactggatatcagttccctgtatacaattatcaggcatttcctgcttatccaaattcaccatttcaagtcgccactggatatcagttccctgtatacaattatcaggcatttcctgcttatccaaattcaccagttcaggtcaccactggatatcagttgcctgtatacaattatcagatgccaccttag

SEQ ID NO: 8087 - DNA, 4119 bp, Homo sapiens
  source 1..4119: mol_type = unassigned DNA
cacgcgccccgatacccggcacaggagccacctcccagagccccgcagtccatgcctcagtcggcctgcgctcctcagcctggcggttctacctccgagggttcgcccgcccttggttttccttacaccttagcctttggctcctttgaccactcgaagccccacagcgtgttccagcggacttcaccagcagacccagaagtggtgggtgaaacactgcctctgttcctccttgagcctgtcgggagctgctgcctgccaccaccatgtctgctgcaaatcctgagactccaaactcaaccatctccagagaggccagcacccagtcttcatcagctgcagctagccaaggctgggtgttaccagaaggcaaaatcgtgccaaacactgtttttgttggtggaattgatgctaggatggatgaaactgagattggaagctgctttggtagatacggttcagtgaaagaagtgaagataatcacgaatcgaactggtgtgtccaaaggctatggatttgtttcgtttgttaatgacgtggatgtccagaagatagtaggatcacagatacatttccatggtaaaaagctgaagctgggccctgcaatcaggaaacaaaagttatgtgctcgtcatgtgcagccacgtcctttggtagttaatcctcctcctccaccacagtttcagaacgtctggcggaatccaaacactgaaacctacctgcagccccaaatcacgccgaatcctgtaactcagcacgttcaggcttattctgcttatccacattcaccaggtcaggtcatcactggatgtcagttgcttgtatataattatcaggaatatcctacttatcccgattcagcatttcaggtcaccactggatatcagttgcctgtatataattatcagccatttcctgcttatccaagatcaccatttcaggtcactgctggatatcagttgcctgtatataattatcaggcatttcctgcttatccaaattcaccatttcaagtcgccactggatatcagttccctgtatacaattatcagccatttcctgcttatccaagttcaccatttcaggtcactgctggatatcagttgcctgtatataattatcaggcatttcctgcttatccaaattcaccatttcaagtcgccactggatatcagttccctgtatacaattatcagccatttcctgcttatccaagttcaccatttcaggtcactgctggatatcagttgcctgtatataattatcaggcatttcctgcttatccaaattcaccatttcaagtcgccactggatatcagttccctgtatacaattatcaggcatttcctgcttatccaaattcaccagttcaggtcaccactggatatcagttgcctgtatacaattatcagccatttcctgcttatccaagatcaccatttcaggtcactgctggatatcagttgcctgtatataattatcaggcatttcctgcttatccaaattcaccatttcaagtcgccactggatatcagttccctgtatacaattatcaggcatttcctgcttatccaaattcaccagttcaggtcaccactggatatcagttgcctgtatacaattatcaggcatttcctgcttatccaagttcaccatttcaggtcaccactggatatcagttgcctgtatataattatcaggcatttcctgcttatccaagttcaccatttcaggtcaccactggatatcagttgcctgtatataattatcaggcatttcctgcttatccaagttcaccatttcaggtcaccactggatatcagttgcctgtatataattatcaggcatttcctgcttatccaagttcaccatttcaggtcaccactggatatcagttgcctgtatataattatcaggcatttcctgcttatccaagttcaccatttcaggtcaccactggatatcagttgcctgtatataattatcaggcatttcctgcttatccaagttcaccatttcaggtcaccactggatatcagttgcctgtatataattatcaggcatttcctgcttatccaaattcagcagttcaggtcaccactggatatcagttccatgtatacaattaccagatgccaccgcagtgccctgttggggagcaaaggagaaatctgtggaccgaagcatacaaatggtggtatcttgtctgtttaatccagagaagagactgataaattccgttgttactcaagatgactgcttcaagggtaaaagagtgcatcgctttagaagaagtttggcagtatttaaatctgttggatcctctcagctatctagtttcatgggaagttgctggttttgaatattaagctaaaagttttccactattacagaaattctgaattttggtaaatcacactgaaactttctgtataacttgtattattagactctctagttttatcttaacactgaaactgttcttcattagatgtttatttagaacctggttctgtgtttaatatatagtttaaagtaacaaataatcgagactgaaagaatgttaagatttatctgcaaggatttttaaaaaattgaaacttgcattttaagtgtttaaaagcaaatactgactttcaaaaaagtttttaaaacctgatttgaaagctaacaattttgatagtctgaacacaagcatttcacttctccaagaagtacctgtgaacagtacaatatttcagtattgagctttgcatttatgatttatctagaaatttacctcaaaagcagaatttttaaaactgcatttttaatcagtggaactcaatgtatagttagctttattgaagtcttatccaaacccagtaaaacagattctaagcaaacagtccaatcagtgagtcataatgtttattcaaagtattttatcttttatctagaatccacatatgtatgtccaatttgattgggatagtagttaggataactaaaattctgggcctaattttttaaagaatccaagacaaactaaactttactgggtatataaccttctcaatgagttaccattcttttttataaaaaaaattgttccttgaaatgctaaacttaatggctgtatgtgaaatttgcaaaatactggtattaaagaacgctgcagcttttttatgtcactcaaaggttaatcggagtatctgaaaggaattgtttttataaaaacattgaagtattagttacttgctataaatagatttttatttttgttttttagcctgttatatttccttctgtaaaataaaatatgtccagaagaggcatgttgtttctagattaggtagtgtcctcattttatattgtgaccacacagctagagcaccagagcccttttgctatactcacagtcttgttttcccagcctcttttactagtctttcaggaggtttgctcttagaactggtgatgtaaagaatggaagtagctgtatgagcagttcaaaggccaagccgtggaatggtagcaatgggatataatacctttctaagggaaacatttgtatcagtatcatttgatctgccatggacatgtgtttaaagtggctttctggcccttctttcaatggcttcttccctaaaacgtggagactctaagttaatgtcgttactatgggccatattactaatgcccactggggtctatgatttctcaaaattttcattcggaatccgaaggatacagtctttaaactttagaattcccaagaaggctttattacacctcagaaattgaaagcaccatgactttgtccattaaaaaattatccatagtttttttagtgcttttaacattccgacatacatcattctgtgattaaatctccagatttctgtaaatgatacctacattctaaagagttaattctaattattccgatatgaccttaaggaaaagtaaaggaataaatttttgtctttgttgaagtatttaatagagtaaggtaaagaagatattaagtccctttcaaaatggaaaattaattctaaactgagaaaaatgttcctactacctattgctgatactgtctttgcataaatgaataaaaataaactttttttcttcaaa

SEQ ID NO: 8088 - DNA, 3791 bp, Homo sapiens
  source 1..3791: mol_type = unassigned DNA
gctgccacccattggctcaggccgataccacgcgccccgatacccggcacaggagccacctcccagagccccgcagtccatgcctcagtcggcctgcgctcctcagcctggcggttctacctccgagggttcgcccgcccttggttttccttacaccttagcctttggctcctttgaccactcgaagccccacagcgtgttccagcggacttcaccagcagacccagaagtggtgggtgaaacactgcctctgttcctccttgagcctgtcgggagctgctgcctgccaccaccatgtctgctgcaaatcctgagactccaaactcaaccatctccagagaggccagcacccagtcttcatcagctgcagctagccaaggctgggtgttaccagaaggcaaaatcgtgccaaacactgtttttgttggtggaattgatgctaggatggatgaaactgagattggaagctgctttggtagatacggttcagtgaaagaagtgaagataatcacgaatcgaactggtgtgtccaaaggctatggatttgtttcgtttgttaatgacgtggatgtccagaagatagtaggatcacagatacatttccatggtaaaaagctgaagctgggccctgcaatcaggaaacaaaagttatgtgctcgtcatgtgcagccacgtcctttggtagttaatcctcctcctccaccacagtttcagaacgtctggcggaatccaaacactgaaacctacctgcagccccaaatcacgccgaatcctgtaactcagcacgttcaggcttattctgcttatccacattcaccaggtcaggtcatcactggatgtcagttgcttgtatataattatcaggaatatcctacttatcccgattcagcatttcaggtcaccactggatatcagttgcctgtatataattatcagccatttcctgcttatccaagatcaccatttcaggtcactgctggatatcagttgcctgtatataattatcaggcatttcctgcttatccaaattcaccatttcaagtcgccactggatatcagttccctgtatacaattatcagccatttcctgcttatccaagttcaccatttcaggtcactgctggatatcagttgcctgtatataattatcaggcatttcctgcttatccaaattcaccatttcaagtcgccactggatatcagttccctgtatacaattatcaggcatttcctgcttatccaaattcaccagttcaggtcaccactggatatcagttgcctgtatacaattatcaggcatttcctgcttatccaagttcaccatttcaggtcaccactggatatcagttgcctgtatataattatcaggcatttcctgcttatccaagttcaccatttcaggtcaccactggatatcagttgcctgtatataattatcaggcatttcctgcttatccaagttcaccatttcaggtcaccactggatatcagttgcctgtatataattatcaggcatttcctgcttatccaagttcaccatttcaggtcaccactggatatcagttgcctgtatataattatcaggcatttcctgcttatccaagttcaccatttcaggtcaccactggatatcagttgcctgtatataattatcaggcatttcctgcttatccaagttcaccatttcaggtcaccactggatatcagttgcctgtatataattatcaggcatttcctgcttatccaaattcagcagttcaggtcaccactggatatcagttccatgtatacaattaccagatgccaccgcagtgccctgttggggagcaaaggagaaatctgtggaccgaagcatacaaatggtggtatcttgtctgtttaatccagagaagagactgataaattccgttgttactcaagatgactgcttcaagggtaaaagagtgcatcgctttagaagaagtttggcagtatttaaatctgttggatcctctcagctatctagtttcatgggaagttgctggttttgaatattaagctaaaagttttccactattacagaaattctgaattttggtaaatcacactgaaactttctgtataacttgtattattagactctctagttttatcttaacactgaaactgttcttcattagatgtttatttagaacctggttctgtgtttaatatatagtttaaagtaacaaataatcgagactgaaagaatgttaagatttatctgcaaggatttttaaaaaattgaaacttgcattttaagtgtttaaaagcaaatactgactttcaaaaaagtttttaaaacctgatttgaaagctaacaattttgatagtctgaacacaagcatttcacttctccaagaagtacctgtgaacagtacaatatttcagtattgagctttgcatttatgatttatctagaaatttacctcaaaagcagaatttttaaaactgcatttttaatcagtggaactcaatgtatagttagctttattgaagtcttatccaaacccagtaaaacagattctaagcaaacagtccaatcagtgagtcataatgtttattcaaagtattttatcttttatctagaatccacatatgtatgtccaatttgattgggatagtagttaggataactaaaattctgggcctaattttttaaagaatccaagacaaactaaactttactgggtatataaccttctcaatgagttaccattcttttttataaaaaaaattgttccttgaaatgctaaacttaatggctgtatgtgaaatttgcaaaatactggtattaaagaacgctgcagcttttttatgtcactcaaaggttaatcggagtatctgaaaggaattgtttttataaaaacattgaagtattagttacttgctataaatagatttttatttttgttttttagcctgttatatttccttctgtaaaataaaatatgtccagaagaggcatgttgtttctagattaggtagtgtcctcattttatattgtgaccacacagctagagcaccagagcccttttgctatactcacagtcttgttttcccagcctcttttactagtctttcaggaggtttgctcttagaactggtgatgtaaagaatggaagtagctgtatgagcagttcaaaggccaagccgtggaatggtagcaatgggatataatacctttctaagggaaacatttgtatcagtatcatttgatctgccatggacatgtgtttaaagtggctttctggcccttctttcaatggcttcttccctaaaacgtggagactctaagttaatgtcgttactatgggccatattactaatgcccactggggtctatgatttctcaaaattttcattcggaatccgaaggatacagtctttaaactttagaattcccaagaaggctttattacacctcagaaattgaaagcaccatgactttgtccattaaaaaattatccatagtttttttagtgcttttaacattccgacatacatcattctgtgattaaatctccagatttctgtaaatgatacctacattctaaagagttaattctaattattccgatatgaccttaaggaaaagtaaaggaataaatttttgtctttgttgaagtatttaatagagtaaggtaaagaagatattaagtccctttcaaaatggaaaattaattctaaactgagaaaaatgttcctactacctattgctgatactgtctttgcataaatgaataaaaataaactttttttcttcaaatgtg

SEQ ID NO: 8089 - DNA, 3390 bp, Homo sapiens
  source 1..3390: mol_type = unassigned DNA
ctggcggttctacctccgagggttcgcccgcccttggttttccttacaccttagcctttggctcctttgaccactcgaagccccacagcgtgttccagcggacttcaccagcagacccagaagtggtgggtgaaacactgcctctgttcctccttgagcctgtcgggagctgctgcctgccaccaccatgtctgctgcaaatcctgagactccaaactcaaccatctccagagaggccagcacccagtcttcatcagctgcagctagccaaggctgggtgttaccagaaggcaaaatcgtgccaaacactgtttttgttggtggaattgatgctaggatggatgaaactgagattggaagctgctttggtagatacggttcagtgaaagaagtgaagataatcacgaatcgaactggtgtgtccaaaggctatggatttgtttcgtttgttaatgacgtggatgtccagaagatagtaggatcacagatacatttccatggtaaaaagctgaagctgggccctgcaatcaggaaacaaaagttatgtgctcgtcatgtgcagccacgtcctttggtagttaatcctcctcctccaccacagtttcagaacgtctggcggaatccaaacactgaaacctacctgcagccccaaatcacgccgaatcctgtaactcagcacgttcaggcttattctgcttatccacattcaccaggtcaggtcatcactggatgtcagttgcttgtatataattatcaggaatatcctacttatcccgattcagcatttcaggtcaccactggatatcagttgcctgtatataattatcagccatttcctgcttatccaagatcaccatttcaggtcactgctggatatcagttgcctgtatataattatcaggcatttcctgcttatccaaattcaccatttcaagtcgccactggatatcagttccctgtatacaattatcaggcatttcctgcttatccaaattcaccatttcaagtcgccactggatatcagttccctgtatacaattatcaggcatttcctgcttatccaaattcaccatttcaagtcgccactggatatcagttccctgtatacaattatcaggcatttcctgcttatccaaattcaccagttcaggtcaccactggatatcagttgcctgtatacaattatcaggcatttcctgcttatccaaattcaccatttcaagtcgccactggatatcagttccctgtatacaattatcaggcatttcctgcttatccaaattcaccagttcaggtcaccactggatatcagttgcctgtatacaattatcaggcatttcctgcttatccaaattcagcagttcaggtcaccactggatatcagttccatgtatacaattaccagatgccaccgcagtgccctgttggggagcaaaggagaaatctgtggaccgaagcatacaaatggtggtatcttgtctgtttaatccagagaagagactgataaattccgttgttactcaagatgactgcttcaagggtaaaagagtgcatcgctttagaagaagtttggcagtatttaaatctgttggatcctctcagctatctagtttcatgggaagttgctggttttgaatattaagctaaaagttttccactattacagaaattctgaattttggtaaatcacactgaaactttctgtataacttgtattattagactctctagttttatcttaacactgaaactgttcttcattagatgtttatttagaacctggttctgtgtttaatatatagtttaaagtaacaaataatcgagactgaaagaatgttaagatttatctgcaaggatttttaaaaaattgaaacttgcattttaagtgtttaaaagcaaatactgactttcaaaaaagtttttaaaacctgatttgaaagctaacaattttgatagtctgaacacaagcatttcacttctccaagaagtacctgtgaacagtacaatatttcagtattgagctttgcatttatgatttatctagaaatttacctcaaaagcagaatttttaaaactgcatttttaatcagtggaactcaatgtatagttagctttattgaagtcttatccaaacccagtaaaacagattctaagcaaacagtccaatcagtgagtcataatgtttattcaaagtattttatcttttatctagaatccacatatgtatgtccaatttgattgggatagtagttaggataactaaaattctgggcctaattttttaaagaatccaagacaaactaaactttactgggtatataaccttctcaatgagttaccattcttttttataaaaaaaattgttccttgaaatgctaaacttaatggctgtatgtgaaatttgcaaaatactggtattaaagaacgctgcagcttttttatgtcactcaaaggttaatcggagtatctgaaaggaattgtttttataaaaacattgaagtattagttacttgctataaatagatttttatttttgttttttagcctgttatatttccttctgtaaaataaaatatgtccagaagaggcatgttgtttctagattaggtagtgtcctcattttatattgtgaccacacagctagagcaccagagcccttttgctatactcacagtcttgttttcccagcctcttttactagtctttcaggaggtttgctcttagaactggtgatgtaaagaatggaagtagctgtatgagcagttcaaaggccaagccgtggaatggtagcaatgggatataatacctttctaagggaaacatttgtatcagtatcatttgatctgccatggacatgtgtttaaagtggctttctggcccttctttcaatggcttcttccctaaaacgtggagactctaagttaatgtcgttactatgggccatattactaatgcccactggggtctatgatttctcaaaattttcattcggaatccgaaggatacagtctttaaactttagaattcccaagaaggctttattacacctcagaaattgaaagcaccatgactttgtccattaaaaaattatccatagtttttttagtgcttttaacattccgacatacatcattctgtgattaaatctccagatttctgtaaatgatacctacattctaaagagttaattctaattattccgatatgaccttaaggaaaagtaaaggaataaatttttgtctttgttgaagtatttaatagagtaaggtaaagaagatattaagtccctttcaaaatggaaaattaattctaaactgagaaaaatgttcctactacctattgctgatactgtctttgcataaatgaataaaaataaactttttttcttca

SEQ ID NO: 8090 - DNA, 3271 bp, Homo sapiens
  source 1..3271: mol_type = unassigned DNA
tcagtcggcctgcgctcctcagcctggcggttctacctccgagggttcgcccgcccttggttttccttacaccttagcctttggctcctttgaccactcgaagccccacagcgtgttccagcggacttcaccagcagacccagaagtggtgggtgaaacactgcctctgttcctccttgagcctgtcgggagctgctgcctgccaccaccatgtctgctgcaaatcctgagactccaaactcaaccatctccagagaggccagcacccagtcttcatcagctgcagctagccaaggctgggtgttaccagaaggcaaaatcgtgccaaacactgtttttgttggtggaattgatgctaggatggatgaaactgagattggaagctgctttggtagatacggttcagtgaaagaagtgaagataatcacgaatcgaactggtgtgtccaaaggctatggatttgtttcgtttgttaatgacgtggatgtccagaagatagtaggatcacagatacatttccatggtaaaaagctgaagctgggccctgcaatcaggaaacaaaagttatgtgctcgtcatgtgcagccacgtcctttggtagttaatcctcctcctccaccacagtttcagaacgtctggcggaatccaaacactgaaacctacctgcagccccaaatcacgccgaatcctgtaactcagcacgttcaggcttattctgcttatccacattcaccaggtcaggtcatcactggatgtcagttgcttgtatataattatcaggaatatcctacttatcccgattcagcatttcaggtcaccactggatatcagttgcctgtatataattatcagccatttcctgcttatccaagatcaccatttcaggtcactgctggatatcagttgcctgtatataattatcaggcatttcctgcttatccaaattcaccatttcaagtcgccactggatatcagttccctgtatacaattatcagccatttcctgcttatccaagttcaccatttcaggtcactgctggatatcagttgcctgtatataattatcaggcatttcctgcttatccaaattcaccatttcaagtcgccactggatatcagttccctgtatacaattatcaggcatttcctgcttatccaaattcaccagttcaggtcaccactggatatcagttgcctgtatacaattatcaggcatttcctgcttatccaaattcagcagttcaggtcaccactggatatcagttccatgtatacaattaccagatgccaccgcagtgccctgttggggagcaaaggagaaatctgtggaccgaagcatacaaatggtggtatcttgtctgtttaatccagagaagagactgataaattccgttgttactcaagatgactgcttcaagggtaaaagagtgcatcgctttagaagaagtttggcagtatttaaatctgttggatcctctcagctatctagtttcatgggaagttgctggttttgaatattaagctaaaagttttccactattacagaaattctgaattttggtaaatcacactgaaactttctgtataacttgtattattagactctctagttttatcttaacactgaaactgttcttcattagatgtttatttagaacctggttctgtgtttaatatatagtttaaagtaacaaataatcgagactgaaagaatgttaagatttatctgcaaggatttttaaaaaattgaaacttgcattttaagtgtttaaaagcaaatactgactttcaaaaaagtttttaaaacctgatttgaaagctaacaattttgatagtctgaacacaagcatttcacttctccaagaagtacctgtgaacagtacaatatttcagtattgagctttgcatttatgatttatctagaaatttacctcaaaagcagaatttttaaaactgcatttttaatcagtggaactcaatgtatagttagctttattgaagtcttatccaaacccagtaaaacagattctaagcaaacagtccaatcagtgagtcataatgtttattcaaagtattttatcttttatctagaatccacatatgtatgtccaatttgattgggatagtagttaggataactaaaattctgggcctaattttttaaagaatccaagacaaactaaactttactgggtatataaccttctcaatgagttaccattcttttttataaaaaaaattgttccttgaaatgctaaacttaatggctgtatgtgaaatttgcaaaatactggtattaaagaacgctgcagcttttttatgtcactcaaaggttaatcggagtatctgaaaggaattgtttttataaaaacattgaagtattagttacttgctataaatagatttttatttttgttttttagcctgttatatttccttctgtaaaataaaatatgtccagaagaggcatgttgtttctagattaggtagtgtcctcattttatattgtgaccacacagctagagcaccagagcccttttgctatactcacagtcttgttttcccagcctcttttactagtctttcaggaggtttgctcttagaactggtgatgtaaagaatggaagtagctgtatgagcagttcaaaggccaagccgtggaatggtagcaatgggatataatacctttctaagggaaacatttgtatcagtatcatttgatctgccatggacatgtgtttaaagtggctttctggcccttctttcaatggcttcttccctaaaacgtggagactctaagttaatgtcgttactatgggccatattactaatgcccactggggtctatgatttctcaaaattttcattcggaatccgaaggatacagtctttaaactttagaattcccaagaaggctttattacacctcagaaattgaaagcaccatgactttgtccattaaaaaattatccatagtttttttagtgcttttaacattccgacatacatcattctgtgattaaatctccagatttctgtaaatgatacctacattctaaagagttaattctaattattccgatatgaccttaaggaaaagtaaaggaataaatttttgtctttgttgaagtatttaatagagtaaggtaaagaagatattaagtccctttcaaaatggaaaattaattctaaactgagaaaaatgttcctactacctattgctgatactgtctttgcataaatgaataaaaataaactttttttcttcaaa

SEQ ID NO: 8091 - DNA, 3922 bp, Homo sapiens
  source 1..3922: mol_type = unassigned DNA
attggctcaggccgataccacgcgccccgatacccggcacaggagccacctcccagagccccgcagtccatgcctcagtcggcctgcgctcctcagcctggcggttctacctccgagggttcgcccgcccttggttttccttacaccttagcctttggctcctttgaccactcgaagccccacagcgtgttccagcggacttcaccagcagacccagaagtggtgggtgaaacactgcctctgttcctccttgagcctgtcgggagctgctgcctgccaccaccatgatggatgaaactgagattggaagctgctttggtagatacggttcagtgaaagaagtgaagataatcacgaatcgaactggtgtgtccaaaggctatggatttgtttcgtttgttaatgacgtggatgtccagaagatagtaggatcacagatacatttccatggtaaaaagctgaagctgggccctgcaatcaggaaacaaaagttatgtgctcgtcatgtgcagccacgtcctttggtagttaatcctcctcctccaccacagtttcagaacgtctggcggaatccaaacactgaaacctacctgcagccccaaatcacgccgaatcctgtaactcagcacgttcaggcttattctgcttatccacattcaccaggtcaggtcatcactggatgtcagttgcttgtatataattatcaggaatatcctacttatcccgattcagcatttcaggtcaccactggatatcagttgcctgtatataattatcagccatttcctgcttatccaagatcaccatttcaggtcactgctggatatcagttgcctgtatataattatcaggcatttcctgcttatccaaattcaccatttcaagtcgccactggatatcagttccctgtatacaattatcagccatttcctgcttatccaagttcaccatttcaggtcactgctggatatcagttgcctgtatataattatcaggcatttcctgcttatccaaattcaccatttcaagtcgccactggatatcagttccctgtatacaattatcaggcatttcctgcttatccaaattcaccatttcaagtcgccactggatatcagttccctgtatacaattatcaggcatttcctgcttatccaaattcaccagttcaggtcaccactggatatcagttgcctgtatacaattatcagccatttcctgcttatccaagatcaccatttcaggtcactgctggatatcagttgcctgtatataattatcaggcatttcctgcttatccaaattcaccatttcaagtcgccactggatatcagttccctgtatacaattatcaggcatttcctgcttatccaaattcaccagttcaggtcaccactggatatcagttgcctgtatacaattatcaggcatttcctgcttatccaagttcaccatttcaggtcaccactggatatcagttgcctgtatataattatcaggcatttcctgcttatccaagttcaccatttcaggtcaccactggatatcagttgcctgtatataattatcaggcatttcctgcttatccaagttcaccatttcaggtcaccactggatatcagttgcctgtatataattatcaggcatttcctgcttatccaagttcaccatttcaggtcaccactggatatcagttgcctgtatataattatcaggcatttcctgcttatccaagttcaccatttcaggtcaccactggatatcagttgcctgtatataattatcaggcatttcctgcttatccaagttcaccatttcaggtcaccactggatatcagttgcctgtatataattatcaggcatttcctgcttatccaaattcagcagttcaggtcaccactggatatcagttccatgtatacaattaccagatgccaccgcagtgccctgttggggagcaaaggagaaatctgtggaccgaagcatacaaatggtggtatcttgtctgtttaatccagagaagagactgataaattccgttgttactcaagatgactgcttcaagggtaaaagagtgcatcgctttagaagaagtttggcagtatttaaatctgttggatcctctcagctatctagtttcatgggaagttgctggttttgaatattaagctaaaagttttccactattacagaaattctgaattttggtaaatcacactgaaactttctgtataacttgtattattagactctctagttttatcttaacactgaaactgttcttcattagatgtttatttagaacctggttctgtgtttaatatatagtttaaagtaacaaataatcgagactgaaagaatgttaagatttatctgcaaggatttttaaaaaattgaaacttgcattttaagtgtttaaaagcaaatactgactttcaaaaaagtttttaaaacctgatttgaaagctaacaattttgatagtctgaacacaagcatttcacttctccaagaagtacctgtgaacagtacaatatttcagtattgagctttgcatttatgatttatctagaaatttacctcaaaagcagaatttttaaaactgcatttttaatcagtggaactcaatgtatagttagctttattgaagtcttatccaaacccagtaaaacagattctaagcaaacagtccaatcagtgagtcataatgtttattcaaagtattttatcttttatctagaatccacatatgtatgtccaatttgattgggatagtagttaggataactaaaattctgggcctaattttttaaagaatccaagacaaactaaactttactgggtatataaccttctcaatgagttaccattcttttttataaaaaaaattgttccttgaaatgctaaacttaatggctgtatgtgaaatttgcaaaatactggtattaaagaacgctgcagcttttttatgtcactcaaaggttaatcggagtatctgaaaggaattgtttttataaaaacattgaagtattagttacttgctataaatagatttttatttttgttttttagcctgttatatttccttctgtaaaataaaatatgtccagaagaggcatgttgtttctagattaggtagtgtcctcattttatattgtgaccacacagctagagcaccagagcccttttgctatactcacagtcttgttttcccagcctcttttactagtctttcaggaggtttgctcttagaactggtgatgtaaagaatggaagtagctgtatgagcagttcaaaggccaagccgtggaatggtagcaatgggatataatacctttctaagggaaacatttgtatcagtatcatttgatctgccatggacatgtgtttaaagtggctttctggcccttctttcaatggcttcttccctaaaacgtggagactctaagttaatgtcgttactatgggccatattactaatgcccactggggtctatgatttctcaaaattttcattcggaatccgaaggatacagtctttaaactttagaattcccaagaaggctttattacacctcagaaattgaaagcaccatgactttgtccattaaaaaattatccatagtttttttagtgcttttaacattccgacatacatcattctgtgattaaatctccagatttctgtaaatgatacctacattctaaagagttaattctaattattccgatatgaccttaaggaaaagtaaaggaataaatttttgtctttgttgaagtatttaatagagtaaggtaaagaagatattaagtccctttcaaaatggaaaattaattctaaactgagaaaaatgttcctactacctattgctgatactgtctttgcataaatgaataaaaataaactttttttcttcaaatgtg

SEQ ID NO: 8092 - DNA, 1201 bp, Homo sapiens
  source 1..1201: mol_type = unassigned DNA
ctggcggttctacctccgagggttcgcccgcccttggttttccttacaccttagcctttggctcctttgaccactcgaagccccacagcgtgttccagcggacttcaccagcagacccagaagtggtgggtgaaacactgcctctgttcctccttgagcctgtcgggagctgctgcctgccaccaccatgtctgctgcaaatcctgagactccaaactcaaccatctccagagaggccagcacccagtcttcatcagctgcagctagccaaggctgggtgttaccagaaggcaaaatcgtgccaaacactgtttttgttggtggaattgatgctaggatggatgaaactgagattggaagctgctttggtagatacggttcagtgaaagaagtgaagataatcacgaatcgaactggtgtgtccaaaggctatggatttgtttcgtttgttaatgacgtggatgtccagaagatagtaggatcacagatacatttccatggtaaaaagctgaagctgggccctgcaatcaggaaacaaaagttatgtgctcgtcatgtgcagccacgtcctttggtagttaatcctcctcctccaccacagtttcagaacgtctggcggaatccaaacactgaaacctacctgcagccccaaatcacgccgaatcctgtaactcagcacgttcaggcttactctgcttatccacattcaccaggtcaggtcatcactggatgtcagttgcttgtatataattatcaggaatatcctacttatcccgattcagcatttcaggtcaccactggatatcagttgcctgtatataattatcagccatttcctgcttatccaagatcaccatttcaggtcactgctggatatcagttgcctgtatataattatcaggcatttcctgcttatccaaattcaccatttcaagtcgccactggatatcagttccctgtatacaattatcaggcatttcctgcttatccaaattcaccagttcaggtcaccactggatatcagttgcctgtatacaattatcaggcatttcctgcttatccaaattcaccatttcaagtcgccactggatatcagttccctgtatacaattatcaggcatttcctgcttatccaaattcaccagttcaggtcaccactggatatcagttgcctgtatacaattatcagatgccaccttag

SEQ ID NO: 8093 - DNA, 3195 bp, Homo sapiens
  source 1..3195: mol_type = unassigned DNA
agtcggcctgcgctcctcagcctggcggttctacctccgagggttcgcccgcccttggttttccttacaccttagcctttggctcctttgaccactcgaagccccacagcgtgttccagcggacttcaccagcagacccagaagtggtgggtgaaacactgcctctgttcctccttgagcctgtcgggagctgctgcctgccaccaccatgtctgctgcaaatcctgagactccaaactcaaccatctccagagaggccagcacccagtcttcatcagctgcagctagccaaggctgggtgttaccagaaggcaaaatcgtgccaaacactgtttttgttggtggaattgatgctaggatggatgaaactgagattggaagctgctttggtagatacggttcagtgaaagaagtgaagataatcacgaatcgaactggtgtgtccaaaggctatggatttgtttcgtttgttaatgacgtggatgtccagaagatagtaggatcacagatacatttccatggtaaaaagctgaagctgggccctgcaatcaggaaacaaaagttatgtgctcgtcatgtgcagccacgtcctttggtagttaatcctcctcctccaccacagtttcagaacgtctggcggaatccaaacactgaaacctacctgcagccccaaatcacgccgaatcctgtaactcagcacgttcaggcttactctgcttatccacattcaccaggtcaggtcatcactggatgtcagttgcttgtatataattatcaggaatatcctacttatcccgattcagcatttcaggtcaccactggatatcagttgcctgtatataattatcagccatttcctgcttatccaagatcaccatttcaggtcactgctggatatcagttgcctgtatataattatcaggcatttcctgcttatccaaattcaccagttcaggtcaccactggatatcagttgcctgtatacaattatcaggcatttcctgcttatccaaattcaccagttcaggtcaccactggatatcagttgcctgtatacaattatcaggcatttcctgcttatccaaattcaccagttcaggtcaccactggatatcagttgcctgtatacaattatcaggcatttcctgcttatccaaattcagcagttcaggtcaccactggatatcagttccatgtatacaattaccagatgccaccgcagtgccctgttggggagcaaaggagaaatctgtggaccgaagcatacaaatggtggtatcttgtctgtttaatccagagaagagactgataaattccgttgttactcaagatgactgcttcaagggtaaaagagtgcatcgctttagaagaagtttggcagtatttaaatctgttggatcctctcagctatctagtttcatgggaagttgctggttttgaatattaagctaaaagttttccactattacagaaattctgaattttggtaaatcacactgaaactttctgtataacttgtattattagactctctagttttatcttaacactgaaactgttcttcattagatgtttatttagaacctggttctgtgtttaatatatagtttaaagtaacaaataatcgagactgaaagaatgttaagatttatctgcaaggatttttaaaaaattgaaacttgcattttaagtgtttaaaagcaaatactgactttcaaaaaagtttttaaaacctgatttgaaagctaacaattttgatagtctgaacacaagcatttcacttctccaagaagtacctgtgaacagtacaatatttcagtattgagctttgcatttatgatttatctagaaatttacctcaaaagcagaatttttaaaactgcatttttaatcagtggaactcaatgtatagttagctttattgaagtcttatccaaacccagtaaaacagattctaagcaaacagtccaatcagtgagtcataatgtttattcaaagtattttatcttttatctagaatccacatatgtatgtccaatttgattgggatagtagttaggataactaaaattctgggcctaattttttaaagaatccaagacaaactaaactttactgggtatataaccttctcaatgagttaccattcttttttataaaaaaaattgttccttgaaatgctaaacttaatggctgtatgtgaaatttgcaaaatactggtattaaagaacgctgcagcttttttatgtcactcaaaggttaatcggagtatctgaaaggaattgtttttataaaaacattgaagtattagttacttgctataaatagatttttatttttgttttttagcctgttatatttccttctgtaaaataaaatatgtccagaagaggcatgttgtttctagattaggtagtgtcctcattttatattgtgaccacacagctagagcaccagagcccttttgctatactcacagtcttgttttcccagcctcttttactagtctttcaggaggtttgctcttagaactggtgatgtaaagaatggaagtagctgtatgagcagttcaaaggccaagccgtggaatggtagcaatgggatataatacctttctaagggaaacatttgtatcagtatcatttgatctgccatggacatgtgtttaaagtggctttctggcccttctttcaatggcttcttccctaaaacgtggagactctaagttaatgtcgttactatgggccatattactaatgcccactggggtctatgatttctcaaaattttcattcggaatccgaaggatacagtctttaaactttagaattcccaagaaggctttattacacctcagaaattgaaagcaccatgactttgtccattaaaaaattatccatagtttttttagtgcttttaacattccgacatacatcattctgtgattaaatctccagatttctgtaaatgatacctacattctaaagagttaattctaattattccgatatgaccttaaggaaaagtaaaggaataaatttttgtctttgttgaagtatttaatagagtaaggtaaagaagatattaagtccctttcaaaatggaaaattaattctaaactgagaaaaatgttcctactacctattgctgatactgtctttgcataaatgaataaaaataaactttttttcttca

SEQ ID NO: 8094 - DNA, 3503 bp, Homo sapiens
  source 1..3503: mol_type = unassigned DNA
gctgccacccattggctcaggccgataccacgcgccccgatacccggcacaggagccacctcccagagccccgcagtccatgcctcagtcggcctgcgctcctcagcctggcggttctacctccgagggttcgcccgcccttggttttccttacaccttagcctttggctcctttgaccactcgaagccccacagcgtgttccagcggacttcaccagcagacccagaagtggtgggtgaaacactgcctctgttcctccttgagcctgtcgggagctgctgcctgccaccaccatgtctgctgcaaatcctgagactccaaactcaaccatctccagagaggccagcacccagtcttcatcagctgcagctagccaaggctgggtgttaccagaaggcaaaatcgtgccaaacactgtttttgttggtggaattgatgctaggatggatgaaactgagattggaagctgctttggtagatacggttcagtgaaagaagtgaagataatcacgaatcgaactggtgtgtccaaaggctatggatttgtttcgtttgttaatgacgtggatgtccagaagatagtaggatcacagatacatttccatggtaaaaagctgaagctgggccctgcaatcaggaaacaaaagttatgtgctcgtcatgtgcagccacgtcctttggtagttaatcctcctcctccaccacagtttcagaacgtctggcggaatccaaacactgaaacctacctgcagccccaaatcacgccgaatcctgtaactcagcacgttcaggcttactctgcttatccacattcaccaggtcaggtcatcactggatgtcagttgcttgtatataattatcaggaatatcctacttatcccgattcagcatttcaggtcaccactggatatcagttgcctgtatataattatcagccatttcctgcttatccaagatcaccatttcaggtcactgctggatatcagttgcctgtatataattatcaggcatttcctgcttatccaaattcaccatttcaagtcgccactggatatcagttccctgtatacaattatcaggcatttcctgcttatccaaattcaccagttcaggtcaccactggatatcagttgcctgtatacaattatcaggcatttcctgcttatccaaattcaccatttcaagtcgccactggatatcagttccctgtatacaattatcaggcatttcctgcttatccaaattcaccagttcaggtcaccactggatatcagttgcctgtatacaattatcaggcatttcctgcttatccaaattcaccatttcaagtcgccactggatatcagttccctgtatacaattatcaggcatttcctgcttatccaaattcaccagttcaggtcaccactggatatcagttgcctgtatacaattatcaggcatttcctgcttatccaaattcagcagttcaggtcaccactggatatcagttccatgtatacaattaccagatgccaccgcagtgccctgttggggagcaaaggagaaatctgtggaccgaagcatacaaatggtggtatcttgtctgtttaatccagagaagagactgataaattccgttgttactcaagatgactgcttcaagggtaaaagagtgcatcgctttagaagaagtttggcagtatttaaatctgttggatcctctcagctatctagtttcatgggaagttgctggttttgaatattaagctaaaagttttccactattacagaaattctgaattttggtaaatcacactgaaactttctgtataacttgtattattagactctctagttttatcttaacactgaaactgttcttcattagatgtttatttagaacctggttctgtgtttaatatatagtttaaagtaacaaataatcgagactgaaagaatgttaagatttatctgcaaggatttttaaaaaattgaaacttgcattttaagtgtttaaaagcaaatactgactttcaaaaaagtttttaaaacctgatttgaaagctaacaattttgatagtctgaacacaagcatttcacttctccaagaagtacctgtgaacagtacaatatttcagtattgagctttgcatttatgatttatctagaaatttacctcaaaagcagaatttttaaaactgcatttttaatcagtggaactcaatgtatagttagctttattgaagtcttatccaaacccagtaaaacagattctaagcaaacagtccaatcagtgagtcataatgtttattcaaagtattttatcttttatctagaatccacatatgtatgtccaatttgattgggatagtagttaggataactaaaattctgggcctaattttttaaagaatccaagacaaactaaactttactgggtatataaccttctcaatgagttaccattcttttttataaaaaaaattgttccttgaaatgctaaacttaatggctgtatgtgaaatttgcaaaatactggtattaaagaacgctgcagcttttttatgtcactcaaaggttaatcggagtatctgaaaggaattgtttttataaaaacattgaagtattagttacttgctataaatagatttttatttttgttttttagcctgttatatttccttctgtaaaataaaatatgtccagaagaggcatgttgtttctagattaggtagtgtcctcattttatattgtgaccacacagctagagcaccagagcccttttgctatactcacagtcttgttttcccagcctcttttactagtctttcaggaggtttgctcttagaactggtgatgtaaagaatggaagtagctgtatgagcagttcaaaggccaagccgtggaatggtagcaatgggatataatacctttctaagggaaacatttgtatcagtatcatttgatctgccatggacatgtgtttaaagtggctttctggcccttctttcaatggcttcttccctaaaacgtggagactctaagttaatgtcgttactatgggccatattactaatgcccactggggtctatgatttctcaaaattttcattcggaatccgaaggatacagtctttaaactttagaattcccaagaaggctttattacacctcagaaattgaaagcaccatgactttgtccattaaaaaattatccatagtttttttagtgcttttaacattccgacatacatcattctgtgattaaatctccagatttctgtaaatgatacctacattctaaagagttaattctaattattccgatatgaccttaaggaaaagtaaaggaataaatttttgtctttgttgaagtatttaatagagtaaggtaaagaagatattaagtccctttcaaaatggaaaattaattctaaactgagaaaaatgttcctactacctattgctgatactgtctttgcataaatgaataaaaataaactttttttcttcaaatgtg

SEQ ID NO: 8095 - DNA, 1273 bp, Homo sapiens
  source 1..1273: mol_type = unassigned DNA
ctggcggttctacctccgagggttcgcccgcccttggttttccttacaccttagcctttggctcctttgaccactcgaagccccacagcgtgttccagcggacttcaccagcagacccagaagtggtgggtgaaacactgcctctgttcctccttgagcctgtcgggagctgctgcctgccaccaccatgtctgctgcaaatcctgagactccaaactcaaccatctccagagaggccagcacccagtcttcatcagctgcagctagccaaggctgggtgttaccagaaggcaaaatcgtgccaaacactgtttttgttggtggaattgatgctaggatggatgaaactgagattggaagctgctttggtagatacggttcagtgaaagaagtgaagataatcacgaatcgaactggtgtgtccaaaggctatggatttgtttcgtttgttaatgacgtggatgtccagaagatagtaggatcacagatacatttccatggtaaaaagctgaagctgggccctgcaatcaggaaacaaaagttatgtgctcgtcatgtgcagccacgtcctttggtagttaatcctcctcctccaccacagtttcagaacgtctggcggaatccaaacactgaaacctacctgcagccccaaatcacgccgaatcctgtaactcagcacgttcaggcttactctgcttatccacattcaccaggtcaggtcatcactggatgtcagttgcttgtatataattatcaggaatatcctacttatcccgattcagcatttcaggtcaccactggatatcagttgcctgtatataattatcagccatttcctgcttatccaagatcaccatttcaggtcactgctggatatcagttgcctgtatataattatcaggcatttcctgcttatccaaattcaccatttcaagtcgccactggatatcagttccctgtatacaattatcaggcatttcctgcttatccaaattcaccagttcaggtcaccactggatatcagttgcctgtatacaattatcaggcatttcctgcttatccaaattcaccatttcaagtcgccactggatatcagttccctgtatacaattatcaggcatttcctgcttatccaaattcaccagttcaggtcaccactggatatcagttgcctgtatacaattatcaggcatttcctgcttatccaaattcaccagttcaggtcaccactggatatcagttgcctgtatacaattatcagatgccaccttag

SEQ ID NO: 8096 - DNA, 3271 bp, Homo sapiens
  source 1..3271: mol_type = unassigned DNA
tcagtcggcctgcgctcctcagcctggcggttctacctccgagggttcgcccgcccttggttttccttacaccttagcctttggctcctttgaccactcgaagccccacagcgtgttccagcggacttcaccagcagacccagaagtggtgggtgaaacactgcctctgttcctccttgagcctgtcgggagctgctgcctgccaccaccatgtctgctgcaaatcctgagactccaaactcaaccatctccagagaggccagcacccagtcttcatcagctgcagctagccaaggctgggtgttaccagaaggcaaaatcgtgccaaacactgtttttgttggtggaattgatgctaggatggatgaaactgagattggaagctgctttggtagatacggttcagtgaaagaagtgaagataatcacgaatcgaactggtgtgtccaaaggctatggatttgtttcgtttgttaatgacgtggatgtccagaagatagtaggatcacagatacatttccatggtaaaaagctgaagctgggccctgcaatcaggaaacaaaagttatgtgctcgtcatgtgcagccacgtcctttggtagttaatcctcctcctccaccacagtttcagaacgtctggcggaatccaaacactgaaacctacctgcagccccaaatcacgccgaatcctgtaactcagcacgttcaggcttactctgcttatccacattcaccaggtcaggtcatcactggatgtcagttgcttgtatataattatcaggaatatcctacttatcccgattcagcatttcaggtcaccactggatatcagttgcctgtatataattatcagccatttcctgcttatccaagatcaccatttcaggtcactgctggatatcagttgcctgtatataattatcaggcatttcctgcttatccaaattcaccatttcaagtcgccactggatatcagttccctgtatacaattatcaggcatttcctgcttatccaaattcaccagttcaggtcaccactggatatcagttgcctgtatacaattatcaggcatttcctgcttatccaaattcaccatttcaagtcgccactggatatcagttccctgtatacaattatcaggcatttcctgcttatccaaattcaccagttcaggtcaccactggatatcagttgcctgtatacaattatcaggcatttcctgcttatccaaattcagcagttcaggtcaccactggatatcagttccatgtatacaattaccagatgccaccgcagtgccctgttggggagcaaaggagaaatctgtggaccgaagcatacaaatggtggtatcttgtctgtttaatccagagaagagactgataaattccgttgttactcaagatgactgcttcaagggtaaaagagtgcatcgctttagaagaagtttggcagtatttaaatctgttggatcctctcagctatctagtttcatgggaagttgctggttttgaatattaagctaaaagttttccactattacagaaattctgaattttggtaaatcacactgaaactttctgtataacttgtattattagactctctagttttatcttaacactgaaactgttcttcattagatgtttatttagaacctggttctgtgtttaatatatagtttaaagtaacaaataatcgagactgaaagaatgttaagatttatctgcaaggatttttaaaaaattgaaacttgcattttaagtgtttaaaagcaaatactgactttcaaaaaagtttttaaaacctgatttgaaagctaacaattttgatagtctgaacacaagcatttcacttctccaagaagtacctgtgaacagtacaatatttcagtattgagctttgcatttatgatttatctagaaatttacctcaaaagcagaatttttaaaactgcatttttaatcagtggaactcaatgtatagttagctttattgaagtcttatccaaacccagtaaaacagattctaagcaaacagtccaatcagtgagtcataatgtttattcaaagtattttatcttttatctagaatccacatatgtatgtccaatttgattgggatagtagttaggataactaaaattctgggcctaattttttaaagaatccaagacaaactaaactttactgggtatataaccttctcaatgagttaccattcttttttataaaaaaaattgttccttgaaatgctaaacttaatggctgtatgtgaaatttgcaaaatactggtattaaagaacgctgcagcttttttatgtcactcaaaggttaatcggagtatctgaaaggaattgtttttataaaaacattgaagtattagttacttgctataaatagatttttatttttgttttttagcctgttatatttccttctgtaaaataaaatatgtccagaagaggcatgttgtttctagattaggtagtgtcctcattttatattgtgaccacacagctagagcaccagagcccttttgctatactcacagtcttgttttcccagcctcttttactagtctttcaggaggtttgctcttagaactggtgatgtaaagaatggaagtagctgtatgagcagttcaaaggccaagccgtggaatggtagcaatgggatataatacctttctaagggaaacatttgtatcagtatcatttgatctgccatggacatgtgtttaaagtggctttctggcccttctttcaatggcttcttccctaaaacgtggagactctaagttaatgtcgttactatgggccatattactaatgcccactggggtctatgatttctcaaaattttcattcggaatccgaaggatacagtctttaaactttagaattcccaagaaggctttattacacctcagaaattgaaagcaccatgactttgtccattaaaaaattatccatagtttttttagtgcttttaacattccgacatacatcattctgtgattaaatctccagatttctgtaaatgatacctacattctaaagagttaattctaattattccgatatgaccttaaggaaaagtaaaggaataaatttttgtctttgttgaagtatttaatagagtaaggtaaagaagatattaagtccctttcaaaatggaaaattaattctaaactgagaaaaatgttcctactacctattgctgatactgtctttgcataaatgaataaaaataaactttttttcttcaaa

SEQ ID NO: 8097 - DNA, 3104 bp, Homo sapiens
  source 1..3104: mol_type = unassigned DNA
actcccacgcgcctccgccccgccagcctcatttctggcgcgctctccccgtggctccgcaagatggcggcgggcctgctgagggacttgccttcttaaacttcgagggccggagcttccttaggaagtggttccctcctggtccctgtacttggtggggtgggcggggttcgtgggggcctcagcgtggggtgtggggcgtcctgaaggcatggccctgtagctgagggggctgggccggaagtgcctctggtcccctcgcgcctgtcagctgcgggggacttgctgatggcggctccctcgtgtggcggcgacagaaaagctcgcctgacgccatctttgccgcacgagtctactgcaaatcctgaaactccaaactcaaccatctccagagaggccagcacccagtcctcatcagctgcaaccagccaaggctatattttaccagaaggcaaaatcatgccaaacactgtttttgttggaggaattgatgttaggatggatgaaactgagattagaagcttctttgctagatatggttcagtgaaagaagtgaagataatcactgatcgaactggtgtgtccaaaggctatggatttgtttcattttttaatgacgtggatgtgcagaagatagtagaatcacagataaatttccatggtaaaaagctgaagctgggccctgcaatcaggaaacaaaatttatgtgcttatcatgtgcagccacgtcctttggtttttaatcatcctcctccaccacagtttcagaatgtctggactaatccaaacactgaaacttatatgcagcccacaaccacgatgaatcctataactcagtatgttcaggcatatcctacttacccaaattcaccagttcaggtcatcactggatatcagttgcctgtatataattatcagatgccaccacagtggcctgttggggagcaaaggagctatgttgtacctccggcttattcagctgttaactaccactgtaatgaagttgatccaggagctgaagttgtgccaaatgaatgttcagttcatgaagctactccaccctctggaaatggcccacaaaagaaatctgtggaccgaagcatacaaacggtggtatcttgtctgtttaatccagagaacagactgagaaactctgttgttactcaagatgactacttcaaggataaaagagtgcatcactttagaagaagtcgggcaatgcttaaatctgtttgatcctcctggcttatctagttacatgggaagttgctggttttgaatattaagctaaaaggtttccactattatagaaattctgaattttggtaaatcacactcaaactttgtgtataagttgtattattagactctctagttttatcttaaactgttcttcattagatgtttatttagaaactggttctgtgttgaaatatagttgaaagtaaaaaaataattgagactgaaagaaactaagatttatctgcaaggattttttaaaaattggcattttaagtgtttaaaagcaaatactgattttcaaaaaaatgtttttaaaaacctattttgaaaggtcagaattttgttggtctgaatacaaacatttcacttctccaacaagtacctgtgaacagtacagtatttacagtattgagctttgcatttatgatttctccagaaatttaccacaaaagcaaaatttttaaaactgcatttttaatcagtggaactcaatatatagttagctttattgaagtcttcttatctaaacccagcaaaacagattcaaagcgaacagtccaatcagtgggtcatatgtttattcaaaatattttatcttttagctagaatccacacatatatatcctatttgattagggtagtaattaggataactaaaattctgggcctaattttttaaagaatccaagacaaactaaactttactaggtacataagcttctcaatgagtcaccattcttcttttttgtaaaaacttttttctttgaaatgctaaacttggctgtatgtcaaattgtgcaaaatattggtattaaagaatgctgcaacttttttatgtctcttagaggttaatcagagtatctgaagggaattgtttttataaaaacattgaaatattagttacttgctataaatagatttagtctgttatatttccttttgtaaagtaaaatatgtccagaagagtcaaagtagttagttttggttatttctaaaccacaaaagttgtttaataagtatatcttaagaatgtgctagagttaaaagttagcattgtttctagattagctggtgtcttcattttacattgtgacaaacagctagagcatcagagcccttttgctataccacagtctttcgtttccagcctttgtcactagtctttgaggaggtttgctcctagaactggtgatataaagaatgaaagtagctgtatgagcagagcagttcaagggccaaaccctggaacggtagcaatgggatataatacctttctaagggaaaaagttgtatcagtaccatttgatctgccatggacatgagtttaaagcggctttctggcccttctttcagtgacttcttccctaaaatgtagaaattctaacttaatgtagttactgtgagccatattactagtgccccctagggtctataattccttaaaattttcattctgaatctgaaggagagagtcttttaactttagaattcccaagagggctttattacacctcagaaattgaaagcactatgaatttgtccatttaaaaatgatctgtagtttttttggtgctataacattctgacacatatcattctgtgattaaatctccagcttactataaatgatatctatattctaaagagctacttctaattattccaatatgaccttaaggaaaagtaagggaataaatttttgtctttgttggagtgaagcatttaaaagagtaagggtaaaaaagataaagtcctgaacctttcaaaatggaaaattaattctaaacttagaaatatgcttctgcctattgctgatactgtctttgcatacatgaataaaaataaagtttttttcttcaaaa

SEQ ID NO: 8098 - DNA, 3050 bp, Homo sapiens
  source 1..3050: mol_type = unassigned DNA
attggctgaggccgataccacgcgccccgatacccggcgcaggagccacctccctgagccccgcggaccacgcctcagtccgcctgcgctcctcagcctgacggtccgcctttcggggctcctcagccttgtcacccgctcttggttttccttttctcttcatctttggctcctttgaccactcgaagccgcgcagcgggttccagcggacctcacagcagccccagaagtggtgcgccaagcacagcctctgctcctcctggagccggtcgggaactgctgcctgccgccatcatgtctactgcaaatcctgaaactccaaactcaaccatctccagagaggccagcacccagtcctcatcagctgcaaccagccaaggctatattttaccagaaggcaaaatcatgccaaacactgtttttgttggaggaattgatgttaggatggatgaaactgagattagaagcttctttgctagatatggttcagtgaaagaagtgaagataatcactgatcgaactggtgtgtccaaaggctatggatttgtttcattttttaatgacgtggatgtgcagaagatagtagaatcacagataaatttccatggtaaaaagctgaagctgggccctgcaatcaggaaacaaaatttatgtgcttatcatgtgcagccacgtcctttggtttttaatcatcctcctccaccacagtttcagaatgtctggactaatccaaacactgaaacttatatgcagcccacaaccacgatgaatcctataactcagtatgttcaggcatatcctacttacccaaattcaccagttcaggtcatcactggatatcagttgcctgtatataattatcagatgccaccacagtggcctgttggggagcaaaggagctatgttgtacctccggcttattcagctgttaactaccactgtaatgaagttgatccaggagctgaagttgtgccaaatgaatgttcagttcatgaagctactccaccctctggaaatggcccacaaaagaaatctgtggaccgaagcatacaaacggtggtatcttgtctgtttaatccagagaacagactgagaaactctgttgttactcaagatgactacttcaaggataaaagagtgcatcactttagaagaagtcgggcaatgcttaaatctgtttgatcctcctggcttatctagttacatgggaagttgctggttttgaatattaagctaaaaggtttccactattatagaaattctgaattttggtaaatcacactcaaactttgtgtataagttgtattattagactctctagttttatcttaaactgttcttcattagatgtttatttagaaactggttctgtgttgaaatatagttgaaagtaaaaaaataattgagactgaaagaaactaagatttatctgcaaggattttttaaaaattggcattttaagtgtttaaaagcaaatactgattttcaaaaaaatgtttttaaaaacctattttgaaaggtcagaattttgttggtctgaatacaaacatttcacttctccaacaagtacctgtgaacagtacagtatttacagtattgagctttgcatttatgatttctccagaaatttaccacaaaagcaaaatttttaaaactgcatttttaatcagtggaactcaatatatagttagctttattgaagtcttcttatctaaacccagcaaaacagattcaaagcgaacagtccaatcagtgggtcatatgtttattcaaaatattttatcttttagctagaatccacacatatatatcctatttgattagggtagtaattaggataactaaaattctgggcctaattttttaaagaatccaagacaaactaaactttactaggtacataagcttctcaatgagtcaccattcttcttttttgtaaaaacttttttctttgaaatgctaaacttggctgtatgtcaaattgtgcaaaatattggtattaaagaatgctgcaacttttttatgtctcttagaggttaatcagagtatctgaagggaattgtttttataaaaacattgaaatattagttacttgctataaatagatttagtctgttatatttccttttgtaaagtaaaatatgtccagaagagtcaaagtagttagttttggttatttctaaaccacaaaagttgtttaataagtatatcttaagaatgtgctagagttaaaagttagcattgtttctagattagctggtgtcttcattttacattgtgacaaacagctagagcatcagagcccttttgctataccacagtctttcgtttccagcctttgtcactagtctttgaggaggtttgctcctagaactggtgatataaagaatgaaagtagctgtatgagcagagcagttcaagggccaaaccctggaacggtagcaatgggatataatacctttctaagggaaaaagttgtatcagtaccatttgatctgccatggacatgagtttaaagcggctttctggcccttctttcagtgacttcttccctaaaatgtagaaattctaacttaatgtagttactgtgagccatattactagtgccccctagggtctataattccttaaaattttcattctgaatctgaaggagagagtcttttaactttagaattcccaagagggctttattacacctcagaaattgaaagcactatgaatttgtccatttaaaaatgatctgtagtttttttggtgctataacattctgacacatatcattctgtgattaaatctccagcttactataaatgatatctatattctaaagagctacttctaattattccaatatgaccttaaggaaaagtaagggaataaatttttgtctttgttggagtgaagcatttaaaagagtaagggtaaaaaagataaagtcctgaacctttcaaaatggaaaattaattctaaacttagaaatatgcttctgcctattgctgatactgtctttgcatacatgaataaaaataaagtttttttcttcaaaa

SEQ ID NO: 8099 - DNA, 3196 bp, Homo sapiens
  source 1..3196: mol_type = unassigned DNA
cgcggcgcacttggacttccctctccattcgccagccgcctcgctcccggaccccacggctgcaaactgatctggcgcgcggggaggaggagagcgcaggcgagcgaacccgcgagagagggagagagcgagcgagcaacagcgagagcgagagcgagagagccgggaggcagagggagtagtgaccgccttccggagccgggattcatgcctgtcctcgggaccagcgaaggggactttacggctgagtatgagccaggctgctaggagccaggtacccccacgcctgcagtccccgcgccgtgcccggaatgcgagctgcacgcagggctctcccaagttcccaccgagccgaataaaaagcgtcctcccgcagctctccgccaaagacggacattgactccaggactccacagaatggagcaagaatgagaggaaaaaggccggcagaaaagcatgaactggaggtttgttgagctcctctacttcctgtttatatggggccgtatctcagtgcagccctcccaccaggaaccagctgggacagaccaacatgtctccaaggaatttgattggctcatttcagacagggggcctttccaccactccaggagctacctatcctttgtggaaagacaccgtcaaggatttacaaccagatataaaatatacagggagtttgcccgttggaaggtgaggaacacagccatcgagaggagagatctggtccgccatccagtgcccctcatgccggagtttcaaaggagcatccgcctgcttggcaggagacctaccactcagcagttcatcgataccatcatcaaaaagtacggcacccacctgctcatctcagccacattgggaggggaggaggctttgaccatgtatatggacaaaagtcgcctcgacaggaagtcagggaatgccactcaaagtgttgaagctctgcaccagctcgcatcatcctactttgttgaccgtgatggtaccatgaggaggcttcatgagatccagatatcaactggagcaatcaaggtcacagagacacgcactgggcctctgggctgtaacagctatgacaatctggactctgtgagttccgtccttctgcaaagcacggagagcaaactgcaccttcaaggtcttcagataatctttcctcagtatctgcaagagaagtttgtccagtcggccttgagctatatcatgtgcaatggggagggggagtacctgtgccagaacagccagtgtcgctgccaatgtgccgaggagtttccgcagtgcaactgccccatcacggacatccagatcatggagtacacgctggccaacatggccaagtcttgggccgaagcttataaggacctggagaattcagatgagtttaaatcatttatgaagcgcctccccagcaaccacttcctgaccatcggaagcatccatcagcactggggcaatgactgggacctgcagaaccgctacaagctcctgcagagtgccacggaggcacagagacaaaagatccaacgcactgcccgcaagcttttcggcctcagtgtacgctgtcgccacaatcccaaccaccagctgcctagagagaggacaattcagcagtggcttgcaagggtccagtcactcctctactgtaatgagaatgggttttggggaaccttcctggagagccagcggagctgcgtgtgccacggcagcaccacgctgtgccagcgccccatcccctgcgtgataggcgggaacaacagctgcgccatgtgcagcctggccaacatctccctctgcggctcctgcaacaagggctacaagctgtatcgaggccgctgtgaaccacagaacgtggactcggagcggagcgagcagttcatcagctttgagactgacctggacttccaggacctggagctgaagtacctgctgcagaagatggactcacgcctctacgtccacaccaccttcatcagcaacgagatccgcctcgacaccttctttgaccctcggtggcgcaagcgcatgtccctcactctcaagagcaacaagaaccgcatggacttcatccacatggtgatcggcatgtccatgcgcatctgccagatgcgcaacagcagcctggaccccatgttctttgtctatgtcaacccctttagcgggagccattcggagggctggaacatgcccttcggggaatttggctacccacgctgggagaagatccgtctccaaaacagccagtgctacaactggactcttttgctgggcaatcggtggaaaacatttttcgagacggtccacatctacctacgtagtcggactcggctacctaccctactgcgaaatgagactggccagggccccgtggacctgtcggatccctccaagaggcagttctacatcaagatctcagacgtgcaggtgtttgggtatagcctgaggttcaacgccgacctcctgcgcagtgcagtgcagcaggtcaaccagtcctacacacagggcggccagttctattcctcttcgtcagtgatgctcctcttgttggatattcgggaccgaattaatcgcctggcccctcctgtggccccggggaaaccccagctggacttgttctcctgtatgctgaaacaccgcctgaaactgaccaacagcgagatcatcagggtgaaccacgccttggacctgtacaacacggagatcctcaaacagtcggaccagatgacagccaaactctgctaacccgggactccttgccatggacttttcctgttgttgtacacacacaacagaacaaaatgaagcaaaacaaaacaaaaaaacccacaaaaatttgtaaaatgtaattaatattcaaagaaaaggaggaaaatcttcatttgttggaaatgaaaacgttctagcaactgtataaaagcgttgggcatgtttgttatttctatactcactctgtcatgaagaagggtctcagccttttgtggagcattgagggagttgcttcttaggcctcaggtgctgtattgggggagaagggagaaagcatatgcaatgaattgtaaagatctctgctgtgcaggtgctaagattaaacactaaaaagaaagagagatatatgtaatgtacaactgacactgccatttttcctttttggaggaaatggacatagataaagaagatatttcttcggttaagattt

SEQ ID NO: 8100 - DNA, 1645 bp, Homo sapiens
  source 1..1645: mol_type = unassigned DNA
cgcctcgctcccggaccccacggctgcaaactgatctggcgcgcggggaggaggagagcgcaggcgagcgaacccgcgagagagggagagagcgagcgagcaacagcgagagcgagagcgagagagccgggaggcagagggagtagtgaccgccttccggagccgggattcatgcctgtcctcgggaccagcgaaggggactttacggctgagtatgagccaggctgctaggagccaggtacccccacgcctgcagtccccgcgccgtgcccggaatgcgagctgcacgcagggctctcccaagttcccaccgagccgaataaaaagcgtcctcccgcagctctccgccaaagacggacattgactccaggtaaggcggcgccgaatggagcaagaatgagaggaaaaaggccggcagaaaagcatgaactggaggtttgttgagctcctctacttcctgtttatatggggccgtatctcagtgcagccctcccaccaggaaccagctgggacagaccaacatgtctccaaggaatttgattggctcatttcagacagggggcctttccaccactccaggagctacctatcctttgtggaaagacaccgtcaaggatttacaaccagatataaaatatacagggagtttgcccgttggaaggtgaggaacacagccatcgagaggagagatctggtccgccatccagtgcccctcatgccggagtttcaaaggagcatccgcctgcttggcaggagacctaccactcagcagttcatcgataccatcatcaaaaagtacggcacccacctgctcatctcagccacattgggaggggaggaggctttgaccatgtatatggacaaaagtcgcctcgacaggaagtcagggaatgccactcaaagtgttgaagctctgcaccagctcgcatcatcctactttgttgaccgtgatggtaccatgaggaggcttcatgagatccagatatcaactggagcaatcaaggtcacagagacacgcactgggcctctgggctgtaacagctatgacaatctggactctgtgagttccgtccttctgcaaagcacggagagcaaactgcaccttcaaggtcttcagataatctttcctcagtatctgcaagagaagtttgtccagtcggccttgagctatatcatgtgcaatggggagggggagtacctgtgccagaacagccagtgtcgctgccaatgtgccgaggagtttccgcagtgcaactgccccatcacggacatccagatcatggagtacacgctggccaacatggccaagtcttgggccgaagcttataaggacctggagaattcaggtagagagtctcactcagtgccactgcatgagtggccttgagccaagtctgaaagggagctaatctaactggaattaggactgctgcaagggaaagttcagtgaccctgaccctttcactttggagtgtccagatgcaagtataatagctgtcacagagcaggcactcaataaatctcaactgaataaaattaatgaatagcataatccagtttgtggtcatatgatgtattgtttctgtcgtacccagaagacagaaagaataaatctgcataggaagcctctggagagggaagagtc

SEQ ID NO: 8101 - DNA, 3207 bp, Homo sapiens
  source 1..3207: mol_type = unassigned DNA
ggagaccgcggcgcacttggacttccctctccattcgccagccgcctcgctcccggaccccacggctgcaaactgatctggcgcgcggggaggaggagagcgcaggcgagcgaacccgcgagagagggagagagcgagcgagcaacagcgagagcgagagcgagagagccgggaggcagagggagtagtgaccgccttccggagccgggattcatgcctgtcctcgggaccagcgaaggggactttacggctgagtatgagccaggctgctaggagccaggtacccccacgcctgcagtccccgcgccgtgcccggaatgcgagctgcacgcagggctctcccaagttcccaccgagccgaataaaaagcgtcctcccgcagctctccgccaaagacggacattgactccaggtaaggcggcgccgaatggagcaagaatgagaggaaaaaggccggcagaaaagcatgaactggaggtttgttgagctcctctacttcctgtttatatggggccgtatctcagtgcagccctcccaccaggaaccagctgggacagaccaacatgtctccaaggaatttgattggctcatttcagacagggggcctttccaccactccaggagctacctatcctttgtggaaagacaccgtcaaggatttacaaccagatataaaatatacagggagtttgcccgttggaaggtgaggaacacagccatcgagaggagagatctggtccgccatccagtgcccctcatgccggagtttcaaaggagcatccgcctgcttggcaggagacctaccactcagcagttcatcgataccatcatcaaaaagtacggcacccacctgctcatctcagccacattgggaggggaggaggctttgaccatgtatatggacaaaagtcgcctcgacaggaagtcagggaatgccactcaaagtgttgaagctctgcaccagctcgcatcatcctactttgttgaccgtgatggtaccatgaggaggcttcatgagatccagatatcaactggagcaatcaaggtcacagagacacgcactgggcctctgggctgtaacagctatgacaatctggactctgtgagttccgtccttctgcaaagcacggagagcaaactgcaccttcaaggtcttcagataatctttcctcagtatctgcaagagaagtttgtccagtcggccttgagctatatcatgtgcaatggggagggggagtacctgtgccagaacagccagtgtcgctgccaatgtgccgaggagtttccgcagtgcaactgccccatcacggacatccagatcatggagtacacgctggccaacatggccaagtcttgggccgaagcttataaggacctggagaattcagatgagtttaaatcatttatgaagcgcctccccagcaaccacttcctgaccatcggaagcatccatcagcactggggcaatgactgggacctgcagaaccgctacaagctcctgcagagtgccacggaggcacagagacaaaagatccaacgcactgcccgcaagcttttcggcctcagtgtacgctgtcgccacaatcccaaccaccagctgcctagagagaggacaattcagcagtggcttgcaagggtccagtcactcctctactgtaatgagaatgggttttggggaaccttcctggagagccagcggagctgcgtgtgccacggcagcaccacgctgtgccagcgccccatcccctgcgtgataggcgggaacaacagctgcgccatgtgcagcctggccaacatctccctctgcggctcctgcaacaagggctacaagctgtatcgaggccgctgtgaaccacagaacgtggactcggagcggagcgagcagttcatcagctttgagactgacctggacttccaggacctggagctgaagtacctgctgcagaagatggactcacgcctctacgtccacaccaccttcatcagcaacgagatccgcctcgacaccttctttgaccctcggtggcgcaagcgcatgtccctcactctcaagagcaacaagaaccgcatggacttcatccacatggtgatcggcatgtccatgcgcatctgccagatgcgcaacagcagcctggaccccatgttctttgtctatgtcaacccctttagcgggagccattcggagggctggaacatgcccttcggggaatttggctacccacgctgggagaagatccgtctccaaaacagccagtgctacaactggactcttttgctgggcaatcggtggaaaacatttttcgagacggtccacatctacctacgtagtcggactcggctacctaccctactgcgaaatgagactggccagggccccgtggacctgtcggatccctccaagaggcagttctacatcaagatctcagacgtgcaggtgtttgggtatagcctgaggttcaacgccgacctcctgcgcagtgcagtgcagcaggtcaaccagtcctacacacagggcggccagttctattcctcttcgtcagtgatgctcctcttgttggatattcgggaccgaattaatcgcctggcccctcctgtggccccggggaaaccccagctggacttgttctcctgtatgctgaaacaccgcctgaaactgaccaacagcgagatcatcagggtgaaccacgccttggacctgtacaacacggagatcctcaaacagtcggaccagatgacagccaaactctgctaacccgggactccttgccatggacttttcctgttgttgtacacacacaacagaacaaaatgaagcaaaacaaaacaaaaaaacccacaaaaatttgtaaaatgtaattaatattcaaagaaaaggaggaaaatcttcatttgttggaaatgaaaacgttctagcaactgtataaaagcgttgggcatgtttgttatttctatactcactctgtcatgaagaagggtctcagccttttgtggagcattgagggagttgcttcttaggcctcaggtgctgtattgggggagaagggagaaagcatatgcaatgaattgtaaagatctctgctgtgcaggtgctaagattaaacactaaaaagaaagagagatatatgtaatgtacaactgacactgccatttttcctttttggaggaaatggacatagataaagaagatatttcttcggttaagattta

SEQ ID NO: 8102 - DNA, 2028 bp, Homo sapiens
  source 1..2028: mol_type = unassigned DNA
gctgttgcatatagtgctggggtggacctggtttcaggacaccagggagcctggggtcggctcacaaaacccccattgttccttttccatcttcctttagaaacctaaagatgtaatgttctccgggtcatcagcagcagattttattttgacttcaggtcattcactgttgagctctggagttggctcccattgtgttaggctctcattgctgttttcccatcatgtgttatctgcgccttttaaccctaaatgctttcgatctcatcaagaactcagaagtgattcttacccttttttcaagacaaaagggaccttgtttttcacactctatcagatgcacctaattaggggccgtgcccaagttcatgaagaggatcaaggttccagactacaaggaccggagtgtgtttggggtcccactgacggtcaacgtgcagcgcacaggacaaccgttgcctcagagcatccagcaggccatgcgatacctccggaaccattgtttggatcaggttgggctcttcagaaaatcgggggtcaagtcccggattcaggctctgcgccagatgaatgaaggtgccatagactgtgtcaactacgaaggacagtctgcttatgacgtggcagacatgctgaagcagtattttcgagatcttcctgagccactaatgacgaacaaactctcggaaacctttctacagatctaccaatatgtgcccaaggaccagcgcctgcaggccatcaaggctgccatcatgctgctgcctgacgagaaccgggaggttctgcagaccctgctttatttcctgagcgatgtcacagcagccgtaaaagaaaaccagatgaccccaaccaacctggccgtgtgcttagcgccttccctcttccatctcaacaccctgaagagagagaattcctctcccagggtaatgcaaagaaaacaaagtttgggcaaaccagatcagaaagatttgaatgaaaacctagctgccactcaagggctggcccatatgatcgccgagtgcaagaagcttttccaggttcccgaggaaatgagccgatgtcgtaattcctataccgaacaagagctgaagcccctcactctggaagcactcgggcacctgggtaatgatgactcagctgactaccaacacttcctccaggactgtgtggatggcctgtttaaagaagtcaaagagaagtttaaaggctgggtcagctactccacttcggagcaggctgagctgtcctataagaaggtgagcgaaggaccccctctgaggctttggaggtcagtcattgaagtccctgctgtgccagaggaaatcttaaagcgcctacttaaagaacagcacctctgggatgtagacctgttggattcaaaagtgatcgaaattctggacagccaaactgaaatttaccagtatgtccaaaacagtatggcacctcatcctgctcgagactacgttgttttaagaacctggaggactaatttacccaaaggagcctgtgcccttttactaacctctgtggatcacgatcgcgcacctgtggtgggtgtgagggttaatgtgctcttgtccaggtatttgattgaaccctgtgggccaggaaaatccaaactcacctacatgtgcagagttgacttaaggggccacatgccagaatggtacacaaaatcttttggacatttgtgtgcagctgaagttgtaaagatccgggattccttcagtaaccagaacactgaaaccaaagacaccaaatctaggtgatcactgaagcaacgcaaccgcttccaccaccatggtgtttgtttctagaacttttgccagtccttgaagaatgggttctgtgtctaatcctgaaacaaagaaaactacaagctggagtgtaggaattgactatagcaatttgatacatttttaaagctgcttcctgtttgttgagggtctgtattcatagaccttgactggaatatgtaagactgtgcaaaaaaaaaaaaaaaatttatgtgtattcttattcaaa

SEQ ID NO: 8103 - DNA, 3758 bp, Homo sapiens
  source 1..3758: mol_type = unassigned DNA
agttggcgcttcccggggccgcagtgccagccgcaatgccggcctcctgaaggcaggcgacagcctgcggccgggagcacagcgcggggcggagtaccgaggcatggtcgcggcgcccgggctgcgctgaaggcgtctgcgagcggatgggggaccccaaggcccacgtgatggcgcgccccctgcgagcccctctccggaggtcctttagcgatcacatcagggactccacggccagagccctggatgtcatttggaaaaacactagagacagacggctggcagaaattgaagccaaggaagcttgtgattggctacgggcaactggtttcccccagtatgcacagctttatgaagatttcctgttccccatcgatatttccttggtcaagagagagcatgattttttggacagagatgccattgaggctctatgcaggcgtctaaatactttaaacaaatgtgcggtgatgaagctagaaattagtcctcatcggaaacgaagtgacgattcagacgaggatgagccttgtgccatcagtggcaaatggactttccaaagggacagcaagaggtggtcccggcttgaagagtttgatgtcttttctccaaaacaagacctggtccctgggtccccagacgactcccacccgaaggacggccccagccccggaggcacgctgatggacctcagcgagcgccaggaggtgtcttccgtccgcagcctcagcagcactggcagcctccccagccacgcgccccccagcgaggatgctgccaccccccggactaactccgtcatcagcgtttgctcctccagcaacttggcaggcaatgacgactctttcggcagcctgccctctcccaaggaactgtccagcttcagcttcagcatgaaaggccacgaaaaaactgccaagtccaagacgcgcagtctgctgaaacggatggagagcctgaagctcaagagctcccatcacagcaagcacaaagcgccctcaaagctggggttgatcatcagcgggcccatcttgcaagaggggatggatgaggagaagctgaagcagctcaactgcgtggagatctccgccctcaatggcaaccgcatcaacgtccccatggtacgaaagaggagcgtttccaactccacgcagaccagcagcagcagcagccagtcggagaccagcagcgcggtcagcacgcccagccctgttacgaggacccggagcctcagtgcgtgcaacaagcgggtgggcatgtacttagagggcttcgatcctttcaatcagtcaacatttaacaacgtggtggagcagaactttaagaaccgcgagagctacccagaggacacggtgttctacatccctgaagatcacaagcctggcactttccccaaagctctcaccaatggcagtttctccccctcggggaataacggctctgtgaactggaggacgggaagcttccacggccctggccacatcagcctcaggagggaaaacagtagcgacagccccaaggaactgaagagacgcaattcttccagctccatgagcagccgcctgagcatctacgacaacgtgccgggctccatcctctactccagttcaggggacctggcggatctggagaacgaggacatcttccccgagctggacgacatcctctaccacgtgaaggggatgcagcggatagtcaatcagtggtcggagaagttttctgatgagggagattcggactcagccctggactcggtctctccctgcccgtcctctccaaaacagatacacctggatgtggacaacgaccgaaccacacccagcgacctggacagcacaggcaactccctgaatgaaccggaagagccctccgagatcccggaaagaagggattctggggttggggcttccctaaccaggtccaacaggcaccgactgagatggcacagtttccagagctcacatcggccaagcctcaactctgtatcactacagattaactgccagtctgtggcccagatgaacctgctgcagaaatactcactcctaaagctaacggccctgctggagaaatacacaccttctaacaagcatggttttagctgggccgtgcccaagttcatgaagaggatcaaggttccagactacaaggaccggagtgtgtttggggtcccactgacggtcaacgtgcagcgcacaggacaaccgttgcctcagagcatccagcaggccatgcgatacctccggaaccattgtttggatcaggttgggctcttcagaaaatcgggggtcaagtcccggattcaggctctgcgccagatgaatgaaggtgccatagactgtgtcaactacgaaggacagtctgcttatgacgtggcagacatgctgaagcagtattttcgagatcttcctgagccactaatgacgaacaaactctcggaaacctttctacagatctaccaatatgtgcccaaggaccagcgcctgcaggccatcaaggctgccatcatgctgctgcctgacgagaaccgggaggttctgcagaccctgctttatttcctgagcgatgtcacagcagccgtaaaagaaaaccagatgaccccaaccaacctggccgtgtgcttagcgccttccctcttccatctcaacaccctgaagagagagaattcctctcccagggtaatgcaaagaaaacaaagtttgggcaaaccagatcagaaagatttgaatgaaaacctagctgccactcaagggctggcccatatgatcgccgagtgcaagaagcttttccaggttcccgaggaaatgagccgatgtcgtaattcctataccgaacaagagctgaagcccctcactctggaagcactcgggcacctgggtaatgatgactcagctgactaccaacacttcctccaggactgtgtggatggcctgtttaaagaagtcaaagagaagtttaaaggctgggtcagctactccacttcggagcaggctgagctgtcctataagaaggtgagcgaaggaccccctctgaggctttggaggtcagtcattgaagtccctgctgtgccagaggaaatcttaaagcgcctacttaaagaacagcacctctgggatgtagacctgttggattcaaaagtgatcgaaattctggacagccaaactgaaatttaccagtatgtccaaaacagtatggcacctcatcctgctcgagactacgttgttttaagaacctggaggactaatttacccaaaggagcctgtgcccttttactaacctctgtggatcacgatcgcgcacctgtggtgggtgtgagggttaatgtgctcttgtccaggtatttgattgaaccctgtgggccaggaaaatccaaactcacctacatgtgcagagttgacttaaggggccacatgccagaatggtacacaaaatcttttggacatttgtgtgcagctgaagttgtaaagatccgggattccttcagtaaccagaacactgaaaccaaagacaccaaatctaggtgatcactgaagcaacgcaaccgcttccaccaccatggtgtttgtttctagaacttttgccagtccttgaagaatgggttctgtgtctaatcctgaaacaaagaaaactacaagctggagtgtaggaattgactatagcaatttgatacatttttaaagctgcttcctgtttgttgagggtctgtattcatagaccttgactggaatatgtaagactgtgcaaaaaaaaaaaaaaaa

SEQ ID NO: 8104 - DNA, 3556 bp, Homo sapiens
  source 1..3556: mol_type = unassigned DNA
actgacttcgtgccctccatgttccttgacagcctgggcctctcctactggattaatacctgatgagtacctgatcacgcaacagtgaaacaacacaagaaattgaagccaaggaagcttgtgattggctacgggcaactggtttcccccagtatgcacagctttatgaagatttcctgttccccatcgatatttccttggtcaagagagagcatgattttttggacagagatgccattgaggctctatgcaggcgtctaaatactttaaacaaatgtgcggtgatgaagctagaaattagtcctcatcggaaacgaagtgacgattcagacgaggatgagccttgtgccatcagtggcaaatggactttccaaagggacagcaagaggtggtcccggcttgaagagtttgatgtcttttctccaaaacaagacctggtccctgggtccccagacgactcccacccgaaggacggccccagccccggaggcacgctgatggacctcagcgagcgccaggaggtgtcttccgtccgcagcctcagcagcactggcagcctccccagccacgcgccccccagcgaggatgctgccaccccccggactaactccgtcatcagcgtttgctcctccagcaacttggcaggcaatgacgactctttcggcagcctgccctctcccaaggaactgtccagcttcagcttcagcatgaaaggccacgaaaaaactgccaagtccaagacgcgcagtctgctgaaacggatggagagcctgaagctcaagagctcccatcacagcaagcacaaagcgccctcaaagctggggttgatcatcagcgggcccatcttgcaagaggggatggatgaggagaagctgaagcagctcaactgcgtggagatctccgccctcaatggcaaccgcatcaacgtccccatggtacgaaagaggagcgtttccaactccacgcagaccagcagcagcagcagccagtcggagaccagcagcgcggtcagcacgcccagccctgttacgaggacccggagcctcagtgcgtgcaacaagcgggtgggcatgtacttagagggcttcgatcctttcaatcagtcaacatttaacaacgtggtggagcagaactttaagaaccgcgagagctacccagaggacacggtgttctacatccctgaagatcacaagcctggcactttccccaaagctctcaccaatggcagtttctccccctcggggaataacggctctgtgaactggaggacgggaagcttccacggccctggccacatcagcctcaggagggaaaacagtagcgacagccccaaggaactgaagagacgcaattcttccagctccatgagcagccgcctgagcatctacgacaacgtgccgggctccatcctctactccagttcaggggacctggcggatctggagaacgaggacatcttccccgagctggacgacatcctctaccacgtgaaggggatgcagcggatagtcaatcagtggtcggagaagttttctgatgagggagattcggactcagccctggactcggtctctccctgcccgtcctctccaaaacagatacacctggatgtggacaacgaccgaaccacacccagcgacctggacagcacaggcaactccctgaatgaaccggaagagccctccgagatcccggaaagaagggattctggggttggggcttccctaaccaggtccaacaggcaccgactgagatggcacagtttccagagctcacatcggccaagcctcaactctgtatcactacagattaactgccagtctgtggcccagatgaacctgctgcagaaatactcactcctaaagctaacggccctgctggagaaatacacaccttctaacaagcatggttttagctgggccgtgcccaagttcatgaagaggatcaaggttccagactacaaggaccggagtgtgtttggggtcccactgacggtcaacgtgcagcgcacaggacaaccgttgcctcagagcatccagcaggccatgcgatacctccggaaccattgtttggatcaggttgggctcttcagaaaatcgggggtcaagtcccggattcaggctctgcgccagatgaatgaaggtgccatagactgtgtcaactacgaaggacagtctgcttatgacgtggcagacatgctgaagcagtattttcgagatcttcctgagccactaatgacgaacaaactctcggaaacctttctacagatctaccaatatgtgcccaaggaccagcgcctgcaggccatcaaggctgccatcatgctgctgcctgacgagaaccgggaggttctgcagaccctgctttatttcctgagcgatgtcacagcagccgtaaaagaaaaccagatgaccccaaccaacctggccgtgtgcttagcgccttccctcttccatctcaacaccctgaagagagagaattcctctcccagggtaatgcaaagaaaacaaagtttgggcaaaccagatcagaaagatttgaatgaaaacctagctgccactcaagggctggcccatatgatcgccgagtgcaagaagcttttccaggttcccgaggaaatgagccgatgtcgtaattcctataccgaacaagagctgaagcccctcactctggaagcactcgggcacctgggtaatgatgactcagctgactaccaacacttcctccaggactgtgtggatggcctgtttaaagaagtcaaagagaagtttaaaggctgggtcagctactccacttcggagcaggctgagctgtcctataagaaggtgagcgaaggaccccctctgaggctttggaggtcagtcattgaagtccctgctgtgccagaggaaatcttaaagcgcctacttaaagaacagcacctctgggatgtagacctgttggattcaaaagtgatcgaaattctggacagccaaactgaaatttaccagtatgtccaaaacagtatggcacctcatcctgctcgagactacgttgttttaagaacctggaggactaatttacccaaaggagcctgtgcccttttactaacctctgtggatcacgatcgcgcacctgtggtgggtgtgagggttaatgtgctcttgtccaggtatttgattgaaccctgtgggccaggaaaatccaaactcacctacatgtgcagagttgacttaaggggccacatgccagaatggtacacaaaatcttttggacatttgtgtgcagctgaagttgtaaagatccgggattccttcagtaaccagaacactgaaaccaaagacaccaaatctaggtgatcactgaagcaacgcaaccgcttccaccaccatggtgtttgtttctagaacttttgccagtccttgaagaatgggttctgtgtctaatcctgaaacaaagaaaactacaagctggagtgtaggaattgactatagcaatttgatacatttttaaagctgcttcctgtttgttgagggtctgtattcatagaccttgactggaatatgtaagactgtgc

SEQ ID NO: 8105 - DNA, 1890 bp, Homo sapiens
  source 1..1890: mol_type = unassigned DNA
cgggtggaggaagggaggattgctgcaccaacctttcctcggcgcctgtttactggcaccgtcgcatccattccacgccgatcctccgcagtccccctatcctgccagccgctcctccttggggcaggggcggcgcgagccacaggggcgtgcccgcgagcgggtcggggctgcggagagaacgggccggggtaaaaacccgacggctgcccgcgggtgggcggggcgcgcagagccggtgggaggccgcggtggcagcagtcgcccccgcgcatcgagggacccagggactcgcgcagatggcacgcggccacctcggtcctgccggggagccccatttccaaccgaggcaactgaggttcccaaagcgccagctacccgccggggtctggagagcgccggggcccggccgccccgcccagccagaggtgccccgccccaagcctggcgcacctggccccgccccgccgggaccccgcccccgccctaatcagagctggttccgcgccgcggccgccgcgacaggtgcagcagagccgagccggccgcgctccgaacggcgcctcccgccccaccatgggcaacagcgcgagccgcagcgacttcgagtgggtctacaccgaccagccgcacacgcagcggcgcaaggagatactggccaagtacccggccatcaaggccctgatgcggccagacccgcgcctcaagtgggcggtgctggtgctggtgctggtgcagatgctggcctgctggctggtgcgcgggctggcctggcgctggctgctgttctgggcctacgcctttggtggctgcgtgaaccactcgctgacgctggccatccacgacatctcgcacaacgcggccttcggcacgggccgtgcggcacgcaaccgctggctggccgtgttcgccaacctgcccgtgggtgtgccctacgccgcctccttcaagaagtaccacgtggaccaccaccgctacctgggcggcgacgggctggacgtggacgtgcccacgcgtctggagggctggttcttctgcacacccgcccgcaagctgctctggctggtgctgcagcccttcttctactcactacggccgctctgcgtccaccccaaggccgtgacccgcatggaggtgctcaacacgctggtgcagctggcggccgacctggccatctttgccctttgggggctcaagcccgtggtctacctgctggccagctccttcctgggcctgggcctgcaccccatctcgggccacttcgtggccgagcactacatgttcctcaagggccacgagacctactcctactatgggcctctcaactggatcaccttcaatgtgggctaccacgtggagcaccacgacttccccagcatcccgggctacaacctgccgctggtgcggaagatcgcgcccgagtactacgaccacctgccgcagcaccactcctgggtgaaggtgctctgggattttgtgtttgaggactccctggggccctatgccagggtgaagcgggtgtacaggctggcaaaagatggtctgtgagcccgggctgcctcctggtggtggccattgtcccccatcggcccctcagccttgcaccccagcactgagaagctacatttccttcctgtgctctggactgctgcccttgtccccgaggagtgtcccgcgcagccacacctggcaacagcagtgtgggctgcagggctccgtctgcacgtggacttgccctggaccttgagtgtggccctccctttctgggcctccccaggtgaggcctggccctgccccaccatgacctgggtgctctgagcccacggttcccacggagctgacttctccggggtgcctgtgccctacattaaacccggcgtttgtttcaca

SEQ ID NO: 8106 - DNA, 3260 bp, Homo sapiens
  source 1..3260: mol_type = unassigned DNA
cgcagctgcaggaggcgcccggcccggcggagcagccctagccgccaccgtcgctctcgcagctctcgtcgccactgccaccgccgccgccgtcactgcgtcctggctccggctcccgcgccctcccggccggccatgcagccccgccgcgcccaggcgcccggtgcgcagctgctgcccgcgctggccctgctgctgctgctgctcggagcggggccccgaggcagctccctggccaacccggtgcccgccgcgcccctgtctgcgcccgggccgtgcgccgcgcagccctgccggaatgggggtgtgtgcacctcgcgccctgagccggacccgcagcacccggcccccgccggcgagcctggctacagctgcacctgccccgccgggatctccggcgccaactgccagcttgttgcagatccttgtgccagcaacccttgtcaccatggcaactgcagcagcagcagcagcagcagcagcgatggctacctctgcatttgcaatgaaggctatgaaggtcccaactgtgaacaggcacttcccagtctcccagccactggctggaccgaatccatggcaccccgacagcttcagcctgttcctgctactcaggagcctgacaaaatcctgcctcgctctcaggcaacggtgacactgcctacctggcagccgaaaacagggcagaaagttgtagaaatgaaatgggatcaagtggaggtgatcccagatattgcctgtgggaatgccagttctaacagctctgcgggtggccgcctggtatcctttgaagtgccacagaacacctcagtcaagattcggcaagatgccactgcctcactgattttgctctggaaggtcacggccacaggattccaacagtgctccctcatagatggacgaagtgtgaccccccttcaggcttcagggggactggtcctcctggaggagatgctcgccttggggaataatcactttattggttttgtgaatgattctgtgactaagtctattgtggctttgcgcttaactctggtggtgaaggtcagcacctgtgtgccgggggagagtcacgcaaatgacttggagtgttcaggaaaaggaaaatgcaccacgaagccgtcagaggcaactttttcctgtacctgtgaggagcagtacgtgggtactttctgtgaagaatacgatgcttgccagaggaaaccttgccaaaacaacgcgagctgtattgatgcaaatgaaaagcaagatgggagcaatttcacctgtgtttgccttcctggttatactggagagctttgccagtccaagattgattactgcatcctagacccatgcagaaatggagcaacatgcatttccagtctcagtggattcacctgccagtgtccagaaggatacttcggatctgcttgtgaagaaaaggtggacccctgcgcctcgtctccgtgccagaacaacggcacctgctatgtggacggggtacactttacctgcaactgcagcccgggcttcacagggccgacctgtgcccagcttattgacttctgtgccctcagcccctgtgctcatggcacgtgccgcagcgtgggcaccagctacaaatgcctctgtgatccaggttaccatggcctctactgtgaggaggaatataatgagtgcctctccgctccatgcctgaatgcagccacctgcagggacctcgttaatggctatgagtgtgtgtgcctggcagaatacaaaggaacacactgtgaattgtacaaggatccctgcgctaacgtcagctgtctgaacggagccacctgtgacagcgacggcctgaatggcacgtgcatctgtgcacccgggtttacaggtgaagagtgcgacattgacataaatgaatgtgacagtaacccctgccaccatggtgggagctgcctggaccagcccaatggttataactgccactgcccgcatggttgggtgggagcaaactgtgagatccacctccaatggaagtccgggcacatggcggagagcctcaccaacatgccacggcactccctctacatcatcattggagccctctgcgtggccttcatccttatgctgatcatcctgatcgtggggatttgccgcatcagccgcattgaataccagggttcttccaggccagcctatgaggagttctacaactgccgcagcatcgacagcgagttcagcaatgccattgcatccatccggcatgccaggtttggaaagaaatcccggcctgcaatgtatgatgtgagccccatcgcctatgaagattacagtcctgatgacaaacccttggtcacactgattaaaactaaagatttgtaatctttttttggattatttttcaaaaagatgagatactacactcatttaaatatttttaagaaaataaaaagcttaagaaatttaaaatgctagctgctcaagagttttcagtagaatatttaagaactaattttctgcagcttttagtttggaaaaaatattttaaaaacaaaatttgtgaaacctatagacgatgttttaatgtaccttcagctctctaaactgtgtgcttctactagtgtgtgctcttttcactgtagacactatcacgagacccagattaatttctgtggttgttacagaataagtctaatcaaggagaagtttctgtttgacgtttgagtgccggctttctgagtagagttaggaaaaccacgtaacgtagcatatgatgtataatagagtatacccgttacttaaaaagaagtctgaaatgttcgttttgtggaaaagaaactagttaaatttactattcctaacccgaatgaaattagcctttgccttattctgtgcatgggtaagtaacttatttctgcactgttttgttgaactttgtggaaacattctttcgagtttgtttttgtcattttcgtaacagtcgtcgaactaggcctcaaaaacatacgtaacgaaaaggcctagcgaggcaaattctgattgatttgaatctatatttttctttaaaaagtcaagggttctatattgtgagtaaattaaatttacatttgagttgtttgttgctaagaggtagtaaatgtaagagagtactggttccttcagtagtgagtatttctcatagtgcagctttatttatctccaggatgtttttgtggctgtatttgattgatatgtgcttcttctgattcttgctaatttccaaccatattgaataaatgtgatcaagtcaagga

SEQ ID NO: 8107 - DNA, 2128 bp, Homo sapiens
  source 1..2128: mol_type = unassigned DNA
aaagctttactgagcccctgctgcacgccaggagccctgtgctgggggagcggatctgtgcggagtctactgtgatcttctccaggagcactggggagaatgggcagctgttgggatgttgggaagtggtcaggagtctctgggaagaggtaatatgtgggctaggaacacatttccaaggtggagaaggagacaaagcttgggaggattcggcaagatgccactgcctcactgattttgctctggaaggtcacggccacaggattccaacagtgctccctcatagatggacgaagtgtgaccccccttcaggcttcagggggactggtcctcctggaggagatgctcgccttggggaataatcactttattggttttgtgaatgattctgtgactaagtctattgtggctttgcgcttaactctggtggtgaaggtcagcacctgtgtgccgggggagagtcacgcaaatgacttggagtgttcaggaaaaggaaaatgcaccacgaagccgtcagaggcaactttttcctgtacctgtgaggagcagtacgtgggtactttctgtgaagaatacgatgcttgccagaggaaaccttgccaaaacaacgcgagctgtattgatgcaaatgaaaagcaagatgggagcaatttcacctgtgtttgccttcctggttatactggagagctttgccagtccaagattgattactgcatcctagacccatgcagaaatggagcaacatgcatttccagtctcagtggattcacctgccagtgtccagaaggatacttcggatctgcttgtgaagaaaaggtggacccctgcgcctcgtctccgtgccagaacaacggcacctgctgcagcccgggcttcacagggccgacctgtgcccagcttattgacttctgtgccctcagcccctgtgctcatggcacgtgccgcagcgtgggcaccagctacaaatgcctctgtgatccaggttaccatggcctctactgtgaggaggaatataatgagtgcctctccgctccatgcctgaatgcagccacctgcagggacctcgttaatggctatgagtgtgtgtgcctggcagaatacaaaggaacacactgtgaattgtacaaggatccctgcgctaacgtcagctgtctgaacggagccacctgtgacagcgacggcctgaatggcacgtgcatctgtgcacccgggtttacaggtgaagagtgcgacattgacataaatgaatgtgacagtaacccctgccaccatggtgggagctgcctggaccagcccaatggttataactgccactgcccgcatggttgggtgggagcaaactgtgagatccacctccaatggaagtccgggcacatggcggagagcctcaccaacatgccacggcactccctctacatcatcattggagccctctgcgtggccttcatccttatgctgatcatcctgatcgtggggatttgccgcatcagccgcattgaataccagggttcttccaggccagcctatgaggagttctacaactgccgcagcatcgacagcgagttcagcaatgccattgcatccatccggcatgccaggtttggaaagaaatcccggcctgcaatgtatgatgtgagccccatcgcctatgaagattacagtcctgatgacaaacccttggtcacactgattaaaactaaagatttgtaatctttttttggattatttttcaaaaagatgagatactacactcatttaaatatttttaagaaaataaaaagcttaagaaatttaaaatgctagctgctcaagagttttcagtagaatatttaagaactaattttctgcagcttttagtttggaaaaaatattttaaaaacaaaatttgtgaaacctatagacgatgttttaatgtaccttcagctctctaaactgtgtgcttctactagtgtgtgctcttttcactgtagacactatcacgagacccagattaatttctgtggttgttacagaataagtctaatcaaggagaagtttctgtttgacgtttgagtgccggctttctgagtagagttaggaaaaccacgtaacgtagcatatgatgtataatagagtatacccgttactt

SEQ ID NO: 8108 - DNA, 1324 bp, Homo sapiens
  source 1..1324: mol_type = unassigned DNA
ggcggtggagagcgcagcgcgcagcccggtgcagccctggctttcccctcgctgcgcgcccgcgccccctttcgcgtccgcaaccagaagcccagtgcggcgccaggagccggacccgcgcccgcaccgctcccgggaccgcgaccccggccgcccagagatgaccgcgaccgaagccctcctgcgcgtcctcttgctcctgctggctttcggccacagcacctatggggctgaatgcttcccggcctgcaacccccaaaatggattctgcgaggatgacaatgtttgcaggtgccagcctggctggcagggtcccctttgtgaccagtgcgtgacctctcccggctgccttcacggactctgtggagaacccgggcagtgcatttgcaccgacggctgggacggggagctctgtgatagagatgttcgggcctgctcctcggccccctgtgccaacaacaggacctgcgtgagcctggacgatggcctctatgaatgctcctgtgcccccgggtactcgggaaaggactgccagaaaaaggacgggccctgtgtgatcaacggctccccctgccagcacggaggcacctgcgtggatgatgagggccgggcctcccatgcctcctgcctgtgcccccctggcttctcaggcaatttctgcgagatcgtggccaacagctgcacccccaacccatgcgagaacgacggcgtctgcactgacattgggggcgacttccgctgccggtgcccagccggcttcatcgacaagacctgcagccgcccggtgaccaactgcgccagcagcccgtgccagaacgggggcacctgcctgcagcacacccagggccaggccatctgcttcaccatcctgggcgtgctcaccagcctggtggtgctgggcactgtgggtatcgtcttcctcaacaagtgcgagacctgggtgtccaacctgcgctacaaccacatgctgcggaagaagaagaacctgctgcttcagtacaacagcggggaggacctggccgtcaacatcatcttccccgagaagatcgacatgaccaccttcagcaaggaggccggcgacgaggagatctaagcagcgttcccacagccccctctagattcttggagttccgcagagcttactatacgcggtctgtcctaatctttgtggtgttcgctatctcttgtgtcaaatctggtgaacgctacgcttacatatattgtctttgtgctgctgtgtgacaaacgcaatgcaaaaacaatcctctttctctctcttaatgcatgatacagaataataataagaatttcatctttaaatgag

SEQ ID NO: 8109 - DNA, 1700 bp, Homo sapiens
  source 1..1700: mol_type = unassigned DNA
ggggcggggggcgggggccgcgaggggggaggcggtacgaaaagggcggcgcgcgcggcggcggcggcagctccccggcagcggcggtggagagcgcagcgcgcagcccggtgcagccctggctttcccctcgctgcgcgcccgcgccccctttcgcgtccgcaaccagaagcccagtgcggcgccaggagccggacccgcgcccgcaccgctcccgggaccgcgaccccggccgcccagagatgaccgcgaccgaagccctcctgcgcgtcctcttgctcctgctggctttcggccacagcacctatggggctgaatgcttcccggcctgcaacccccaaaatggattctgcgaggatgacaatgtttgcaggtgccagcctggctggcagggtcccctttgtgaccagtgcgtgacctctcccggctgccttcacggactctgtggagaacccgggcagtgcatttgcaccgacggctgggacggggagctctgtgatagagatgttcgggcctgctcctcggccccctgtgccaacaacaggacctgcgtgagcctggacgatggcctctatgaatgctcctgtgcccccgggtactcgggaaaggactgccagaaaaaggacgggccctgtgtgatcaacggctccccctgccagcacggaggcacctgcgtggatgatgagggccgggcctcccatgcctcctgcctgtgcccccctggcttctcaggcaatttctgcgagatcgtggccaacagctgcacccccaacccatgcgagaacgacggcgtctgcactgacattgggggcgacttccgctgccggtgcccagccggcttcatcgacaagacctgcagccgcccggtgaccaactgcgccagcagcccgtgccagaacgggggcacctgcctgcagcacacccaggtgagctacgagtgtctgtgcaagcccgagttcacaggtctcacctgtgtcaagaagcgcgcgctgagcccccagcaggtcacccgtctgcccagcggctatgggctggcctaccgcctgacccctggggtgcacgagctgccggtgcagcagccggagcaccgcatcctgaaggtgtccatgaaagagctcaacaagaaaacccctctcctcaccgagggccaggccatctgcttcaccatcctgggcgtgctcaccagcctggtggtgctgggcactgtgggtatcgtcttcctcaacaagtgcgagacctgggtgtccaacctgcgctacaaccacatgctgcggaagaagaagaacctgctgcttcagtacaacagcggggaggacctggccgtcaacatcatcttccccgagaagatcgacatgaccaccttcagcaaggaggccggcgacgaggagatctaagcagcgttcccacagccccctctagattcttggagttccgcagagcttactatacgcggtctgtcctaatctttgtggtgttcgctatctcttgtgtcaaatctggtgaacgctacgcttacatatattgtctttgtgctgctgtgtgacaaacgcaatgcaaaaacaatcctctttctctctcttaatgcatgatacagaataataataagaatttcatctttaaatgagtaagagaaataagtatgttattctaaaatctaaactcaaatgaaatttcaaaaaagaccaaaaaaaaacaaggca

SEQ ID NO: 8110 - DNA, 555 bp, Homo sapiens
  source 1..555: mol_type = unassigned DNA
aatggggaggaggggtgtctgaggagcactccctctccctgggagctctgcagaggaagagggtctctggcaatcagcatcctctacctccacctctccagcgggcgacccctcagagaaggtctcccacgataagtgtttcggtgttcctgcgtgcggatttgtgctctccggggaggtctgcggcccagaagcccagtgcggcgccaggagccggacccgcgcccgcaccgctcccgggaccgcgaccccggccgcccagagatgaccgcgaccgaagccctcctgcgcgtcctcttgctcctgctggctttcggccacagcacctatggggctgaatgcttcccggcctgcaacccccaaaatggattctgcgaggatgacaatgtttgcaggtgccagcctggctggcagggtcccctttgtgaccagtgcgtgacctctcccggctgccttcacggactctgtggagaacccgggcagtgcatttgcaccgacggctgggacggggagctctgtgatagagatgttcgggcctgctcctcggccccctgt

SEQ ID NO: 8111 - DNA, 2380 bp, Homo sapiens
  source 1..2380: mol_type = unassigned DNA
agatataaggcttggaagccagcagctgcgactcccgagacccccccaccagaaggccatggtctccccacggatgtccgggctcctctcccagactgtgatcctagcgctcattttcctcccccagacacggcccgctggcgtcttcgagctgcagatccactctttcgggccgggtccaggccctggggccccgcggtccccctgcagcgcccggctcccctgccgcctcttcttcagagtctgcctgaagcctgggctctcagaggaggccgccgagtccccgtgcgccctgggcgcggcgctgagtgcgcgcggaccggtctacaccgagcagcccggagcgcccgcgcctgatctcccactgcccgacggcctcttgcaggtgcccttccgggacgcctggcctggcaccttctctttcatcatcgaaacctggagagaggagttaggagaccagattggagggcccgcctggagcctgctggcgcgcgtggctggcaggcggcgcttggcagccggaggcccgtgggcccgggacattcagcgcgcaggcgcctgggagctgcgcttctcgtaccgcgcgcgctgcgagccgcctgccgtcgggaccgcgtgcacgcgcctctgccgtccgcgcagcgccccctcgcggtgcggtccgggactgcgcccctgcgcaccgctcgaggacgaatgtgaggcgccgctggtgtgccgagcaggctgcagccctgagcatggcttctgtgaacagcccggtgaatgccgatgcctagagggctggactggacccctctgcacggtccctgtctccaccagcagctgcctcagccccaggggcccgtcctctgctaccaccggatgccttgtccctgggcctgggccctgtgacgggaacccgtgtgccaatggaggcagctgtagtgagacacccaggtcctttgaatgcacctgcccgcgtgggttctacgggctgcggtgtgaggtgagcggggtgacatgtgcagatggaccctgcttcaacggcggcttgtgtgtcgggggtgcagaccctgactctgcctacatctgccactgcccacccggtttccaaggctccaactgtgagaagagggtggaccggtgcagcctgcagccatgccgcaatggcggactctgcctggacctgggccacgccctgcgctgccgctgccgcgccggcttcgcgggtcctcgctgcgagcacgacctggacgactgcgcgggccgcgcctgcgctaacggcggcacgtgtgtggagggcggcggcgcgcaccgctgctcctgcgcgctgggcttcggcggccgcgactgccgcgagcgcgcggacccgtgcgccgcgcgcccctgtgctcacggcggccgctgctacgcccacttctccggcctcgtctgcgcttgcgctcccggctacatgggagcgcggtgtgagttcccagtgcaccccgacggcgcaagcgccttgcccgcggccccgccgggcctcaggcccggggaccctcagcgctaccttttgcctccggctctgggactgctcgtggccgcgggcgtggccggcgctgcgctcttgctggtccacgtgcgccgccgtggccactcccaggatgctgggtctcgcttgctggctgggaccccggagccgtcagtccacgcactcccggatgcactcaacaacctaaggacgcaggagggttccggggatggtccgagctcgtccgtagattggaatcgccctgaagatgtagaccctcaagggatttatgtcatatctgctccttccatctacgctcgggaggtagcgacgccccttttccccccgctacacactgggcgcgctgggcagaggcagcacctgctttttccctacccttcctcgattctgtccgtgaaatgaattgggtagagtctctggaaggttttaagcccattttcagttctaacttactttcatcctattttgcatccctcttatcgttttgagctacctgccatcttctctttgaaaaacctatgggcttgaggaggtcacgatgccgactccgccagagcttttccactgattgtactcagcggggaggcaggggaggcagaggggcagcctctctaatgcttcctactcattttgtttctaggcctgacgcgtctcctccatccgcacctggagtcagagcgtggatttttgtatttgctcggtggtgcccagtctctgccccagaggctttggagttcaatcttgaaggggtgtctgggggaactttactgttgcaagttgtaaataatggttatttatatcctattttttctcaccccatctctctagaaacacctataaaggctattattgtgatcagttttgact

SEQ ID NO: 8112 - DNA, 2043 bp, Homo sapiens
  source 1..2043: mol_type = unassigned DNA
agatataaggcttggaagccagcagctgcgactcccgagacccccccaccagaaggccatggtctccccacggatgtccgggctcctctcccagactgtgatcctagcgctcattttcctcccccagacacggcccgctggcgtcttcgagctgcagatccactctttcgggccgggtccaggccctggggccccgcggtccccctgcagcgcccggctcccctgccgcctcttcttcagagtctgcctgaagcctgggctctcagaggaggccgccgagtccccgtgcgccctgggcgcggcgctgagtgcgcgcggaccggtctacaccgagcagcccggagcgcccgcgcctgatctcccactgcccgacggcctcttgcaggtgcccttccgggacgcctggcctggcaccttctctttcatcatcgaaacctggagagaggagttaggagaccagattggagggcccgcctggagcctgctggcgcgcgtggctggcaggcggcgcttggcagccggaggcccgtgggcccgggacattcagcgcgcaggcgcctgggagctgcgcttctcgtaccgcgcgcgctgcgagccgcctgccgtcgggaccgcgtgcacgcgcctctgccgtccgcgcagcgccccctcgcggtgcggtccgggactgcgcccctgcgcaccgctcgaggacgaatgtgaggcgccgctggtgtgccgagcaggctgcagccctgagcatggcttctgtgaacagcccggtgaatgccgatgcctagagggctggactggacccctctgcacggtccctgtctccaccagcagctgcctcagccccaggggcccgtcctctgctaccaccggatgccttgtccctgggcctgggccctgtgacgggaacccgtgtgccaatggaggcagctgtagtgagacacccaggtcctttgaatgcacctgcccgcgtgggttctacgggctgcggtgtgaggtgagcggggtgacatgtgcagatggaccctgcttcaacggcggcttgtgtgtcgggggtgcagaccctgactctgcctacatctgccactgcccacccggtttccaaggctccaactgtgagaagagggtggaccggtgcagcctgcagccatgccgcaatggcggactctgcctggacctgggccacgccctgcgctgccgctgccgcgccggcttcgcgggtcctcgctgcgagcacgacctggacgactgcgcgggccgcgcctgcgctaacggcggcacgtgtgtggagggcggcggcgcgcaccgctgctcctgcgcgctgggcttcggcggccgcgactgccgcgagcgcgcggacccgtgcgccgcgcgcccctgtgctcacggcggccgctgctacgcccacttctccggcctcgtctgcgcttgcgctcccggctacatgggagcgcggtgtgagttcccagtgcaccccgacggcgcaagcgccttgcccgcggccccgccgggcctcaggcccggggaccctcagcgctaccttttgcctccggctctgggactgctcgtggccgcgggcgtggccggcgctgcgctcttgctggtccacgtgcgccgccgtggccactcccaggatgctgggtctcgcttgctggctgggaccccggagccgtcagtccacgcactcccggatgcactcaacaacctaaggacgcaggagggttccggggatggtccgagctcgtccgtagattggaatcgccctgaagatgtagaccctcaagggatttatgtcatatctgctccttccatctacgctcgggaggcctgacgcgtctcctccatccgcacctggagtcagagcgtggatttttgtatttgctcggtggtgcccagtctctgccccagaggctttggagttcaatcttgaaggggtgtctgggggaactttactgttgcaagttgtaaataatggttatttatatcctattttttctcaccccatctctctagaaacacctataaaggctattattgtgatcagttttgact

SEQ ID NO: 8113 - DNA, 3339 bp, Homo sapiens
  source 1..3339: mol_type = unassigned DNA
gccgccttggtgcagcgtacaccggcactagcccgcttgcagccccaggattagacagaagacgcgtcctcggcgcggtcgccgcccagccgtagtcacctggattacctacagcggcagctgcagcggagccagcgagaaggccaaaggggagcagcgtcccgagaggagcgcctcttttcagggaccccgccggctggcggacgcgcgggaaagcggcgtcgcgaacagagccagattgagggcccgcgggtggagagagcgacgcccgaggggatggcggcagcgtcccggagcgcctctggctgggcgctactgctgctggtggcactttggcagcagcgcgcggccggctccggcgtcttccagctgcagctgcaggagttcatcaacgagcgcggcgtactggccagtgggcggccttgcgagcccggctgccggactttcttccgcgtctgccttaagcacttccaggcggtcgtctcgcccggaccctgcaccttcgggaccgtctccacgccggtattgggcaccaactccttcgctgtccgggacgacagtagcggcggggggcgcaaccctctccaactgcccttcaatttcacctggccgggtaccttctcgctcatcatcgaagcttggcacgcgccaggagacgacctgcggccagaggccttgccaccagatgcactcatcagcaagatcgccatccagggctccctagctgtgggtcagaactggttattggatgagcaaaccagcaccctcacaaggctgcgctactcttaccgggtcatctgcagtgacaactactatggagacaactgctcccgcctgtgcaagaagcgcaatgaccacttcggccactatgtgtgccagccagatggcaacttgtcctgcctgcccggttggactggggaatattgccaacagcctatctgtctttcgggctgtcatgaacagaatggctactgcagcaagccagcagagtgcctctgccgcccaggctggcagggccggctgtgtaacgaatgcatcccccacaatggctgtcgccacggcacctgcagcactccctggcaatgtacttgtgatgagggctggggaggcctgttttgtgaccaagatctcaactactgcacccaccactccccatgcaagaatggggcaacgtgctccaacagtgggcagcgaagctacacctgcacctgtcgcccaggctacactggtgtggactgtgagctggagctcagcgagtgtgacagcaacccctgtcgcaatggaggcagctgtaaggaccaggaggatggctaccactgcctgtgtcctccgggctactatggcctgcattgtgaacacagcaccttgagctgcgccgactccccctgcttcaatgggggctcctgccgggagcgcaaccagggggccaactatgcttgtgaatgtccccccaacttcaccggctccaactgcgagaagaaagtggacaggtgcaccagcaacccctgtgccaacgggggacagtgcctgaaccgaggtccaagccgcatgtgccgctgccgtcctggattcacgggcacctactgtgaactccacgtcagcgactgtgcccgtaacccttgcgcccacggtggcacttgccatgacctggagaatgggctcatgtgcacctgccctgccggcttctctggccgacgctgtgaggtgcggacatccatcgatgcctgtgcctcgagtccctgcttcaacagggccacctgctacaccgacctctccacagacacctttgtgtgcaactgcccttatggctttgtgggcagccgctgcgagttccccgtgggcttgccgcccagcttcccctgggtggccgtctcgctgggtgtggggctggcagtgctgctggtactgctgggcatggtggcagtggctgtgcggcagctgcggcttcgacggccggacgacggcagcagggaagccatgaacaacttgtcggacttccagaaggacaacctgattcctgccgcccagcttaaaaacacaaaccagaagaaggagctggaagtggactgtggcctggacaagtccaactgtggcaaacagcaaaaccacacattggactataatctggccccagggcccctggggcgggggaccatgccaggaaagtttccccacagtgacaagagcttaggagagaaggcgccactgcggttacacagtgaaaagccagagtgtcggatatcagcgatatgctcccccagggactccatgtaccagtctgtgtgtttgatatcagaggagaggaatgaatgtgtcattgccacggaggtataaggcaggagcctacctggacatccctgctcagccccgcggctggaccttccttctgcattgtttacattgcatcctggatgggacgtttttcatatgcaacgtgctgctctcaggaggaggagggaatggcaggaaccggacagactgtgaacttgccaagagatgcaatacccttccacacctttgggtgtctgtctggcatcagattggcagctgcaccaaccagaggaacagaagagaagagagatgccactgggcactgccctgccagtagtggccttcagggggctccttccggggctccggcctgttttccagagagagtggcagtagccccatggggcccggagctgctgtggcctccactggcatccgtgtttccaaaagtgcctttggcccaggctccacggcgacagttgggcccaaatcagaaaggagagagggggccaatgagggcagggcctcctgtgggctggaaaaccactgggtgcgtctcttgctggggtttgccctggaggtgaggtgagtgctcgagggaggggagtgctttctgccccatgcctccaactactgtatgcaggcctggctctctggtctaggccctttgggcaagaatgtccgtctacccggcttccaccaccctctggccctgggcttctgtaagcagacaggcagagggcctgcccctcccaccagccaagggtgccaggcctaactggggcactcagggcagtgtgttggaaattccactgagggggaaatcaggtgctgcggccgcctgggccctttcctccctcaagcccatctccacaacctcgagcctgggctctggtccactactgccccagaccaccctcaaagctggtcttcagaaatcaataatatgagtttttattttgtttttttttttttttttgtagtttattttggagtctagtatttcaataatttaagaatcagaagcactgacctttctacattttataacattattttgtatataat

SEQ ID NO: 8114 - DNA, 5868 bp, Homo sapiens
  source 1..5868: mol_type = unassigned DNA
tactcacccggcaggccgctctcctcggtgcagacagcacagggaggagggggaagcggctctgccgggaacagggagggacctccagggaagcgaaactgaaactttgcgcccagtccgcagggcgggccgcgcctttaccgcccagctgcctcccggagcccccgcgccctcccgacgcgcagagccatggcctcccacctgcgcccgccgtccccgctcctcgtgcgggtgtacaagtccggcccccgagtacgaaggaagctggagagctacttccagagctctaagtcctcgggcggcggggagtgcacggtcagcacccaggaacacgaagccccgggcaccttccgggtggagttcagtgaaagggcagctaaggagagagtgttgaaaaaaggagagcaccaaatacttgttgacgaaaaacctgtgcccattttcctggtacccactgaaaattcaataaagaagaacacgagacctcaaatttcttcactgacacaatcacaagcagaaacaccgtctggtgatatgcatcaacatgaaggacatattcctaatgctgtggattcctgtctccaaaagatctttcttactgtaacagctgacctgaactgtaacctgttctccaaagagcagagggcatacataaccacactgtgccctagtatcagaaaaatggaaggtcacgatggaattgagaaggtgtgtggtgacttccaagacattgaaagaatacatcaatttttgagtgagcagttcctggaaagtgagcagaaacaacaattttccccttcaatgacagagaggaagccactcagtcagcaggagagggacagctgcatttctccttctgaaccagaaaccaaggcagaacaaaaaagcaactattttgaagttcccttgccttactttgaatactttaaatatatctgtcctgataaaatcaactcaatagagaaaagatttggtgtaaacattgaaatccaggagagttctccaaatatggtctgtttagatttcacctcaagtcgatcaggtgacctggaagcagctcgtgagtcttttgctagtgaatttcagaagaacacagaacctctgaagcaagaatgtgtctctttagcagacagtaagcaggcaaataaattcaaacaggaattgaatcaccagtttacaaagctccttataaaggagaaaggaggcgaattaactctccttgggacccaagatgacatttcagctgccaaacaaaaaatctctgaagcttttgtcaagatacctgtgaaactatttgctgccaattacatgatgaatgtaattgaggttgatagtgcccactataaacttttagaaactgaattactacaggagatatcagagatcgaaaaaaggtatgacatttgcagcaaggtttctgagaaaggtcagaaaacctgcattctgtttgaatccaaggacaggcaggtagatctatctgtgcatgcttatgcaagtttcatcgatgcctttcaacatgcctcatgtcagttgatgagagaagttcttttactgaagtctttgggcaaggagagaaagcacttacatcagaccaagtttgctgatgactttagaaaaagacatccaaatgtacactttgtgctaaatcaagagtcaatgactttgactggtttgccaaatcaccttgcaaaggcgaagcagtatgttctaaaaggaggaggaatgtcttcattggctggaaagaaattgaaagagggtcatgaaacaccgatggacattgatagcgatgattccaaagcagcttctccgccactcaagggctctgtgagttctgaggcctcagaactggacaagaaggaaaagggcatctgtgtcatctgtatggacaccattagtaacaaaaaagtgctaccaaagtgcaagcatgaattctgcgccccttgtatcaacaaagccatgtcatataagccaatctgtcccacatgccagacttcctatggtattcagaaaggaaatcagccagagggaagcatggttttcactgtttcaagagactcacttccaggttatgagtcctttggcaccattgtgattacttattctatgaaagcaggcatacaaacagaagaacacccaaacccaggaaagagataccctggaatacagcgaactgcatacttgcctgataataaggaaggaaggaaggttttgaaactgctttatagggcctttgaccaaaagctgatttttacagtggggtactctcgcgtattaggagtctcagatgtcatcacttggaatgatattcaccacaaaacatcccggtttggaggaccagaaatgtatggctatcctgatccttcttacctgaaacgtgtcaaagaggagctgaaagccaaaggaattgagtaagacaactgctggaagatgtcttaaatcaagctttcaaaaaaatatattttaggaggctgatttaatgccagtctaaatccttatgtagaaaggactttgaaatttttcttctcaagaaatggtttgtataagaataacaatctgctagtctgtcatttctggagtgatacttttttttttgagacggagtctgctctgtcgctcgcgctggagtgcagtggcatgatctcggctcactgcaagctccgcctcccaggttcatgccattctcctacctcagcctcccgagtagctgggactacaggcgcccaccaccatgcccggctaatttttgtttttgtatttttagtagagacagggtttcactgtgttagccaggatggtctcgatctcctgacctcgtgatccgcccgcctcagccttccaaagtgttgggattataggcgtgagccaccgcgcccagccctggagtgatactttttatggaagacaaaagccccccaaatctgtgtaaaatctgctgcaaaggtgtcatccctcttgtgtcatcactggggttagaggtgggtccgaaataatcttctgtgtccttcagttggactctcggctgccaattgatctctttttcattgccatctctggggtggttctttggttttttgtgtgttttccccttcatctctacctgtgaaagtgaaattctattgtaaatgggaggaaaaagggttggttgtgaaaaattaaagacccacattctgctttcttactcatggtaagaaaagtggccatgagtagagattgggcaagcattggtaataaatggaataagactattattattattatttgagatggagtctcactctgtcacccaggctggaatgcagtggtgtgatcttggctcactgcaacctccacttcccgggttcaagcgattctcctgcctcagcctcctgagtagctgggattacaggtgtgtgcctccacacccggctaattttttgtatttttagtagagacggggttttgccatgttggccaggctggtttcaaactcctgagctcaaatgatcctcctgccttggcctcccaaagtgctggaattacaggcatgagccaccacacccacacaagactatcatttttaatgaccaagagcctagtatatagttggtgcctgtcttagtctgtttgtgttgctataaaagaacacctgagactgggtaattgataaagaaaaaggtttgtttggctcacaattttgctggctagaaggttgggcatccggtgaaagcctcaggctgcttccattcatagcaaagggcagccagtgtgtgcagaaatcaaatgacagagaggaagtgagagagagaggtgtcggggaggtgccaggctctttttaacaagcagttcttcaggaactaagagtgagtcactcccatgagaacagcaccaagccattcatgggggaatctgcccccatgacccagacccctcccgttaggcttcacctccaacactgaggatcaaatttcaacatgagatttggaggaggtcaaacaaactaaactgtagcagtgtttcataaaattgtttgcctgactcaggttgctagtaagccagcagagggatatttgcctcctaaatctttggcagaggcaggagtaaggaagccatttctggagtccttgctactaatttggaaaactgagcttctttctttcattgctttttcccttaagagacaagtccttactatattgccctgtctctcaagggaagacatcaagactggacttgaactcctgggctcaagccatcccccaaccttggcctctcgagtagatgggattataggcatgtgccacggtgcctgacttgagtttcttattctagaacacttggagcctgaactctgaccaggcccctcacttgagcctttgctttctgctccttgtaaactgccatattgggtgcacttgccctgccacagtaatgctatatatttctgagcattgtttttctctagataattttatatttttgagtataccccacttccaagtgttttttgttttgttttgctttgtttttgttgttgttgttttgagacagggtctcactgtgtcccccaggctggagtgcagtggcacaatgacgactcactgcagcctcaacctcctggggccaagtgatcctcccacctcagcctctcaagtggctgggaccacagaagtgcaccaccatgcctggcttttttttttttttttggtcgagatggggtgtccctgtgttgcccagactggtcttgaactcctggactcaagggatcctcctgtcttgggctcccaaagtgttgggattacaggcgtgagtgaccatgcctagctcacttccaggtttaacagacaaaataaacttactctagtttccatctctatcattttataataaccgtagcccacattgtagtagtttttcagctctttactaagtcccaccaattcatgttttcacccttaaaatctttctcactgatactctctctggacagaaaaaaggtgaaataagcctactataaggaatatatgacatgctaaattttatttttaaacggttcttcaagtcagattaaagtaataatagcaaattatgtgattatccatgtcccagcctctctccaaaaaaatagtaaacaagatgtcttcttcttttcccaaagatacacatacacacatgtacaaatttttttatcagataataatagctaatatttaatgagtacttaccttagtttgtcccctttacaacagctttacatctgtgtgattgatacagttcatattcccattttataactgagaaaactggtgcacagagaggataagcaacttgccaaaggtcacacagttaataagtggaaatgctggggtatgaaccaggtagtctgcccccatagctctgccccccagagctgtactgtctcccatgagggtacttctccatggagcagcctgaggcgatccctttattctgggcttctctcagaaatggattcccacacagtattcaaagcaaatttccccagaggaaatcctattggaagaacttaaaaactcagaatctttttctttgtccagagagttgaggaagcttaagctaaatgatacatgtttttaaaaaaaaatcagattataaatttagtttttggtgattcattaaattctttactattatagttattttctagctgttcatcttttagctaaatttgttccaaagaagcaaaagtttggtttctactaagttctggattctggatgggagattgcactgtgtgtgacatgcaagtttcatggtgtgggagattgcagagcatttgggttactgcttttactctttggaagctgttatcatctgtatctgctttaaataaagttaaagatttggaacaaa

SEQ ID NO: 8115 - DNA, 3455 bp, Homo sapiens
  source 1..3455: mol_type = unassigned DNA
gcgagaagccccactgaagccgggcgcagggtctgggacgcagttgggagtgcaaagggctggctgagagccgcaggagcagcaggctgtggcccaggcctcctgggtgacaggccctgtctggcggggaagagggaccaagagacaacacggaagaggctggacctcgaacaggggcggctgcctcactccctacctgagccagccgagggggccaaggactttagagctgtttcctccggcataagagagacacttgctttccagggcagcaccctttatcggagaaggctctacagggaaggggtctttgcagcctggatggccatcccacattcctttaacggaggtctctaggcctcagagagaacccagagttagaaaggaggccagacggtccttgctgtccccctggggagagaggaagttgccgcctgctgccaggcccaggaggagctgggcctgcaatagtgggggacctggcccctgaggcagtggcggccatgtcacggccaggccacggtgggctgatgcctgtgaatggtctgggcttcccaccgcagaacgtggcccgggtggtggtgtgggagtggctgaatgagcacagccgctggcggccctacacggccaccgtgtgccaccacattgagaacgtgctgaaggaggacgctcgcggttccgtggtcctggggcaggtggacgcccagcttgtgccctacatcatcgacctgcagtccatgcaccagtttcgccaggacacaggcaccatgcggcccgtgcggcgcaacttctacgacccgtcgtcggcgccgggcaagggcatcgtgtgggagtgggagaacgacggcggcgcatggacggcctacgatatggacatctgcatcaccatccagaacgcctacgagaagcagcacccgtggctcgacctctcatcgctaggcttctgctacctcatctacttcaacagcatgtcgcagatgaaccgccagacgcgccggcgccgccgcctgcgccgccgcctggacctcgcctacccgctcaccgtgggctccatccctaagtcgcagtcgtggcccgtgggcgccagctcgggccagccctgctcctgccagcagtgcctgctggtcaacagcacgcgcgccgcctccaacgccatcctggcctcgcagcgccgcaaggcgccccccgcgcccccgctgccgccgccgccgccacctggagggcctccaggcgcgcttgccgtgcgccccagcgccaccttcacaggcgccgcgctctgggcagcgcccgccgccggccccgccgagcccgcgccgcctcccggggcgcccccacggagcccgggcgcccccggcggagcgcgcaccccggggcagaacaacctcaaccggcccgggccccagcgcaccaccagcgtgagcgcgcgcgcctccatcccgccgggggtccccgcactcccggtgaagaacttgaatggtactgggccggtccatccggccctggcagggatgaccgggatactgctgtgcgcggccgggctgcccgtgtgcctgacgcgggcccccaagcccatcctgcacccgccgcccgtgagcaagagcgacgtgaagcccgtgcctggcgtgcccggggtgtgccgcaagaccaagaagaagcaccttaaaaagagtaagaatcccgaggatgtggttcgaagatacatgcagaaggtgaaaaacccacctgatgaggactgcaccatctgcatggagcgactggtcacagcatcaggctacgagggcgtgcttcggcacaagggcgtgcggcctgagctcgtgggccgcctgggccgctgtggccacatgtaccacctgctgtgcctcgtggccatgtactccaatggcaacaaggatggcagcctgcagtgccccacctgcaaggccatctacggggagaagacgggtacgcagccgcctgggaagatggagttccacctcatcccccactcgctgcccggcttccctgatacccagaccatccgcatcgtctatgacatccccacaggcatccagggccctgagcaccccaaccccgggaagaagttcaccgcaagaggattccctcgccactgctatctacccaacaacgagaaaggccggaaggtgctgcggctgctcatcacggcctgggagagaagactcatcttcactatcggcacgtccaacaccacgggcgagtcggacaccgtggtgtggaacgagatccaccacaagaccgagtttggatccaacctcacgggccacggctacccggacgctagctacctagacaacgtgctggctgagctcacagcccagggcgtatccgaggctgcagccaaggcttgaggcccaaggctgcccaccttccctcctgctttgcccctggtccggcaaatgcctccttcgccaggtgtgtcctggtagcccaggttcagggctggggaggagcctgcggaaggggccgcagccattcaggggacctgcctggtggcagctgggatgaagagagatggcatgtcaggctggccccgaatcatagctccctgagagggccaagcagagagtactggaaacctccctaccaaaaagacagagacccgccccctcacacacaaacacacatgtcctgttgaactcatgcacgcacacccacgtgcctgtacttgcccccaggctggaagagaagagacagaaagaccccatgacccccccatgtggatccccatctgtgtctcagttgcatctgtacagccttgtctgcaaactggaggatgcggggcaagcccttaggggcctgccagggctcggggggcaaagagggactcgggaaactcagtgtaccccagatgcctcacccattccgtgtcatcacccatgtctgccacccactgattgggcaattgtgggcccatggggtggaagcccccagatgactgagcagttctacaaaagaatggccagcacgagcggggactagagggtcctgattttgtgtctgtgcctcttcatctctctggactctgatctccttctcccttcccatctccaggccttctgtctgtcccagataaaggcgctgttctcccatcctccctaccccatcctctccaccaaatcgctcccaattttgagagccaaaggctggcgcttctgacttcaggagcgaaaggaggaggcctagtttgggccgatgtattttaaagcagagtggacagcagagagtcaatttccctttcgttgggagtgggcagtggggtggctaattgtcttcggccaaccaggggcctgttgcccaggcaactcaccagctccgcctctgctgattggctgccacggtgggagtcagccaagatttaaagggatgccagcgattgctcttttcaaaacctaccagtcccactgtgggtggagaaataaatggtctttctcctcctc

SEQ ID NO: 8116 - DNA, 2029 bp, Homo sapiens
  source 1..2029: mol_type = unassigned DNA
ctcagtcatgtgaccggcaatggcggcgctgacgagagctgcatttggaagtgttgtggagacagccccgtagcccaatgcgaccagactcagggaaaacatcaggcccctccagctgagcccttgtgtgagccccgcccctccctaaatgccagacttgggagctgacagacagcactgcctgtgctgggtttaaaagtcctggtcagctgagtggaaatagaaggatttctgctgccatcatcttccatgggctttccaggtcacacgacctacaagtagggagcagggaaagaagagtgagcctgcatgccaattctaagctcttcaggatcaaatgtcgttcgtcctgtccagaatggcagcctgtggaggcacctgcaagaacaaagtgactgtgtccaagcccgtgtgggacttcctgagcaaagagaccccagcccggctggcccggcttcgggaggagcaccgtgtgtccatcctcatagatggcgagacttctgacatctatgttctccagctttccccacagggtcctcccccggcccctccaaatgggctctacctagcccggaaggctctcaaggggctgctaaaagaggcagagaaagagctgaagaaagctcagaggcagggggagctgatgggctgcctggctctggggggtggaggggagcaccctgagatgcaccgcgcaggcccaccccctctccgagcagccccacttctgcccccaggagctcgggggctcccccctcctcctccccccctgcccccacctcttcctcctcgccttcgggaggaggcagaagagcaggagagcacctgccccatctgtctgggggagatccagaatgccaagacattggagaagtgccggcattcattctgcgagggctgcatcacccgggctctgcaggtgaaaaaggcctgccccatgtgcggccgcttctatgggcagctggtgggcaaccagccccagaatgggcggatgctggtctctaaggacgccaccctcctactgcccagctatgagaagtacggcaccattgtcatccagtacgtcttcccgcccggtgtccagggggctgaacacccaaacccaggagttcggtatcctggcaccacacgggtggcctacctcccggactgccctgagggcaacaaggtgctgaccctgttccgcaaggcgtttgaccagcgtctcaccttcactatcggcacgtccatgaccacagggagaccgaatgtcatcacctggaacgacatccaccacaagaccagctgcacagggggaccccagctgtttgggtacccagaccccacctacctgacccgggtgcaagaggagctgagagcgaagggtatcacagatgactgaaggacatcgcctttgccaaggcccctgctgtctgcctctactaggacccagcagaagcctctttctcctctctgccccctgccccccacaccacacctgtaggggacctgtctgactgggaagggagttccgagagggagggggcaatcccttcccccatcccccactggccaagtgtttcaatgcagtgtgagccactcccttctggcagaggccgacctccaaggctctgttctcccctccccgtgtacatatactcccggtttccctgcccctccattgcccttggctttttctggtatgtgctgtgctccacgaccaagccgagaaaggacctagggtggggaagggagggtctcttgattcctaaccgcccccacatactgctccaccgctgaacttcgggtgccggggaggagaaattgggctgatgtgagctccccgtcacccgccatggagccggctgtgtgtgttcatcagatacagttctcccttaaccttgtcctttctctcctgtgtctcagtctccgtcagtctgtctttctccgctcttctctgacccctgtgaggaacctccttaccctgttctggaatcgctgccagactgtagcttttaatttaataaaaataaagtaaaatatgcaactc

SEQ ID NO: 8117 - DNA, 3199 bp, Homo sapiens
  source 1..3199: mol_type = unassigned DNA
agtcatgtgaccggcaatggcggcgctgacgagaggtaggtgagcccggcgccccccacacccaccgcgcgccccccgggccccgctcgcacccctcacgcgccccccgctcccccggcgccccctcctccacctcccctccccgcgcgcggctccgggctccccgctccgtgcccggccgatcatctttctagcaccctccagccttggcctccattcgggggttctgagggctgcgatcgggccgacatgcacccccacccggcggtggggatccgggggctttggctactgagggatgtggggagttggttccgggtcgggtcttggaggaggccgtggggggagggcgggagctgcttcagtggatgcccccagggacccttgcccatccgggctgtgcctccctctggcctctgtctggagggagagactggttccttgtccggcctgggttgccacagaggaatcacagacccaccctaaactggggccccgcctcccttttctgtgccagcaggacttggacctaggacacctaggtcctgggtcccccgtgatggggagagaagtgttgcatcgcggatagactgtatgggctgagactctagggttccattttcacttatgaatctcgaggtgcatctggccttgggggacgatgatggaggcatgaagggacagctgctccttcttggatcagtcaataaatggaggtcacactaatggcccttctttctgtttgagctgcatttggaagtgttgtggagacagccccgtagcccaatgcgaccagactcagggaaaacatcaggcccctccagctgagcccttgtgtgagccccgcccctccctaaatgccagacttgggagctgacagacagcactgcctgtgctgggtttaaaaggtgacaatgagaactttgttattgcaggggctgctgccactttgttcacatccttaacagacttcagcagaagggactgagttagctctcaaggaaggctccctggcaataggggctgaattatttggcaatgtggagcaggcgaggagttggggagcataggaaatattccggtccatgtgatctgagggaggtggcaagaagacctccacctgtgtgggcgttttctttcctgacttctcttatgtgtgccctaggctttcttgggggcctcagagctggggaagaaaggaggaaggttagcatgttgaagttccttcttgagcaacttggggagaagctgataatggaattctgcagagaagagaggagatggaaggggagtttttatttctgggttggctgaggggaatggtaacatttgccatcataactttttacccttcccccactcccagtcctggtcagctgagtggaaatagaaggatttctgctgccatcatcttccatgggctttccaggtcacacgacctacaagtagggagcagggaaagaagagtgagcctgcatgccaattctaagctcttcaggatcaaatgtcgttcgtcctgtccagaatggcagcctgtggaggcacctgcaagaacaaagtgactgtgtccaagcccgtgtgggacttcctgagcaaagagaccccagcccggctggcccggcttcgggaggagcaccgtgtgtccatcctcatagatggcgagacttctgacatctatgttctccagctttccccacagggtcctcccccggcccctccaaatgggctctacctagcccggaaggctctcaaggggctgctaaaagaggcagagaaagagctgaagaaagctcagaggcagggggagctgatgggctgcctggctctggggggtggaggggagcaccctgagatgcaccgcgcaggcccaccccctctccgagcagccccacttctgcccccaggagctcgggggctcccccctcctcctccccccctgcccccacctcttcctcctcgccttcgggaggaggcagaagagcaggagagcacctgccccatctgtctgggggagatccagaatgccaagacattggagaagtgccggcattcattctgcgagggctgcatcacccgggctctgcaggtgaaaaaggcctgccccatgtgcggccgcttctatgggcagctggtgggcaaccagccccagaatgggcggatgctggtctctaaggacgccaccctcctactgcccagctatgagaagtacggcaccattgtcatccagtacgtcttcccgcccggtgtccagggggctgaacacccaaacccaggagttcggtatcctggcaccacacgggtggcctacctcccggactgccctgagggcaacaaggtgctgaccctgttccgcaaggcgtttgaccagcgtctcaccttcactatcggcacgtccatgaccacagggagaccgaatgtcatcacctggaacgacatccaccacaagaccagctgcacagggggaccccagctgtttgggtacccagaccccacctacctgacccgggtgcaagaggagctgagagcgaagggtatcacagatgactgaaggacatcgcctttgccaaggcccctgctgtctgcctctactaggacccagcagaagcctctttctcctctctgccccctgccccccacaccacacctgtaggggacctgtctgactgggaagggagttccgagagggagggggcaatcccttcccccatcccccactggccaagtgtttcaatgcagtgtgagccactcccttctggcagaggccgacctccaaggctctgttctcccctccccgtgtacatatactcccggtttccctgcccctccattgcccttggctttttctggtatgtgctgtgctccacgaccaagccgagaaaggacctagggtggggaagggagggtctcttgattcctaaccgcccccacatactgctccaccgctgaacttcgggtgccggggaggagaaattgggctgatgtgagctccccgtcacccgccatggagccggctgtgtgtgttcatcagatacagttctcccttaaccttgtcctttctctcctgtgtctcagtctccgtcagtctgtctttctccgctcttctctgacccctgtgaggaacctccttaccctgttctggaatcgctgccagactgtagcttttaatttaataaaaataaagtaaaatatgcaactcttt

SEQ ID NO: 8118 - DNA, 2067 bp, Homo sapiens
  source 1..2067: mol_type = unassigned DNA
catttttgttttggggaggaagggcaggggcttgcggatagaagggggtcaaaggaacggtgattatcacctgtgaggggaaagggggtgctgtcctccctccttcccttttcctcagcctgcaccccctgcaatcccccacctttcggggtctccccctccttgttgctaaggcccggaccgtcatcccagcaacagcctcagtcatgtgaccggcaatggcggcgctgacgagagtcctggtcagctgagtggaaatagaaggatttctgctgccatcatcttccatgggctttccaggtcacacgacctacaagtagggagcagggaaagaagagtgagcctgcatgccaattctaagctcttcaggatcaaatgtcgttcgtcctgtccagaatggcagcctgtggaggcacctgcaagaacaaagtgactgtgtccaagcccgtgtgggacttcctgagcaaagagaccccagcccggctggcccggcttcgggaggagcaccgtgtgtccatcctcatagatggcgagacttctgacatctatgttctccagctttccccacagggtcctcccccggcccctccaaatgggctctacctagcccggaaggctctcaaggggctgctaaaagaggcagagaaagagctgaagaaagctcagaggcagggggagctgatgggctgcctggctctggggggtggaggggagcaccctgagatgcaccgcgcaggcccaccccctctccgagcagccccacttctgcccccaggagctcgggggctcccccctcctcctccccccctgcccccacctcttcctcctcgccttcgggaggaggcagaagagcaggagagcacctgccccatctgtctgggggagatccagaatgccaagacattggagaagtgccggcattcattctgcgagggctgcatcacccgggctctgcaggtgaaaaaggcctgccccatgtgcggccgcttctatgggcagctggtgggcaaccagccccagaatgggcggatgctggtctctaaggacgccaccctcctactgcccagctatgagaagtacggcaccattgtcatccagtacgtcttcccgcccggtgtccagggggctgaacacccaaacccaggagttcggtatcctggcaccacacgggtggcctacctcccggactgccctgagggcaacaaggtgctgaccctgttccgcaaggcgtttgaccagcgtctcaccttcactatcggcacgtccatgaccacagggagaccgaatgtcatcacctggaacgacatccaccacaagaccagctgcacagggggaccccagctgtttgggtacccagaccccacctacctgacccgggtgcaagaggagctgagagcgaagggtatcacagatgactgaaggacatcgcctttgccaaggcccctgctgtctgcctctactaggacccagcagaagcctctttctcctctctgccccctgccccccacaccacacctgtaggggacctgtctgactgggaagggagttccgagagggagggggcaatcccttcccccatcccccactggccaagtgtttcaatgcagtgtgagccactcccttctggcagaggccgacctccaaggctctgttctcccctccccgtgtacatatactcccggtttccctgcccctccattgcccttggctttttctggtatgtgctgtgctccacgaccaagccgagaaaggacctagggtggggaagggagggtctcttgattcctaaccgcccccacatactgctccaccgctgaacttcgggtgccggggaggagaaattgggctgatgtgagctccccgtcacccgccatggagccggctgtgtgtgttcatcagatacagttctcccttaaccttgtcctttctctcctgtgtctcagtctccgtcagtctgtctttctccgctcttctctgacccctgtgaggaacctccttaccctgttctggaatcgctgccagactgtagcttttaatttaataaaaataaagtaaaatatgcaactc

SEQ ID NO: 8119 - DNA, 1331 bp, Homo sapiens
  source 1..1331: mol_type = unassigned DNA
ggaagggcaggggcttgcggatagaagggggtcaaaggaacggtgattatcacctgtgaggggaaagggggtgctgtcctccctccttcccttttcctcagcctgcaccccctgcaatcccccacctttcggggtctccccctccttgttgctaaggcccggaccgtcatcccagcaacagcctcagtcatgtgaccggcaatggcggcgctgacgagaggacttggacctaggacacctaggtcctgggtcccccgtgatggggagagaagtgttgcatcgcggatagactgtatgggctgagactctagggttccattttcacttatgaatctcgaggtgcatctggccttgggggacgatgatggaggcatgaagggacagctgctccttcttggatcagtcaataaatggaggtcacactaatggcccttctttctgtttgagctgcatttggaagtgttgtggagacagccccgtagcccaatgcgaccagactcagggaaaacatcaggcccctccagctgagcccttgtgtgagccccgcccctccctaaatgccagacttgggagctgacagacagcactgcctgtgctgggtttaaaagtcctggtcagctgagtggaaatagaaggatttctgctgccatcatcttccatgggctttccaggtcacacgacctacaagtagggagcagggaaagaagagtgagcctgcatgccaattctaagctcttcaggatcaaaaatggcagcctgtggaggcacctgcaagaacaaagtgactgtgtccaagcccgtgtgggacttcctgagcaaagagaccccagcccggctggcccggcttcgggaggagcaccgtgtgtccatcctcatagatggcgagacttctgacatctatgttctccagctttccccacagggtcctcccccggcccctccaaatgggctctacctagcccggaaggctctcaaggggctgctaaaagaggcagagaaagagctgaagaaagctcagaggcagggggagctgatgggctgcctggctctggggggtggaggggagcaccctgagatgcaccgcgcaggcccaccccctctccgagcagccccacttctgcccccaggagctcgggggctcccccctcctcctccccccctgcccccacctcttcctcctcgccttcgggaggaggcagaagagcaggagagcacctgccccatctgtctgggggagatccagaatgccaagacattggagaagtgccggcattcattctgcgagggctgcatcacccgggctctgcaggtgaaaaaggcctgccccatgt

SEQ ID NO: 8120 - DNA, 569 bp, Homo sapiens
  source 1..569: mol_type = unassigned DNA
atttttgttttggggaggaagggcaggggcttgcggatagaagggggtcaaaggaacggtgattatcacctgtgaggggaaagggggtgctgtcctccctccttcccttttcctcagcctgcaccccctgcaatcccccacctttcggggtctccccctccttgttgctaaggcccggaccgtcatcccagcaacagcctcagtcatgtgaccggcaatggcggcgctgacgagaggctttcttgggggcctcagagctggggaagaaaggaggaaggttagcatgttgaagttccttcttgagcaacttggggagaagctgataatggaattctgcagagaagagaggagatggaaggggagtttttatttctgggttggctgaggggaatggtaacatttgccatcataactttttacccttcccccactcccagtcctggtcagctgagtggaaatagaaggatttctgctgccatcatcttccatgggctttccaggtcacacgacctacaagtagggagcagggaaagaagagtgagcctgcatgccaattctaagctcttcag

SEQ ID NO: 8121 - DNA, 1840 bp, Homo sapiens
  source 1..1840: mol_type = unassigned DNA
ccggcaatggcggcgctgacgagagtcctggtcagctgagtggaaatagaaggatttctgctgccatcatcttccatgggctttccaggtcacacgacctacaagtagggagcagggaaagaagagtgagcctgcatgccaattctaagctcttcaggatcaaaaatggcagcctgtggaggcacctgcaagaacaaagtgactgtgtccaagcccgtgtgggacttcctgagcaaagagaccccagcccggctggcccggcttcgggaggagcaccgtgtgtccatcctcatagatggcgagacttctgacatctatgttctccagctttccccacagggtcctcccccggcccctccaaatgggctctacctagcccggaaggctctcaaggggctgctaaaagaggcagagaaagagctgaagaaagctcagaggcagggggagctgatgggctgcctggctctggggggtggaggggagcaccctgagatgcaccgcgcaggcccaccccctctccgagcagccccacttctgcccccaggagctcgggggctcccccctcctcctccccccctgcccccacctcttcctcctcgccttcgggaggaggcagaagagcaggagagcacctgccccatctgtctgggggagatccagaatgccaagacattggagaagtgccggcattcattctgcgagggctgcatcacccgggctctgcaggtgaaaaaggcctgccccatgtgcggccgcttctatgggcagctggtgggcaaccagccccagaatgggcggatgctggtctctaaggacgccaccctcctactgcccagctatgagaagtacggcaccattgtcatccagtacgtcttcccgcccggtgtccagggggctgaacacccaaacccaggagttcggtatcctggcaccacacgggtggcctacctcccggactgccctgagggcaacaaggtgctgaccctgttccgcaaggcgtttgaccagcgtctcaccttcactatcggcacgtccatgaccacagggagaccgaatgtcatcacctggaacgacatccaccacaagaccagctgcacagggggaccccagctgtttgggtacccagaccccacctacctgacccgggtgcaagaggagctgagagcgaagggtatcacagatgactgaaggacatcgcctttgccaaggcccctgctgtctgcctctactaggacccagcagaagcctctttctcctctctgccccctgccccccacaccacacctgtaggggacctgtctgactgggaagggagttccgagagggagggggcaatcccttcccccatcccccactggccaagtgtttcaatgcagtgtgagccactcccttctggcagaggccgacctccaaggctctgttctcccctccccgtgtacatatactcccggtttccctgcccctccattgcccttggctttttctggtatgtgctgtgctccacgaccaagccgagaaaggacctagggtggggaagggagggtctcttgattcctaaccgcccccacatactgctccaccgctgaacttcgggtgccggggaggagaaattgggctgatgtgagctccccgtcacccgccatggagccggctgtgtgtgttcatcagatacagttctcccttaaccttgtcctttctctcctgtgtctcagtctccgtcagtctgtctttctccgctcttctctgacccctgtgaggaacctccttaccctgttctggaatcgctgccagactgtagcttttaatttaataaaaataaagtaaaatatgcaactcttta

SEQ ID NO: 8122 - DNA, 561 bp, Homo sapiens
  source 1..561: mol_type = unassigned DNA
atttttgttttggggaggaagggcaggggcttgcggatagaagggggtcaaaggaacggtgattatcacctgtgaggggaaagggggtgctgtcctccctccttcccttttcctcagcctgcaccccctgcaatcccccacctttcggggtctccccctccttgttgctaaggcccggaccgtcatcccagcaacagcctcagtcatgtgaccggcaatggcggcgctgacgagaggctttcttgggggcctcagagctggggaagaaaggaggaagtcctggtcagctgagtggaaatagaaggatttctgctgccatcatcttccatgggctttccaggtcacacgacctacaagtagggagcagggaaagaagagtgagcctgcatgccaattctaagctcttcaggatcaaatgtcgttcgtcctgtccagaatggcagcctgtggaggcacctgcaagaacaaagtgactgtgtccaagcccgtgtgggacttcctgagcaaagagaccccagcccggctggcccggcttcgggaggagcaccgtgtgtccatcct

SEQ ID NO: 8123 - DNA, 3749 bp, Homo sapiens
  source 1..3749: mol_type = unassigned DNA
ggccggggtggggtggggcaggatgctggatggcccactgttctccgaggggcctgacagcccccgggagctccaggatgaggagtctggcagctgcctctgggtgcagaagtccaagctattggtgatagaagtgaagactatttcctgtcattatagtcgccgcgccccttctcgacagcccatggacttccaggccagccactgggctcgcgggttccagaaccgcacgtgtgggccgcgcccgggatccccacagccgccgccccgccggccctgggcctccagggtgctgcaggaggcgaccaactggcgggcggggcccctggccgaggtccgagctcgggagcaagagaaaaggaaagcggcgtcgcaggagcgggaggccaaggagaccgagcgaaaaaggcgcaaggctggtggggcccgacggagccccccgggtcgaccccgcccggagccccgcaacgcccctcgggtggcccagctggcagggctccctgctcccttgcggccggagcgcctggcgcctgtggggcgagcgccccgtccatccgcgcagccgcagagcgacccagggtcggcgtgggcggggccctggggaggtcggcggcccgggcccccaagctacgaggctcacctgctgctgagaggttctgccgggaccgccccacgacgccgctgggaccggccgccaccctacgtggctccaccttcttacgaaggcccccataggaccttggggactaagagaggccccgggaactctcaggtgcccacttcatcagccccagctgcgactccagccaggacagacggagggcgcacaaagaagaggctggatcctcggatctaccgggacgtcctcggggcttggggtctccgacaggggcaaggtctcttggggggatccccaggctgtggagcggccagagcaaggccagagcccggcaagggggtcgtggagaaaagcctggggctggctgctgctgacctgaacagtggtagcgacagccatccccaagccaaagctacagggagcgcaggcaccgagatagctcctgcggggtctgcaactgcggctccctgtgccccgcatcccgctcccagatccaggcaccacctcaagggctcgagggaagggaaagaaggagaacagatctggtttcccaaatgctggattccctcccctaaaaagcagccgccccgccatagccagacactccccagaccctgggctcccggaggcaccggatggagagaatctctgggtcttggagagggggcaggaccggagaccctggagggttggaaggcgacccgccgtgcccacaccttgccccgcagttcccagggcctgtcccgtggggaaggcgtctttgtcattgacgccacgtgcgtagtgatacgatcccaatatgttccaaccccccgaacccagcaggtgcagcttttgccctctggggtgacacgcgtggtgggggattcccccagccaatcgaagcccggcaaggaggagggtgaaggggccacggtctttccttccccttgtcaaaagcggctgtcgagcagtcgccttttacaccagcccggcgggggccgcgggggcgaagctgagggcgggaggccgggggactccacactggaggagcgcactttccgcatcttggggctcccggcccccgaagtaaacctgcgggacgcccccacgcagccaggtagcccagagcaccaagccttaggcccagcagcttcgggagcccagggcagagccgaggggtcggaagtggcggtggtccagcggcgcgccggccggggctgggcgcggaccccagggccctacgccggggccctgcgagaagccgtgtcccgtatccgccgccacacagcccctgactcggacacggacgaagctgaggagctcagcgtccatagcggctcctctgatggaagcgacacagaagccccgggcgcctcctggcggaatgagaggaccctgcccgaggttggaaacagttcgccagaggaagatgggaagacagcggaactgagcgacagtgtcggggagatcctagatgtcataagccaaaccgaggaggtcctcttcggggtgagggacatcagagggacccaacagggaaataggaagaggcagtgagaggccccttcttgtatttgtgtccccaacgcatccatccttgggtccactggtccccattcttccccacagacttcctttgcttctcttttccttgtatctttacccatacctgttctcatccttgaaatataaatgaaaggaagggaagcatatgcccattaatgattttgtttcaggagaggtgagaatgagcagatttaattaatgtctgttatgttcagggcacaagggtgagctcttcgcaggggctgatgcactgggtgtggagctgagcagagaggcctaaccaggatcaggcaggagggcagggatggtggcagccataggagggcagggtagggtagggcctctgaggaggagggaaaaagtgaaggagaggctttggacctggtgacagagtgatcagatgacagaggggttcttgggagaagaggcataggtccagcaacaaccaacaaagcagaaggagggctcaccttggtgtcacaagtcttggatttcaatcccaactctgccactgagttgctggttgactgaggccagtcactttccctctccaggcctccaggcctcctggtatataaaatgatggtattctaaggtccatccttccgtctctgacattttgagatctttggaaaggactctatctcatcctcccctcgacaagccaagaatgagaattgggaataagtgaacagagtttgagggtttctgggcggcctccgtgtcacccaaagtcatgatcaattcaggagactgcccaaggcttgcagaagaggtaagggagtgaggcactcctatcccagtctcccaggtttggttgagggctccccaaggcagggcaagatagcggccctgtcactgaccctggcctgtggtggtctgagctggggagggaaggacaccaatgaatcagcttgggacctctttaggccttccccttttcctccaccccgatgctccttagtgatgctctgaggcgtggccacgatctccctcccaggtggtatcgcccacctgaaaaaatcctgagaatttctcccatcttggcctcttccagaaaccggccaggcaaggaaagaggccggtcaccagaagccagcaggcgtggggtgtgatactctctatagccactacagggcgcgcgcaggtcgcggatctccccagttgctaatcccggctctgccactcaatcctatccctagttcccgagcgcgggtcccccgccttgcagtctccagccgtgcggggccgggagcaggcctccggcctcccagacttctagagcccgccgggcccatctttgtactcatccaccccagccggcttgggactcagacaccgaagtctttttttttttctctccgatccttggacacctcctctgtctgccatttattagccatgtgaacttggccacatcacttcacctccctgagcctcagtttcctcatctgtcaaatgggggtttataaacacctacctcgcagggttgttgtgaggatttaatgcgataatgtatgtaaagcgccttgcacactgcctggcacacagtaggcgctcaataaatctaagcttcccttta

SEQ ID NO: 8124 - DNA, 949 bp, Homo sapiens
  source 1..949: mol_type = unassigned DNA
gacgcagggagcatgggtatctggacctcaggcactgatatcttcctaagtctttgggagatttacgtgtctccaagaagccccggatggatggactttatccagcatttgggagtttgctgtttggttgctcttatttcagtgggcctcctgtctgtggccgcctgctggtttctgccatcaatcatagcggccgctgcctcctggattatcacgtgtgttctgctgtgttgctccaagcatgcacgatgttttattcttcttgtctttctctcttgtggcctgcgtgaaggcaggaatgctttgattgcagctggcacagggatcgtcatcttgggacacgtagaaaatatttttcacaactttaaaggtctcctagatggtatgacttgcaacctaagggcaaagagcttttccatacattttccacttttgaaaaaatatattgaggcaattcagtggatttatggccttgccactccactaagtgtatttgatgaccttgtttcttggaaccagaccctggcagtctctcttttcagtcccagccatgtcctggaggcacagctaaatgacagcaaaggggaagtcctgagcgtcttgtaccagatggcaacaaccacagaggtgttgtcctccctgggtcagaagctacttgcctttgcagggctttcgctcgtcctgcttggcactggcctcttcatgaagcgatttttgggcccttgtggttggaagtatgaaaacatctacatcaccagacaatttgttcagtttgatgaaagggagagacatcaacagaggccctgtgtgctcccgctgaataaggaggaaaggaggaaattcatttctggcttccagtcctgaaaatgattaggaagaagcaaatggacatggcaagtgcagacaagtcatgagagaccccgactactcctcagccacatcgcaccaa

SEQ ID NO: 8125 - DNA, 3003 bp, Homo sapiens
  source 1..3003: mol_type = unassigned DNA
ggcggagggggcggcgcgcgccgggcacgcgcgccggcgaccatggcgttcgccgggctggagcgagtacattaacccctggaggcggcggcggcggcgagggagcgagcctcgagcgggcgggccccagcctgagggaagggaggaaggggcggggagagcgccagagggaggccggtcggccgcgggcgggcgggcagcgcagcgccgagcggggcccgcgggcccatgaggaggcctggggaccatgggctccaggatcaagcagaatccagagaccacatttgaagtatatgttgaagtggcctatcccaggacaggtggcactctttcagatcctgaggtgcagaggcaattcccggaggactacagtgaccagcctcacagttagccaagttggccagaacttcacattcgtgctcactgacattgacagcaaacagagattcgggttctgccgcttatcttcaggagcgaagagctgcttctgtatcttaagctatctcccctggttcgaggtattttataagctgcttaacatcctggcagattacacgacaaaaagacaggaaaatcagtggaatgagcttcttgaaactctgcacaaacttcccatccctgacccaggagtgtctgtccatctcagcgtgcattcttattttactgtgcctgataccagagaacttcccagcatacctgagaatagaaatctgacagaatattttgtggctgtggatgttaacaacatgttgcatctgtacgccagtatgctgtacgaacgccggatactcatcatttgcagcaaactcagcactctgactgcctgcatccacgggtctgcggcgatgctctaccccatgtactggcagcacgtgtacatccccgtgctgccgccgcatctgctggactactgctgtgctcccatgccctacctcataggaatccatttaagtttaatggagaaagtcagaaacatggccctggatgatgtcgtgatcctgaatgtggacaccaacaccctggaaacccccttcgatgacctccagagcctcccaaacgacgtgatctcttccctgaagaacaggctgaaaaaggtctccacaaccactggggatggtgtggccagagcgttcctcaaggcccaggctgctttcttcggtagctaccgaaacgctctgaaaatcgagccggaggagccgatcactttctgtgaggaagccttcgtgtcccactaccgctccggagccatgaggcagttcctgcagaacgccacacagctgcagctcttcaagcagtttattgatggtcgattagatcttctcaattccggcgaaggtttcagtgatgtttttgaagaggaaatcaacatgggcgagtacgctggcagtgacaaactgtaccatcagtggctctccactgtccggaaaggaagtggagcaattctgaatactgtaaagaccaaagcaaatccggccatgaagactgtctacaagttcgcaaaagatcatgcaaaaatgggaataaaagaggtgaaaaaccgcttgaagcaaaaggacattgccgagaatggctgcgcccccaccccagaagagcagctgccaaagactgcaccgtccccactggtggaggccaaggaccccaagctccgagaagaccggcggccaatcacagtccactttggacaggcgttgtgaatccccaaaaggagcaagacagaagacagcatttctcagatttgcctggctggggaacctccttttttcccttcacacaatgcgtctcccaggatggtgtttctcagcagacaccctgtgagatgccggccttccactgagatgatttcatctgccaagtgccaagactgggtggacatttttttaagtcctctctggaaacaaatgtaggcgatggactgggagggggagaggctggaggcagggaaacctgctgatggtaatggttgctaatgtctgttggtggcactgtgcaaagaacctgacgtccatcatctcgttgaatcttcctaacaggacactcgggtaggcagtgctgttacctgtacttcacagatgaggacagtaaggcttggaatggtcaaatcgtgggcctggagtaacccagggagtaaatgggagaactggggttctctccaaaactgtctgacccctagaggctgcctcccgagcgctctggtgcactgccacccagcaggaatggaaatagcccaagccagaggtgacaagcagtgaagacagtggggctggagaagatggttcccccgaagtagaaaggccaagcataagagaagcagtattgtggggagtggtgtaggagagctgggtgtctagacagggtagcagcctgtgcaccggtggagggggtgggctcccctctccctgatcacctcttcctcttgatgaatggtgtgaattgaggggtgggggggctgttcccctttcccccacacacttcctgtaagccaggaaggggaaaaaacatggtggccttgcccatccctaggcagcacccccaactcccgggtagctgtcagctgaagggtcaccaagcatgggtcagccctcacgcccagctaatggcataggatctgggaagccacggtgtcattctatcccatcgtgttctccatgtgccgccagggaaccctccaccaagtccctggacccgctttcccctcaggctgccccgacaggttccatgcagagcaccagggacccagggacaactgggacacaggccctgccctccaggagtagtggggcaggttcagaaaacaaattctaaggcagatttgagatctgaagtgtcactcccactcagtagagccctatatcagcactgtccaagaaaaacataatgggagcttcatacgggagtcacatgtggaattctgaatgtgaaacataaacaggtgaaattgattttaatataatgaacccaatatatccaaaatattatttcaacatgtaatcaatctaaaaatta

SEQ ID NO: 8126 - DNA, 3612 bp, Homo sapiens
  source 1..3612: mol_type = unassigned DNA
acgcgcgccggcgaccatggcgttcgccgggctggagcgagtacattaacccctggaggcggcggcggcggcgagggagcgagcctcgagcgggcgggccccagcctgagggaagggaggaaggggcggggagagcgccagagggaggccggtcggccgcgggcgggcgggcagcgcagcgccgagcggggcccgcgggcccatgaggaggcctggggaccatgggctccaggatcaagcagaatccagagaccacatttgaagtatatgttgaagtggcctatcccaggacaggtggcactctttcagatcctgaggtgcagaggcaattcccggaggactacagtgaccaggaagttctacagactttgaccaagttttgtttccccttctatgtggacagcctcacagttagccaagttggccagaacttcacattcgtgctcactgacattgacagcaaacagagattcgggttctgccgcttatcttcaggagcgaagagctgcttctgtatcttaagctatctcccctggttcgaggtattttataagctgcttaacatcctggcagattacacgacaaaaagacaggaaaatcagtggaatgagcttcttgaaactctgcacaaacttcccatccctgacccaggagtgtctgtccatctcagcgtgcattcttattttactgtgcctgataccagagaacttcccagcatacctgagaatagaaatctgacagaatattttgtggctgtggatgttaacaacatgttgcatctgtacgccagtatgctgtacgaacgccggatactcatcatttgcagcaaactcagcactctgactgcctgcatccacgggtctgcggcgatgctctaccccatgtactggcagcacgtgtacatccccgtgctgccgccgcatctgctggactactgctgtgctcccatgccctacctcataggaatccatttaagtttaatggagaaagtcagaaacatggccctggatgatgtcgtgatcctgaatgtggacaccaacaccctggaaacccccttcgatgacctccagagcctcccaaacgacgtgatctcttccctgaagaacaggctgaaaaaggtctccacaaccactggggatggtgtggccagagcgttcctcaaggcccaggctgctttcttcggtagctaccgaaacgctctgaaaatcgagccggaggagccgatcactttctgtgaggaagccttcgtgtcccactaccgctccggagccatgaggcagttcctgcagaacgccacacagctgcagctcttcaagcagtttattgatggtcgattagatcttctcaattccggcgaaggtttcagtgatgtttttgaagaggaaatcaacatgggcgagtacgctggcagtgacaaactgtaccatcagtggctctccactgtccggaaaggaagtggagcaattctgaatactgtaaagaccaaagcaaatccggccatgaagactgtctacaagttcgcaaaagatcatgcaaaaatgggaataaaagaggtgaaaaaccgcttgaagcaaaaggacattgccgagaatggctgcgcccccaccccagaagagcagctgccaaagactgcaccgtccccactggtggaggccaaggaccccaagctccgagaagaccggcggccaatcacagtccactttggacaggtgcgcccacctcgtccacatgttgttaagagaccaaagagcaacatcgcagtggaaggccggaggacgtctgtgccgagccctgagcaaaacaccattgcaacaccagctacactccacatcctacagaaaagcattacccattttgcggccaagttcccgacgagaggctggacctcttcatcacattgacttacgccgttgcttttccagactgggcagaggggctgacttcgcagtgtgtgccaaagagccggtgtctgataatcccattttcctgcttatcacctgaactgtgtcagtatcacttttagttttgttggttggttggtttgttgtttgtttaatatgccctgttttctacttctgttggaaaatatttggggttgaaataaaccagtgggagcatgggagccagtttggtggttggcaaactaccagtgatagaaaacaaatgacaggttttctgtgagcgtacgtcacagtggctcgggcccacaaggagacagaggggtacgtttcaggacatcattccaagggtttctgttcacgtttgtttaacgaggaaggggaagttgttctcccataataccagtggtatttctagtgcaacccgggtgtttttctacgcctcttcccatgctgcttccccacccccccactgtgctccgccccttccaaatgccatgtcacaacagcacttggatgtgtttttctcaactgtcatcagctccagctggcaggaccaacttcttgaaacacaggaagcatccagcggaaaatattttaataaaacagactcctcataaaatattgttcgggggagggggaagaaaccggctccaccaatctgtcggcattgtattgggagatgtgagaagccaggctggcagcaggggcccgatcctaatgggcctttgtcaggtggtggttccgtgttgggcacacggacttggtgcctggccctttaatctggcctgggttttcttgaatcacagatcttcatctccactgggaatatcaaagtgcttgggaaacttagaagactggggcagcagaaggggatgcaggatctttgaagtggagaggagagattcattcctcctgacttcttgccccaactctcacttccaattgcacattaaataatcccagcactttgggaggccaaggcgagcggatcacctgaggtcaggggttcgagaccagcctgggcaacatggcgaaaccccgtctctactaaaaatacaaaaattagccgagtgtggtggcgcacccctgtaattccagctactcgggaggctgaggcatgagaatcacttgaacccaggaggcggaggctgccgtgagctgagatcacaccaccacactccagcctgtgcaacagagtgagactctgtctcaaaaataaaataaccagctttgtggacagcaagatggggctgattaagagtaagactgtctcctggagtagctgagcatcctgggactcatcagggcccagaaacactagccagccactctctggccagtccacccctgaagttcatttcttccttcccagctgatgtccatccctccatcattccatctgtccattcgtgcattcattcattcagcaagtatctttgaaaacctactaggcgcaagcacggacgatttttttaaaggaggccttaaaagggagtccccatgctgactcttggttgacttgcattttcccaaaatgaaattttcctgtgtcaaattttctttctgaatcaatgataggtttcctagtcccttaaaactggccgttggcaattggaagaagacttttttgaagatttgtgggggaaacattccctttacttttcaggtaacattacttggttaatattcagttactaaatctcttcaagaa

SEQ ID NO: 8127 - DNA, 5010 bp, Homo sapiens
  source 1..5010: mol_type = unassigned DNA
gcgttcgccgggctggagcgagtacattaacccctggaggcggcggcggcggcgagggagcgagcctcgagcgggcgggccccagcctgagggaagggaggaaggggcggggagagcgccagagggaggccggtcggccgcgggcgggcgggcagcgcagcgccgagcggggcccgcgggcccatgaggaggcctggggaccatgggctccaggatcaagcagaatccagagaccacatttgaagtatatgttgaagtggcctatcccaggacaggtggcactctttcagatcctgaggtgcagaggcaattcccggaggactacagtgaccaggaagttctacagactttgaccaagttttgtttccccttctatgtggacagcctcacagttagccaagttggccagaacttcacattcgtgctcactgacattgacagcaaacagagattcgggttctgccgcttatcttcaggagcgaagagctgcttctgtatcttaagctatctcccctggttcgaggtattttataagctgcttaacatcctggcagattacacgacaaaaagacaggaaaatcagtggaatgagcttcttgaaactctgcacaaacttcccatccctgacccaggagtgtctgtccatctcagcgtgcattcttattttactgtgcctgataccagagaacttcccagcatacctgagaatagaaatctgacagaatattttgtggctgtggatgttaacaacatgttgcatctgtacgccagtatgctgtacgaacgccggatactcatcatttgcagcaaactcagcactctgactgcctgcatccacgggtctgcggcgatgctctaccccatgtactggcagcacgtgtacatccccgtgctgccgccgcatctgctggactactgctgtgctcccatgccctacctcataggaatccatttaagtttaatggagaaagtcagaaacatggccctggatgatgtcgtgatcctgaatgtggacaccaacaccctggaaacccccttcgatgacctccagagcctcccaaacgacgtgatctcttccctgaagaacaggctgaaaaaggtctccacaaccactggggatggtgtggccagagcgttcctcaaggcccaggctgctttcttcggtagctaccgaaacgctctgaaaatcgagccggaggagccgatcactttctgtgaggaagccttcgtgtcccactaccgctccggagccatgaggcagttcctgcagaacgccacacagctgcagctcttcaagcagtttattgatggtcgattagatcttctcaattccggcgaaggtttcagtgatgtttttgaagaggaaatcaacatgggcgagtacgctggcagtgacaaactgtaccatcagtggctctccactgtccggaaaggaagtggagcaattctgaatactgtaaagaccaaagcaaatccggccatgaagactgtctacaagttcgcaaaagatcatgcaaaaatgggaataaaagaggtgaaaaaccgcttgaagcaaaaggacattgccgagaatggctgcgcccccaccccagaagagcagctgccaaagactgcaccgtccccactggtggaggccaaggaccccaagctccgagaagaccggcggccaatcacagtccactttggacaggtgcgcccacctcgtccacatgttgttaagagaccaaagagcaacatcgcagtggaaggccggaggacgtctgtgccgagccctgagcagccgcagccgtatcggacactcagggagtcagacagcgcggaaggcgacgaggcagagagtccagagcagcaagtgcggaagtccacaggccctgtcccagctccccctgaccgggctgccagcatcgaccttctggaagacgtcttcagcaacctggacatggaggccgcactgcagccactgggccaggccaagagcttagaggaccttcgtgcccccaaagacctgagggagcagccagggacctttgactatcagaggctggatctgggcgggagtgagaggagccgcggggtgacagtggccttgaagcttacccacccgtacaacaagctctggagcctgggccaggacgacatggccatccccagcaagcccccagctgcctcccctgagaagccctcagccctgctcggaaactccctggccctgcctcgaaggccccagaaccgggacagcatcctgaaccccagtgacaaggaggaggtgcccacccctactctgggcagcatcaccatcccccggccccaaggcaggaagaccccagagctgggcatcgtgcctccaccgcccattccccgcccggccaagctccaggctgccggcgccgcacttggtgacgtctcagagcggctgcagacggatcgggacaggcgagctgccctgagtccagggctcctgcctggtgttgtcccccaaggccccactgaactgctccagccgctcagccctggccccggggctgcaggcacgagcagtgacgccctgctcgccctcctggacccgctcagcacagcctggtcaggcagcaccctcccgtcacgccccgccaccccgaatgtagccaccccattcaccccccaattcagcttcccccctgcagggacacccaccccattcccacagccaccactcaacccctttgtcccatccatgccagcagccccacccaccctgcccctggtctccacaccagccgggcctttcggggcccctccagcttccctggggccggcttttgcgtccggcctcctgctgtccagtgctggcttctgtgcccctcacaggtctcagcccaacctctccgccctctccatgcccaacctctttggccagatgcccatgggcacccacacgagccccctacagccgctgggtcccccagcagttgccccgtcgaggatccgaacgttgcccctggcccgctcaagtgccagggctgctgagaccaagcaggggctggccctgaggcctggagaccccccgcttctgcctcccaggccccctcaaggcctggagccaacactgcagccctctgctcctcaacaggccagagacccctttgaggatttgttacagaaaaccaagcaagacgtgagcccgagtccggccctggccccggccccagactcggtggagcagctcaggaagcagtgggagaccttcgagtgagccgggccctgagggtgggggatgcaccgaggcccgagggtccgtccactgctgcggttccgaggctcccccgccactctctctctgcccaggttctgctggtgggaagggatgggacccctctctgctgccccctcctcccctccacactgcccatctctgatgtctggccctggggaatggcaccagttccagcctgggaatcaacccagttcctgagtgcccatcccaccccgcggttgcctctcctcggcacccttgattgggttttgcactaaagaggtcagctgggccaatgatattgctccagaccgagtcctacccaccttcccccggaagtgtcccaagaggctccgaaggcctcccctccgagcccagctctcctgtctcctccacagccaggccctgcacgcccacctcctcggacacaggtgacagggttaccctccagtttgagctcatctgcacgagacacaggtagcttggggttgaagttaggactcctcctgggctggaggatttacctggtggggcacttccagactgtttctagcaatatacacacacgttctttcctgtgtcttcaccccaaaacttcagttgattctgacctgggaggatctggggaccagggggtcttgggctgccttgtgatacacagccccagccaccctgcacgggggctgcgagcaccagcaactttgatttatagaaggaaaatggaaacccccatctgagtattttgggaggagcccccagccctcatccagctctggcacgctgatacctccaggtactcccctcactgtcaaagctggggctcagcctcttgtcatctggagctttgtgggcaaagctgagaagctgcaacccagatttcaacccaaaaaggtcaagctgaatgcctcagactgatgtggaaggcagctggccttcctgggttggaacgaggcagtggccctgagccccttctccagggccaggtagaaaggacaaacttggtctctgcctcggggaagcaggaggagggctagaagccagtccctccccacctgcccagagctccaggccagcacagaaattcctgaggccaacgtcaccaaagttagattgaatgtttattatctttctttttcctttttaccttattgatttgatgaatcttgaaatggattcatttccataaaccaagttaaagtatggcccgaccatttaagaaaacaaccatctgagacacgcaggaaattgtgagcatttcgacccgagctctcatttcctatttgtgaagggtcagacacagtctacccaggggtgtctgggggacaagggggtctctggagatgtcacccagggagccccctctatgtctgagaggctgccactgctgcacatgctcagtgaggcttggcggccatcctggcacatggctcttcctgggtcaaccgtgacctgtctggctcaggaatgggctctggctgctgggggagccgtgtcactcctgggccatgggggcacctcctgggcacttaggtgtttcagcatagattccagtttcgcaccctgggcagacccccaggccccatccgggatagggcagaggaggtgctggcggccccagggaaggagggtgtgtaccccaaggccccctggctgtgctgaggggctggggtgagcgctccatgttcacatgagcactgctgcctcttcacttgtgggactttttgcaaacccaaggatgaactttgtgtgcattcaataaaatcatcttggggaagagg

SEQ ID NO: 8128 - DNA, 2088 bp, Homo sapiens
  source 1..2088: mol_type = unassigned DNA
cgcgcgccgggcacgcgcgccggcgaccatggcgttcgccgggctggagcgagtacattaacccctggaggcggcggcggcggcgagggagcgagcctcgagcgggcgggccccagcctgagggaagggaggaaggggcggggagagcgccagagggaggccggtcggccgcgggcgggcgggcagcgcagcgccgagcggggcccgcgggcccatgaggaggcctggggaccatgggctccaggatcaagcagaatccagagaccacatttgaagtatatgttgaagtggcctatcccaggacaggtggcactctttcaggaagttctacagactttgaccaagttttgtttccccttctatgtggacagcctcacagttagccaagttggccagaacttcacattcgtgctcactgacattgacagcaaacagagattcgggttctgccgcttatcttcaggagcgaagagctgcttctgtatcttaagctatctcccctggttcgaggtattttataagctgcttaacatcctggcagattacacgacaaaaagacaggaaaatcagtggaatgagcttcttgaaactctgcacaaacttcccatccctgacccaggagtgtctgtccatctcagcgtgcattcttattttactgtgcctgataccagagaacttcccagcatacctgagaatagaaatctgacagaatattttgtggctgtggatgttaacaacatgttgcatctgtacgccagtatgctgtacgaacgccggatactcatcatttgcagcaaactcagcactctgactgcctgcatccacgggtctgcggcgatgctctaccccatgtactggcagcacgtgtacatccccgtgctgccgccgcatctgctggactactgctgtgctcccatgccctacctcataggaatccatttaagtttaatggagaaagtcagaaacatggccctggatgatgtcgtgatcctgaatgtggacaccaacaccctggaaacccccttcgatgacctccagagcctcccaaacgacgtgatctcttccctgaagaacaggctgaaaaaggtctccacaaccactggggatggtgtggccagagcgttcctcaaggcccaggctgctttcttcggtagctaccgaaacgctctgaaaatcgagccggaggagccgatcactttctgtgaggaagccttcgtgtcccactaccgctccggagccatgaggcagttcctgcagaacgccacacagctgcagctcttcaagcagtttattgatggtcgattagatcttctcaattccggcgaaggtttcagtgatgtttttgaagaggaaatcaacatgggcgagtacgctggcagtgacaaactgtaccatcagtggctctccactgtccggaaaggaagtggagcaattctgaatactgtaaagaccaaagcaaatccggccatgaagactgtctacaagttcgcaaaagatcatgcaaaaatgggaataaaagaggtgaaaaaccgcttgaagcaaaaggacattgccgagaatggctgcgcccccaccccagaagagcagctgccaaagactgcaccgtccccactggtggaggccaaggaccccaagctccgagaagaccggcggccaatcacagtccactttggacaggtgcgcccacctcgtccacatgttgttaagagaccaaagagcaacatcgcagtggaaggccggaggacgtctgtgccgagccctgagcaaaacaccattgcaacaccagctacactccacatcctacagaaaagcattacccattttgcggccaagttcccgacgagaggctggacctcttcatcacattgacttacgccgttgcttttccagactgggcagaggggctgacttcgcagtgtgtgccaaagagccggtgtctgataatcccattttcctgcttatcacctgaactgtgtcagtatcacttttagttttgttggttggttggtttgttgtttgtttaatatgccctgttttctacttctgttggaaaatatttggggttgaaataaaccagtgggagcatgg

SEQ ID NO: 8129 - DNA, 3348 bp, Homo sapiens
  source 1..3348: mol_type = unassigned DNA
gaccatggcgttcgccgggctggagcgagtacattaacccctggaggcggcggcggcggcgagggagcgagcctcgagcgggcgggccccagcctgagggaagggaggaaggggcggggagagcgccagagggaggccggtcggccgcgggcgggcgggcagcgcagcgccgagcggggcccgcgggcccatgaggaggcctggggaccatgggctccaggatcaagaagttctacagactttgaccaagttttgtttccccttctatgtggacagcctcacagttagccaagttggccagaacttcacattcgtgctcactgacattgacagcaaacagagattcgggttctgccgcttatcttcaggagcgaagagctgcttctgtatcttaagctatctcccctggttcgaggtattttataagctgcttaacatcctggcagattacacgacaaaaagacaggaaaatcagtggaatgagcttcttgaaactctgcacaaacttcccatccctgacccaggagtgtctgtccatctcagcgtgcattcttattttactgtgcctgataccagagaacttcccagcatacctgagaatagaaatctgacagaatattttgtggctgtggatgttaacaacatgttgcatctgtacgccagtatgctgtacgaacgccggatactcatcatttgcagcaaactcagcactctgactgcctgcatccacgggtctgcggcgatgctctaccccatgtactggcagcacgtgtacatccccgtgctgccgccgcatctgctggactactgctgtgctcccatgccctacctcataggaatccatttaagtttaatggagaaagtcagaaacatggccctggatgatgtcgtgatcctgaatgtggacaccaacaccctggaaacccccttcgatgacctccagagcctcccaaacgacgtgatctcttccctgaagaacaggctgaaaaaggtctccacaaccactggggatggtgtggccagagcgttcctcaaggcccaggctgctttcttcggtagctaccgaaacgctctgaaaatcgagccggaggagccgatcactttctgtgaggaagccttcgtgtcccactaccgctccggagccatgaggcagttcctgcagaacgccacacagctgcagctcttcaagcagtttattgatggtcgattagatcttctcaattccggcgaaggtttcagtgatgtttttgaagaggaaatcaacatgggcgagtacgctggcagtgacaaactgtaccatcagtggctctccactgtccggaaaggaagtggagcaattctgaatactgtaaagaccaaagcaaatccggccatgaagactgtctacaagttcgcaaaagatcatgcaaaaatgggaataaaagaggtgaaaaaccgcttgaagcaaaaggacattgccgagaatggctgcgcccccaccccagaagagcagctgccaaagactgcaccgtccccactggtggaggccaaggaccccaagctccgagaagaccggcggccaatcacagtccactttggacaggtgcgcccacctcgtccacatgttgttaagagaccaaagagcaacatcgcagtggaaggccggaggacgtctgtgccgagccctgagcacctggtaaagcccttgcgacactatgcggtcttcctctccgaagactcctctgatgatgaatgccagcgggaagagggcccgagctctggcttcaccgagagctttttcttctccgctccctttgaatggccgcagccgtatcggacactcagggagtcagacagcgcggaaggcgacgaggcagagagtccagagcagcaagtgcggaagtccacaggccctgtcccagctccccctgaccgggctgccagcatcgaccttctggaagacgtcttcagcaacctggacatggaggccgcactgcagccactgggccaggccaagagcttagaggaccttcgtgcccccaaagacctgagggagcagccagggacctttgactatcagaggctggatctgggcgggagtgagaggagccgcggggtgacagtggccttgaagcttacccacccgtacaacaagctctggagcctgggccaggacgacatggccatccccagcaagcccccagctgcctcccctgagaagccctcagccctgctcggaaactccctggccctgcctcgaaggccccagaaccgggacagcatcctgaaccccagtgacaaggaggaggtgcccacccctactctgggcagcatcaccatcccccggccccaaggcaggaagaccccagagctgggcatcgtgcctccaccgcccattccccgcccggccaagctccaggctgccggcgccgcacttggtgacgtctcagagcggctgcagacggatcgggacaggcgagctgccctgagtccagggctcctgcctggtgttgtcccccaaggccccactgaactgctccagccgctcagccctggccccggggctgcaggcacgagcagtgacgccctgctcgccctcctggacccgctcagcacagcctggtcaggcagcaccctcccgtcacgccccgccaccccgaatgtagccaccccattcaccccccaattcagcttcccccctgcagggacacccaccccattcccacagccaccactcaacccctttgtcccatccatgccagcagccccacccaccctgcccctggtctccacaccagccgggcctttcggggcccctccagcttccctggggccggcttttgcgtccggcctcctgctgtccagtgctggcttctgtgcccctcacaggtctcagcccaacctctccgccctctccatgcccaacctctttggccagatgcccatgggcacccacacgagccccctacagccgctgggtcccccagcagttgccccgtcgaggatccgaacgttgcccctggcccgctcaagtgccagggctgctgagaccaagcaggggctggccctgaggcctggagaccccccgcttctgcctcccaggccccctcaaggcctggagccaacactgcagccctctgctcctcaacaggccagagacccctttgaggatttgttacagaaaaccaagcaagacgtgagcccgagtccggccctggccccggccccagactcggtggagcagctcaggaagcagtgggagaccttcgagtgagccgggccctgagggtgggggatgcaccgaggcccgagggtccgtccactgctgcggttccgaggctcccccgccactctctctctgcccaggtt

SEQ ID NO: 8130 - DNA, 2557 bp, Homo sapiens
  source 1..2557: mol_type = unassigned DNA
gaacgccggatactcatcatttgcagcaaactcagcactctgactgcctgcatccacgggtctgcggcgatgctctaccccatgtactggcagcacgtgtacatccccgtgctgccgccgcatctgctggactactgctgtgctcccatgccctacctcataggaatccatttaagtttaatggagaaagtcagaaacatggccctggatgatgtcgtgatcctgaatgtggacaccaacaccctggaaacccccttcgatgacctccagagcctcccaaacgacgtggaggagccgatcactttctgtgaggaagccttcgtgtcccactaccgctccggagccatgaggcagttcctgcagaacgccacacagctgcagctcttcaagcagtttattgatggtcgattagatcttctcaattccggcgaaggtttcagtgatgtttttgaagaggaaatcaacatgggcgagtacgctggcagtgacaaactgtaccatcagtggctctccactgtccggaaaggaagtggagcaattctgaatactgtaaagaccaaagcaaatccggccatgaagactgtctacaagttcgcaaaagatcatgcaaaaatgggaataaaagaggtgaaaaaccgcttgaagcaaaaggacattgccgagaatggctgcgcccccaccccagaagagcagctgccaaagactgcaccgtccccactggtggaggccaaggaccccaagctccgagaagaccggcggccaatcacagtccactttggacaggtgcgcccacctcgtccacatgttgttaagagaccaaagagcaacatcgcagtggaaggccggaggacgtctgtgccgagccctgagcacctggtaaagcccttgcgacactatgcggtcttcctctccgaagactcctctgatgatgaatgccagcgggaagagggcccgagctctggcttcaccgagagctttttcttctccgctccctttgaatggccgcagccgtatcggacactcagggagtcagacagcgcggaaggcgacgaggcagagagtccagagcagcaagtgcggaagtccacaggccctgtcccagctccccctgaccgggctgccagcatcgaccttctggaagacgtcttcagcaacctggacatggaggccgcactgcagccactgggccaggccaagagcttagaggaccttcgtgcccccaaagacctgagggagcagccagggacctttgactatcagaggctggatctgggcgggagtgagaggagccgcggggtgacagtggccttgaagcttacccacccgtacaacaagctctggagcctgggccaggacgacatggccatccccagcaagcccccagctgcctcccctgagaagccctcagccctgctcggaaactccctggccctgcctcgaaggccccagaaccgggacagcatcctgaaccccagtgacaaggaggaggtgcccacccctactctgggcagcatcaccatcccccggccccaaggcaggaagaccccagagctgggcatcgtgcctccaccgcccattccccgcccggccaagctccaggctgccggcgccgcacttggtgacgtctcagagcggctgcagacggatcgggacaggcgagctgccctgagtccagggctcctgcctggtgttgtcccccaaggccccactgaactgctccagccgctcagccctggccccggggctgcaggcacgagcagtgacgccctgctcgccctcctggacccgctcagcacagcctggtcaggcagcaccctcccgtcacgccccgccaccccgaatgtagccaccccattcaccccccaattcagcttcccccctgcagggacacccaccccattcccacagccaccactcaacccctttgtcccatccatgccagcagccccacccaccctgcccctggtctccacaccagccgggcctttcggggcccctccagcttccctggggccggcttttgcgtccggcctcctgctgtccagtgctggcttctgtgcccctcacaggtctcagcccaacctctccgccctctccatgcccaacctctttggccagatgcccatgggcacccacacgagccccctacagccgctgggtcccccagcagttgccccgtcgaggatccgaacgttgcccctggcccgctcaagtgccagggctgctgagaccaagcaggggctggccctgaggcctggagaccccccgcttctgcctcccaggccccctcaaggcctggagccaacactgcagccctctgctcctcaacaggccagagacccctttgaggatttgttacagaaaaccaagcaagacgtgagcccgagtccggccctggccccggccccagactcggtggagcagctcaggaagcagtgggagaccttcgagtgagccgggccctgagggtgggggatgcaccgaggcccgagggtccgtccactgctgcggttccgaggctcccccgccactctctctctgcccaggttctgctggt

SEQ ID NO: 8131 - DNA, 2195 bp, Homo sapiens
  source 1..2195: mol_type = unassigned DNA
gggggccggacggacagccccacaccgacatgtaaccatggactgcaggaccaaggcaaatccagacagaacctttgacttggtgttgaaagtgaaatgtcatgcctctgaaaatgaagaggacagtccagcttatctgccgaggattccccctggaaaagtacgccgattcgcattttgcattaagaaactggaaaactttcctgtcggtcctggcgtagcgcctcccgtgtccggggtagaccttgtaccggctgaaaccgcatagctcgaccttcatggcggcagctccacgggaggagaaaagatggccccaacctgtattttcgaatcctgtggtattgtggaaattcccagaggactttggagaccaggaaatactacagagtgtgccaaagttctgttttccctttgacgttgaaagggtgtctcagaatcaagttggacagcactttacctttgtactgacagacattgaaagtaaacagagatttggattctgcagactgacgtcaggaggcacaatttgtttatgcatccttagttaccttccctggtttgaagtgtattacaagcttctaaatactcttgcagattacttggctaaggaactggaaaatgatttgaatgaaactctcagatcactgtataaccacccagtaccaaaggcaaatactcctgtaaatttgagtgtgcattcctacttcattgcccctgatgtaactggactcccaacaatacccgagagtagaaatcttacagaatattttgttgccgtggatgtgaacaacatgctgcagctgtatgccagtatgctgcatgaaaggcgcatcgtgattatctcgagcaaattaagcactttaactgcctgtatccatggatcagctgctcttctatacccaatgtattggcaacacatatacatcccagtgcttcctccacacctgctggactactgctgtgccccaatgccatacctgattggaatacactccagcctcatagagagagtgaaaaacaaatcattggaagatgttgttatgttaaatgttgatacaaacacattagaatcaccatttagtgacttgaacaacctaccaagtgatgtggtctcggccttgaaaaataaactgaagaagcagtctacagctacgggtgatggagtagctagggcctttcttagagcacaggctgctttgtttggatcctacagagatgcactgagatacaaacctggtgagcccatcactttctgtgaggagagttttgtaaagcaccgctcaagcgtgatgaaacagttcctggaaactgccattaacctccagctttttaagcagtttatcgatggtcgactggcaaaactaaatgcaggaaggggtttctctgatgtatttgaagaagagatcacttcaggtggcttttgtggaggtaaagacaagttacaatatgattatccattttctcaataacaattttcttggtctttgcacttgtgtctgataaaacctatttcataaacaactaatgatttcctcctaaatatgtaatgtcttaaatacatttttcatcttataaaagctatggaattagcttattttgcctgatacctgttactcaaggcattaagttggcctcctgaattggcagctgttggcctcgataatctcttaatattgctggaaattagtaatacagaaatccaatcaactcatatcttcctgtctttccttctgaatagtagtattctctgctagaaaactactagtgatggttattactgagtatgaatttaagaactgaggttatgattggtaatacaatccaaaaagaagggtctgaacaccaaaattctttatacatatttaagtaactgtattattattatacagatgtctttacctttttgactttatagatcactgcagcattaagaaagtttccagtttaccattccataagtacaattaatccttctagtgtaaatgttcaaatactgttataattatctaggcaattaataatttacaaactgatatttttgcacgattgtagtggtgtatagtcttgacttgcagagcattttgcttgagtccttgaaatgtcgtgttcattcattatttgctgagtgcttacaatgtattaggcactgttctaaatattaagtgtactaaataaacaaaaatccttgtattctg

SEQ ID NO: 8132 - DNA, 2177 bp, Homo sapiens
  source 1..2177: mol_type = unassigned DNA
gccgggggcgcagccgacatgggcccgccgccacggctgctgtgagcagcctctttccctgtgtggccgccggcgtgggcggggacggcgcgaccctcgcgcggccgggctgcgggcttccaggccagcgcgcgggggccggacggacagccccacaccgacatgtaaccatggactgcaggaccaaggcaaatccagacagaacctttgacttggtgttgaaagtgaaatgtcatgcctctgaaaatgaagatcctgtggtattgtggaaattcccagaggactttggagaccaggaaatactacagagtgtgccaaagttctgttttccctttgacgttgaaagggtgtctcagaatcaagttggacagcactttacctttgtactgacagacattgaaagtaaacagagatttggattctgcagactgacgtcaggaggcacaatttgtttatgcatccttagttaccttccctggtttgaagtgtattacaagcttctaaatactcttgcagattacttggctaaggaactggaaaatgatttgaatgaaactctcagatcactgtataaccacccagtaccaaaggcaaatactcctgtaaatttgagtgtgaaccaagagatatttattgcctgtgagcaagttctgaaagatcagcctgctctagtaccgcattcctacttcattgcccctgatgtaactggactcccaacaatacccgagagtagaaatcttacagaatattttgttgccgtggatgtgaacaacatgctgcagctgtatgccagtatgctgcatgaaaggcgcatcgtgattatctcgagcaaattaagcactttaactgcctgtatccatggatcagctgctcttctatacccaatgtattggcaacacatatacatcccagtgcttcctccacacctgctggactactgctgtgccccaatgccatacctgattggaatacactccagcctcatagagagagtgaaaaacaaatcattggaagatgttgttatgttaaatgttgatacaaacacattagaatcaccatttagtgacttgaacaacctaccaagtgatgtggtctcggccttgaaaaataaactgaagaagcagtctacagctacgggtgatggagtagctagggcctttcttagagcacaggctgctttgtttggatcctacagagatgcactgagatacaaacctggtgagcccatcactttctgtgaggagagttttgtaaagcaccgctcaagcgtgatgaaacagttcctggaaactgccattaacctccagctttttaagcagtttatcgatggtcgactggcaaaactaaatgcaggaaggggtttctctgatgtatttgaagaagagatcacttcaggtggcttttgtggaggtaaagacaagttacaatatgattatccattttctcaataacaattttcttggtctttgcacttgtgtctgataaaacctatttcataaacaactaatgatttcctcctaaatatgtaatgtcttaaatacatttttcatcttataaaagctatggaattagcttattttgcctgatacctgttactcaaggcattaagttggcctcctgaattggcagctgttggcctcgataatctcttaatattgctggaaattagtaatacagaaatccaatcaactcatatcttcctgtctttccttctgaatagtagtattctctgctagaaaactactagtgatggttattactgagtatgaatttaagaactgaggttatgattggtaatacaatccaaaaagaagggtctgaacaccaaaattctttatacatatttaagtaactgtattattattatacagatgtctttacctttttgactttatagatcactgcagcattaagaaagtttccagtttaccattccataagtacaattaatccttctagtgtaaatgttcaaatactgttataattatctaggcaattaataatttacaaactgatatttttgcacgattgtagtggtgtatagtcttgacttgcagagcattttgcttgagtccttgaaatgtcgtgttcattcattatttgctgagtgcttacaatgtattaggcactgttctaaatattaagtgtactaaataaacaaaaatccttgtattctg

SEQ ID NO: 8133 - DNA, 1917 bp, Homo sapiens
  source 1..1917: mol_type = unassigned DNA
atggcggcagctccacgggaggagaaaagatggccccaacctgtattttcgaatcctgtggtattgtggaaattcccagaggactttggagaccaggaaatactacagagtgtgccaaagttctgttttccctttgacgttgaaagggtgtctcagaatcaagttggacagcactttacctttgtactgacagacattgaaagtaaacagagatttggattctgcagactgacgtcaggaggcacaatttgtttatgcatccttagttaccttccctggtttgaagtgtattacaagcttctaaatactcttgcagattacttggctaaggaactggaaaatgatttgaatgaaactctcagatcactgtataaccacccagtaccaaaggcaaatactcctgtaaatttgagtgtgcattcctacttcattgcccctgatgtaactggactcccaacaatacccgagagtagaaatcttacagaatattttgttgccgtggatgtgaacaacatgctgcagctgtatgccagtatgctgcatgaaaggcgcatcgtgattatctcgagcaaattaagcactttaactgcctgtatccatggatcagctgctcttctatacccaatgtattggcaacacatatacatcccagtgcttcctccacacctgctggactactgctgtgccccaatgccatacctgattggaatacactccagcctcatagagagagtgaaaaacaaatcattggaagatgttgttatgttaaatgttgatacaaacacattagaatcaccatttagtgacttgaacaacctaccaagtgatgtggtctcggccttgaaaaataaactgaagaagcagtctacagctacgggtgatggagtagctagggcctttcttagagcacaggctgctttgtttggatcctacagagatgcactgagatacaaacctggtgagcccatcactttctgtgaggagagttttgtaaagcaccgctcaagcgtgatgaaacagttcctggaaactgccattaacctccagctttttaagcagtttatcgatggtcgactggcaaaactaaatgcaggaaggggtttctctgatgtatttgaagaagagatcacttcaggtggcttttgtggaggtaaagacaagttacaatatgattatccattttctcaataacaattttcttggtctttgcacttgtgtctgataaaacctatttcataaacaactaatgatttcctcctaaatatgtaatgtcttaaatacatttttcatcttataaaagctatggaattagcttattttgcctgatacctgttactcaaggcattaagttggcctcctgaattggcagctgttggcctcgataatctcttaatattgctggaaattagtaatacagaaatccaatcaactcatatcttcctgtctttccttctgaatagtagtattctctgctagaaaactactagtgatggttattactgagtatgaatttaagaactgaggttatgattggtaatacaatccaaaaagaagggtctgaacaccaaaattctttatacatatttaagtaactgtattattattatacagatgtctttacctttttgactttatagatcactgcagcattaagaaagtttccagtttaccattccataagtacaattaatccttctagtgtaaatgttcaaatactgttataattatctaggcaattaataatttacaaactgatatttttgcacgattgtagtggtgtatagtcttgacttgcagagcattttgcttgagtccttgaaatgtcgtgttcattcattatttgctgagtgcttacaatgtattaggcactgttctaaatattaagtgtactaaataaacaaaaatccttgtattctg

SEQ ID NO: 8134 - DNA, 2351 bp, Homo sapiens
  source 1..2351: mol_type = unassigned DNA
attgagacaaaaacaagggcaaatccagacagaacctttgacttggtgttgaaagtgaaatgtcatgcctctgaaaatgaagatcctgtggtattgtggaaattcccagaggactttggagaccaggaaatactacagagtgtgccaaagttctgttttccctttgacgttgaaagggtgtctcagaatcaagttggacagcactttacctttgtactgacagacattgaaagtaaacagagatttggattctgcagactgacgtcaggaggcacaatttgtttatgcatccttagttaccttccctggtttgaagtgtattacaagcttctaaatactcttgcagattacttggctaaggaactggaaaatgatttgaatgaaactctcagatcactgtataaccacccagtaccaaaggcaaatactcctgtaaatttgagtgtgcattcctacttcattgcccctgatgtaactggactcccaacaatacccgagagtagaaatcttacagaatattttgttgccgtggatgtgaacaacatgctgcagctgtatgccagtatgctgcatgaaaggcgcatcgtgattatctcgagcaaattaagcactttaactgcctgtatccatggatcagctgctcttctatacccaatgtattggcaacacatatacatcccagtgcttcctccacacctgctggactactgctgtgccccaatgccatacctgattggaatacactccagcctcatagagagagtgaaaaacaaatcattggaagatgttgttatgttaaatgttgatacaaacacattagaatcaccatttagtgacttgaacaacctaccaagtgatgtggtctcggccttgaaaaataaactgaagaagcagtctacagctacgggtgatggagtagctagggcctttcttagagcacaggctgctttgtttggatcctacagagatgcactgagatacaaacctggtgagcccatcactttctgtgaggagagttttgtaaagcaccgctcaagcgtgatgaaacagttcctggaaactgccattaacctccagctttttaagcagtttatcgatggtcgactggcaaaactaaatgcaggaaggggtttctctgatgtatttgaagaagagatcacttcaggtggcttttgtggagggaacccgaggtcatatcaacaatgggtgcatacagtcaagaaaggaggtgcactgttcaacacagcaatgaccaaagcaacccctgctgtacggacagcatataaatttgcaaaaaatcatgcaaagctgggactaaaggaagtgaagagtaaactaaaacacaaggaaaatgaagaagattatgggacctgttctagttctgtacaatatacaccagtttacaaattacacaatgaaaagggaggaaactcagaaaagcgtaagcttgctcaggcacgcttaaaaaggcctcttaagagccttgatggtgctctatatgatgatgaagatgatgatgacattgaaagagcaagcaagttatcttctgaagatggtgaagaagcttctgcttatctctatgagagtgatgactctgttgaaacaagagtgaagactccttactcaggtgaaatggacttactaggagagattcttgatacattgagcacacacagctcagatcaggggaagctggcagctgcaaagagcttggatttctttagatcaatggatgacattgattacaaacctacgaataaatctaatgctcctagtgagaataacctggctttcctctgtggtggttctggtgaccaagcagagtggaatcttgggcaagacgatagtgccctccatggcaaacacctccctccatctcctaggaagcgggtttcctctagtggtttgacagattctctgtttatcctgaaagaggaaaacagtaacaagcacctcggtgctgacaatgtgagtgaccctacttcaggactggatttccaactcacttcccctgaagtttcccagactgataaaggaaaaacagaaaagagggaaacactaagccagatttcagatgatctgcttatacccggtcttgggcggcattcatcgacttttgttccttgggagaaagaagggaaagaagccaaagagacttcagaagatattggactgctccatgaagtagtgtcattatgtcatatgacatctgacttccaacaaagcttgaacatttcagacaaaaacacaaatggaaaccaaacttaaatcttgcatccaagcttctatggagacattttgagattcaatgcaatctgtataataaacagaattatttgtaggaatggcaa

SEQ ID NO: 8135 - DNA, 2411 bp, Homo sapiens
  source 1..2411: mol_type = unassigned DNA
attgagacaaaaacaagggcaaatccagacagaacctttgacttggtgttgaaagtgaaatgtcatgcctctgaaaatgaagatcctgtggtattgtggaaattcccagaggactttggagaccaggaaatactacagagtgtgccaaagttctgttttccctttgacgttgaaagggtgtctcagaatcaagttggacagcactttacctttgtactgacagacattgaaagtaaacagagatttggattctgcagactgacgtcaggaggcacaatttgtttatgcatccttagttaccttccctggtttgaagtgtattacaagcttctaaatactcttgcagattacttggctaaggaactggaaaatgatttgaatgaaactctcagatcactgtataaccacccagtaccaaaggcaaatactcctgtaaatttgagtgtgaaccaagagatatttattgcctgtgagcaagttctgaaagatcagcctgctctagtaccgcattcctacttcattgcccctgatgtaactggactcccaacaatacccgagagtagaaatcttacagaatattttgttgccgtggatgtgaacaacatgctgcagctgtatgccagtatgctgcatgaaaggcgcatcgtgattatctcgagcaaattaagcactttaactgcctgtatccatggatcagctgctcttctatacccaatgtattggcaacacatatacatcccagtgcttcctccacacctgctggactactgctgtgccccaatgccatacctgattggaatacactccagcctcatagagagagtgaaaaacaaatcattggaagatgttgttatgttaaatgttgatacaaacacattagaatcaccatttagtgacttgaacaacctaccaagtgatgtggtctcggccttgaaaaataaactgaagaagcagtctacagctacgggtgatggagtagctagggcctttcttagagcacaggctgctttgtttggatcctacagagatgcactgagatacaaacctggtgagcccatcactttctgtgaggagagttttgtaaagcaccgctcaagcgtgatgaaacagttcctggaaactgccattaacctccagctttttaagcagtttatcgatggtcgactggcaaaactaaatgcaggaaggggtttctctgatgtatttgaagaagagatcacttcaggtggcttttgtggagggaacccgaggtcatatcaacaatgggtgcatacagtcaagaaaggaggtgcactgttcaacacagcaatgaccaaagcaacccctgctgtacggacagcatataaatttgcaaaaaatcatgcaaagctgggactaaaggaagtgaagagtaaactaaaacacaaggaaaatgaagaagattatgggacctgttctagttctgtacaatatacaccagtttacaaattacacaatgaaaagggaggaaactcagaaaagcgtaagcttgctcaggcacgcttaaaaaggcctcttaagagccttgatggtgctctatatgatgatgaagatgatgatgacattgaaagagcaagcaagttatcttctgaagatggtgaagaagcttctgcttatctctatgagagtgatgactctgttgaaacaagagtgaagactccttactcaggtgaaatggacttactaggagagattcttgatacattgagcacacacagctcagatcaggggaagctggcagctgcaaagagcttggatttctttagatcaatggatgacattgattacaaacctacgaataaatctaatgctcctagtgagaataacctggctttcctctgtggtggttctggtgaccaagcagagtggaatcttgggcaagacgatagtgccctccatggcaaacacctccctccatctcctaggaagcgggtttcctctagtggtttgacagattctctgtttatcctgaaagaggaaaacagtaacaagcacctcggtgctgacaatgtgagtgaccctacttcaggactggatttccaactcacttcccctgaagtttcccagactgataaaggaaaaacagaaaagagggaaacactaagccagatttcagatgatctgcttatacccggtcttgggcggcattcatcgacttttgttccttgggagaaagaagggaaagaagccaaagagacttcagaagatattggactgctccatgaagtagtgtcattatgtcatatgacatctgacttccaacaaagcttgaacatttcagacaaaaacacaaatggaaaccaaacttaaatcttgcatccaagcttctatggagacattttgagattcaatgcaatctgtataataaacagaattatttgtaggaatggcaa

SEQ ID NO: 8136 - DNA, 6960 bp, Homo sapiens
  source 1..6960: mol_type = unassigned DNA
gtaaagcaccgctcaagcgtgatgaaacagttcctggaaactgccattaacctccagctttttaagcagtttatcgatggtcgactggcaaaactaaatgcaggaaggggtttctctgatgtatttgaagaagagatcacttcaggtggcttttgtggagggaacccgaggtcatatcaacaatgggtgcatacagtcaagaaaggaggtgcactgttcaacacagcaatgaccaaagcaacccctgctgtacggacagcatataaatttgcaaaaaatcatgcaaagctgggactaaaggaagtgaagagtaaactaaaacacaaggaaaatgaagaagattatgggacctgttctagttctgtacaatatacaccagtttacaaattacacaatgaaaagggaggaaactcagaaaagcgtaagcttgctcaggcacgcttaaaaaggcctcttaagagccttgatggtgctctatatgatgatgaagatgatgatgacattgaaagagcaagcaagttatcttctgaagatggtgaagaagcttctgcttatctctatgagagtgatgactctgttgaaacaagagtgaagactccttactcaggtgaaatggacttactaggagagattcttgatacattgagcacacacagctcagatcaggggaagctggcagctgcaaagagcttggatttctttagatcaatggatgacattgattacaaacctacgaataaatctaatgctcctagtgagaataacctggctttcctctgtggtggttctggtgaccaagcagagtggaatcttgggcaagacgatagtgccctccatggcaaacacctccctccatctcctaggaagcgggtttcctctagtggtttgacagattctctgtttatcctgaaagaggaaaacagtaacaagcacctcggtgctgacaatgtgagtgaccctacttcaggactggatttccaactcacttcccctgaagtttcccagactgataaaggaaaaacagaaaagagggaaacactaagccagatttcagatgatctgcttatacccggtcttgggcggcattcatcgacttttgttccttgggagaaagaagggaaagaagccaaagagacttcagaagatattggactgctccatgaagtagtgtcattatgtcatatgacatctgacttccaacaaagcttgaacatttcagacaaaaacacaaatggaaaccaaacttaaatcttgcatccaagcttctatggagacattttgagattcaatgcaatctgtataataaacagaattatttgtaggaatggcaactcatactatttaaatttttttttgcatttgcaacatttttctcacttgttcatttcgaggatatatgaaatgcattgatttttaaatataaagcgaattctactgtgcttttaaatcaggtactagtgtgtatgtatgtttaaagtatgtattgaccatgagatttcccagtgtttggtgcttaatgccgtttattttatttaagctaagaatgcatatgtaacccatgcacataaccagtagctactatactaatctggttgagcatgaactgatcaagatatcaaaacttatcaaaactagcctgaagctgatgaaactgttaacccactaattgccttaatcttaaagctgttttttaagcatacttaaataatgtatgaaagtatgtataaagtttgaaggataagttattagtgttctgcagagcaataatgcctttttctattcatcaaatcaaggtcaaaattcatcttttcaagattaaaaagctctcttaatggaaatatttaatttgcttatataaagcactatagccatgttttccaaaaagtataaaaatatacacttacctttcattcagtgaaatataggaagtgctgaattacaatgtgaagttaatgacttctgtttacaaatgagacactctaacgagttttcagtctctctgtatgcctttgctatttaggggtccaccccaagaaagccaaatacaacataaaccgtcctgacaaaaaaaaaaaaaaaaatctttttttaactaataattctctatcaaaatgcttcatatcatcatctcaaatttactttttaaaataattgactttgtattttagaagttttagatttacagaaaaattgcaaagatagtacagagagttcccatctacccctgttactaacatcttacgttactatggtacatctgccccaattagtgaaccaatattgatattccatactttattcagattttcttagttttctcctaatatccattttccacatcaagatcctattcagaataccacactatattgagttggaatgtctccttaggctcctcttgcctgtgacagtttcttagactttccttatttttgatgacattgacagctttgaagagtactgtcagataaattgtagcatgctcctctcttggagtttgttgggtatttttttcatgattagactgggattgtgggttttgaggagatgatcacagaagtaaagtgccattttcatcaggtcatatcaagggtacgtactgtcaacatgatttgtgaatgctgacagggaccttgataacctggctgaggtagcgtttgtcactctaaagttcttcctgccctttccatgctgtcatttttggaaggaagtcactacatgcaggagtgaggagtcataattccccttctttagggcagagaagtatctacataaataactgggaattctgtatagaaaatttgtttcttctttctcaaattcactgttgagctttggaattcatctgagaaggaatcatgtactaattacttcatgatagactagattaccaggcacaatcagggaaaaaagcagtgatagtatggttaaattgttattagcattttcagtatatccactttatacatccccaatcatgattttttttacatttctttttagaaaagatgttcaagaaatcattaaagaaccccaataagactatattctaaatatttattgaaagaatataatttcagctaaaatcctagaagagggtttgaaataatttaaagaaaatgaccaagtttttttaaaacctacgtttcaaaatctaaatggatatgtgttatttgggacacttattcattatgattatataagaagacaattcttgtttcccttataagtatggactgtatacattaaggaaaacaatgtttaatccttattttttaatacagaagtctcaaggttcttgtcaaattttgcctttataagcttattacaaaattacaacttactttactgaagtttataatggaagaagtccatatagcaaaagagctgttttaaatcagaaggaaaaaaggttactctggttgttaatctgcttggcaaatattccttcataatttgtgaaaagaatgcaaatcagcattttaatatgaattttgaaatgaggtatggttttttgtttgtttttttcagaactcagtctgaaaaacaactgtgagtgtagcatgggtcaaatttggtttttagtccatttgctttatcaacatcacggcttcagaaatccaaattttgttctacttttcagccacctttcaaggtgtttggttataatactgtgttgctttgaggatatttagccactcataaataattgtctcaaggtatttaaaagtgatttgtgccttattttaatgcaaaattagcagttttattctattttaaaaacaaaggcagaaaaacaattctgcatgttattctttaaaaacatccagaataatactaccaagtatttgtatttcaaaccagtaaaattttgaatattcaaagtctgctcttaaacttagacttcctagtattatggtggttatagtgagaatgaaattaaactgggtgagttccgaaataaaggaaagtgttatattctacagtgcccatattttctatggtaactaaatcaaatatttgtaagttcctctgctttttgaaattatttttcaaagaagcaacacctgttatacaacagaattgtataaactaaaaagacttttggccttggtacatagtctttatctggcctgcaatggagtcatggttctttctgaatcccactctcacttttttctttttacccttagatattgcatccgtggtatttcaggggtatagagaaataatattggaatttaggagctatttttttaagtgaaaatattactaagtggtatcttttgatgattacctactttaatgtgtcttagaaaagcaccaaaacatagcatgattattttttcagttaattaaaattagttaataacatgttcatttaaaaactattcattgactttttgtaccagtcatatgcagggtacagtaactgaggatatgggaaataaaataactgacatagtccctgctctgaaggaacaaaggaaaaggaattgcaaatttttattaaaataataataataataataataataataataataataataataatgtgttttgcctggaagttattagctgagattctaacacacaaaaagttcaaaaaaaaagaacaaaaactggctgcttaatttaaagcatgctctaagtatgaaccatagtatcatttctaatttcattaactttctcaattattatgctaagtatattatgctgctaagatacccacatttaaggggcagatttagagactcttttagaaactgagtgtctttatcttattatcagataaccaggctgcacagggctctctataatggaatgatgctccttttcaatacttagagccactgtactcagtttaggagtaactgaaggtgtggatgcatgttaatgggaatccaatttttactatttttatatgaataacagcgttctgtagaaacagtctctcccttctaaataaaaactatgtgactgctgttactagtgctattctatgcgaatatcctaataataggattcaggaattctaatgaattgtttcttaattaaggtgaacaagtagactcctgatcaagaggagaacactgtgaatgtctcataatcaatagaccttcattctcttgtagaaaatgtggattttcaggaaaagactgattattttcatgaataaattttcttatacaaattccattttgtttgacataaaagaccctgaatcttaagatatttgtaaatcagaatatttaagaatgtaaaatgaatccccaaatctagtttcctccaaagcacttcttaatgtaggaaatagtttttacaaaccctatgtcagtactaatgttcctgggtcaaacccagtaatattgttagtgtatgttgttacaccttatttaagaggcagagtggttttgagcaagtcagttaacgtgatttgatgaagaaataaggaattatatacatttagacagaagaatattttattttgaaaataggatttcgtgcaataatttttcttgcataacttagttcatataaatatgtacatctgtttttctggcagatgccttaaggtcatgtttttcagtatttgagtaaatctgtatgtagcaatgttctcattgatttcagaaaaaaatatattctttatattgttgccaggagaaatgtttttgtttatttaaaattattatggatattgtgttgttgtatcataactaactgcctcagcaacaataaatatgcaataagaaaatcctgtaccttagattagattgacaatactgttactttaaaagaaatatatacggtacaaattgctgattctacatgtgtacatttaacagatactcagttctgcaccacctaaatcaaaatggcatttgtatgctgatgattacatatgtggattgtagtatcctttgtgatgaatctttgataagatttataaagggcattgccaatactttttgactgtgtaaattaattttttgtatgatgtacagtttgtttaatcttagagcttctatagatttctactttattatacttgaatgaggcagaaaagcactgtggaaaatctgtagctctggatgcaacatgcagacataccaaaaaaataataataaagcaaggtactgaagagcaatgttaacagaatgctttatatccagaatgctatgtttttttcaagccacattttagttgaatgaagtaaagttattcaatcttttattttaaaatattggaaagtcacaaatgattacttctttgatatgatgaacctataagtctattcatctctgttatttcatttctcaaatgtgagccttgttgaggtccattatcaaatctacactttggttgattatatgatgtttaggacaaggcagaatttaaaacctgcatgtttagtgcatcacatgtcaagtcaccatccttctgacagtgtaacttccataacgttattttgagagccatttaataatcatatttgaaaaagtggatttcttgagtctgttgtagtttagtacttacagcagtgcctaaaacagcaactaatatgaactgcctgagtcctacaacataaatgcataaagcttttttatgtaaaagccacaggaggggttcaaaattgaacttttccaaagtttatttctcttgcgttagatgaaaaactatttaaaaggactgaaaaccctgagctttttgctcgtcttggtagcagatatctgtaaaaacctacccagaattgtgattttacttcattgttcttgcatccttgaggctacagtataaatcatctccaaacttgactactattgggaagatgtgtataaaagcatcgctttgggaatttttttaaaaatatgcaaaaataaatattgaataaaatctacattaccataaaacacccaaaaatgcagttctaaaataaaattggtcacaattaaa

SEQ ID NO: 8137 - DNA, 2794 bp, Homo sapiens
  source 1..2794: mol_type = unassigned DNA
acacaggaagctgagccggcttggggcccagcatacacaggcccccaggacccctggggagagggccccgctgggctggccctgcagggaccatggaatccagagctgaagggggctcccctgctgtgtttgattggttcttcgaagcggcctgccctgcctccctgcaggaggatccccccatcctgcggcagttccctccagacttcagggaccaggaagctatgcagatggtgcctaaattctgcttcccttttgatgtggaaagggagccccccagccccgccgtgcagcatttcaccttcgccctcacagaccttgccggcaaccgcagatttggtttctgccgcctgcgggcgggtacccagagctgtctctgcatcctcagccacctgccttggttcgaggtgttttacaagctattgaacacagtgggagacctcctagcccaggaccaagtcaccgaggcagaggaacttcttcaaaatctgtttcagcagtccctgtctgggccccaggcctcagtggggcttgagctgggcagcggagtgacggtctccagcgggcagggtatccccccccctacccgggggaatagcaagccgctttcctgcttcgtggccccggactccggccgcctgccatccatccctgagaacaggaacctaacggagctggtggtggccgtgactgacgagaacatcgtggggctgttcgcggcgctcctggccgagagaagagtcctgctcaccgccagcaaactcagcaccctgacctcgtgcgtccacgcgtcctgcgcgctcctgtaccccatgcgctgggagcacgtgctgatccccacgctgcccccacacctgctggactactgctgcgcgcccatgccctacctcattggagtgcacgccagtctcgccgagagagtacgagaaaaagccctggaggacgtcgtggtgctgaacgtggacgccaataccttggagacgacctttaacgacgtgcaggcgctgcctccagacgtggtgtccctgctgaggctccggctcaggaaggtcgccctggcccccggggaaggggtgtcccgtctcttcctcaaagcccaggccctgctcttcggggggtaccgcgacgcactcgtctgcagcccgggccagccagtgaccttcagtgaggaagtcttcttggcccagaagcctggggcacctctgcaggccttccaccggcgggctgtgcacctgcagctgttcaaacagttcatcgaagcccggctggagaagctcaacaagggggagggcttctcagatcaattcgagcaggagatcactggctgcggggcctcctcaggggcccttcgatcctatcagctctgggccgacaatctaaagaaaggtggtggcgccctcctgcactcagtcaaggccaagacccaaccagccgtcaagaacatgtaccgctcggccaagagtggcttgaagggggtgcagagccttctaatgtataaggatggggactctgtcctgcagagggggggctctctgagggccccagccctccccagccgctcagaccgcctgcagcaacgcctcccaatcactcagcactttggaaagaaccggccccttcgccccagcaggagacgccagctggaagagggaacttccgagcccccaggggcggggacacccccactgagccctgaggatgaggggtgcccgtgggcagaagaagctctggacagcagcttcttggggtctggagaagaactggatttgttgagcgagattctggacagtcttagcatgggagccaagagcgcaggcagcctgagaccgagccagagtttagactgctgtcacagaggagacctggacagctgcttcagcctgcccaacataccaagatggcaaccagacgataagaaactaccagagccggagccccagcccctttccctgccatccctgcaaaatgcctcgtctttggatgccaccagctcttcaaaggactccaggtcccagctgataccctcagagtccgaccaagaagtcacgtctccatcccagtcctcaacagcttctgcagacccaagcatctggggggaccccaaaccctctcctctcacagagcccctaattcttcatctcaccccttcccacaaggcagctgaagattctacagcccaggaaaaccccactccctggctctccactgcacccactgagcccagccctccagaaagcccccaaattctggcccccacaaagcccaactttgatatagcctggacgtcccagccccttgatccttcctcagaccccagttctctggaggaccccagagcccggcctcccaaagccctgctggcagagcgcgctcacctccagccacgggaggaaccaggagccctgaattcccctgctacacccaccagcaactgtcaaaagtcccagcccagcagccggcccagagtcgctgatcttaagaagtgctttgagggttaagaatcaggggtccaagagagaccccagtccctcaataaagccacaagagcccaaaaaagctggtttttttcctggtgaatttctctggtgccctcactctgctcggaaatccatcccacccacctctgtccctccaagggcagcctctctaactggctcctagcagggaattccaggaagcctcctggtcttctagaatcctggcaaccttacaattcctctcggcatttgtcacttccatctcagctaatgcacccaccagctcaaacacaccaataaagcttttgttacatctc

SEQ ID NO: 8138 - DNA, 2395 bp, Homo sapiens
  source 1..2395: mol_type = unassigned DNA
acacaggaagctgagccggcttggggcccagcatacacaggcccccaggacccctggggagagggccccgctgggctggccctgcagggaccatggaatccagagctgagaagctatgcagatggtgcctaaattctgcttcccttttgatgtggaaagggagccccccagccccgccgtgcagcatttcaccttcgccctcacagaccttgccggcaaccgcagatttggtttctgccgcctgcgggcgggtacccagagctgtctctgcatcctcagccacctgccttggttcgaggtgttttacaagctattgaacacagtgggagacctcctagcccaggaccaagtcaccgaggcagaggaacttcttcaaaatctgtttcagcagtccctgtctgggccccaggcctcagtggggcttgagctgggcagcggagtgacggtctccagcgggcagggtatccccccccctacccgggggaatagcaagccgctttcctgcttcgtggccccggactccggccgcctgccatccatccctgagaacaggaacctaacggagctggtggtggccgtgactgacgagaacatcgtggggctgttcgcggcgctcctggccgagagaagagtcctgctcaccgccagcaaactcagcaccctgacctcgtgcgtccacgcgtcctgcgcgctcctgtaccccatgcgctgggagcacgtgctgatccccacgctgcccccacacctgctggactactgctgcgcgcccatgccctacctcattggagtgcacgccagtctcgccgagagagtacgagaaaaagccctggaggacgtcgtggtgctgaacgtggacgccaataccttggagacgacctttaacgacgtgcaggcgctgcctccagacgtggtgtccctgctgaggctccggctcaggaaggtcgccctggcccccggggaaggggtgtcccgtctcttcctcaaagcccaggccctgctcttcggggggtaccgcgacgcactcgtctgcagcccgggccagccagtgaccttcagtgaggaagtcttcttggcccagaagcctggggcacctctgcaggccttccaccggcgggctgtgcacctgcagctgttcaaacagttcatcgaagcccggctggagaagctcaacaagggggagggcttctcagatcaattcgagcaggagatcactggctgcggggcctcctcaggggcccttcgatcctatcagctctgggccgacaatctaaagaaaggtggtggcgccctcctgcactcagtcaaggccaagacccaaccagccgtcaagaacatgtaccgctcggccaagagtggcttgaagggggtgcagagccttctaatgtataaggatggggactctgtcctgcagagggggggctctctgagggccccagccctccccagccgctcagaccgcctgcagcaacgcctcccaatcactcagcactttggaaagaaccggccccttcgccccagcaggagacgccagctggaagagggaacttccgagcccccaggggcggggacacccccactgagccctgaggatgaggggtgcccgtgggcagaagaagctctggacagcagcttcttggggtctggagaagaactggatttgttgagcgagattctggacagtcttagcatgggagccaagagcgcaggcagcctgagaccgagccagagtttagactgctgtcacagaggagacctggacagctgcttcagcctgcccaacataccaagatggcaaccagacgataagaaactaccagagccggagccccagcccctttccctgccatccctgcaaaatgcctcgtctttggatgccaccagctcttcaaaggactccaggtcccagctgataccctcagagtccgaccaagaagtcacgtctccatcccagtcctcaacagcttctgcagacccaagcatctggggggaccccaaaccctctcctctcacagagcccctaattcttcatctcaccccttcccacaaggcagctgaagattctacagcccaggaaaaccccactccctggctctccactgcacccactgagcccagccctccagaaagcccccaaattctggcccccacaaagcccaactttgatatagcctggacgtcccagccccttgatccttcctcagaccccagttctctggaggaccccagagcccggcctcccaaagccctgctggcagagcgcgctcacctccagccacgggaggaaccaggagccctgaattcccctgctacacccaccagcaactgtcaaaagtcccagcccagcagccggcccagagtcgctgatcttaagaagtgctttgagggttaagaatca

SEQ ID NO: 8139 - DNA, 4573 bp, Homo sapiens
  source 1..4573: mol_type = unassigned DNA
cgcggtttgtccgcgcctctgctaccccctgcgcaggcgctcaaggagctcttggactccaggttcccgcggctgggagaaaaggaggcggggatccgaagggggaaatgactctgaggcgcccggacgtcgctcggaagccaatcagagagcgtgacgtcagtttggcgcggagtttggcggccggggcttacagtggcgggagttggaggcgataacgatttgtgttgtgagaggcgcaagctgcgatttctgctgaacttggaggcatttctacgacttttctctcagctgaggcttttcctccgaccctgatgctcttcaattcggtgctccgccagccccagcttggcgtcctgagaaatggatggtcttcacaataccctcttcaatcccttctgactggttatcagtgcagtggtaatgatgaacacacttcttatggagaaacaggagtcccagttcctccttttggatgtaccttctcttctgctcccaatatggaacatgtactagcagttgccaatgaagaaggctttgttcgattgtataacacagaatcacaaagtttcagaaagaagtgcttcaaagaatggatggctcactggaatgccgtctttgacctggcctgggttcctggtgaacttaaacttgttacagcagcaggtgatcaaacagccaaattttgggacgtaaaagctggtgagctgattggaacatgcaaaggtcatcaatgcagcctcaagtcagttgccttttctaagtttgagaaagctgtattctgtacgggtggaagagatggcaacattatggtctgggataccaggtgcaacaaaaaagatgggttttataggcaagtgaatcaaatcagtggagctcacaatacctcagacaagcaaaccccttcaaaacccaagaagaaacagaattcaaaaggacttgctccttctgtggatttccagcaaagtgttactgtggtcctctttcaagacgagaataccttagtctcagcaggagctgtggatgggataatcaaagtatgggatttacgtaagaattatactgcttatcgacaagaacccatagcatccaagtctttcctgtacccaggtagcagcactcgaaaacttggatattcaagtctgattttggattccactggctctactttatttgctaattgcacagacgataacatctacatgtttaatatgactgggttgaagacttctccagtggctattttcaatggacaccagaactctaccttttatgtaaaatccagccttagtccagatgaccagtttttagtcagtggctcaagtgatgaagctgcctacatatggaaggtctccacaccctggcaacctcctactgtgctcctgggtcattctcaagaggtcacgtctgtgtgctggtgtccatctgacttcacaaagattgctacctgttctgatgacaatacactaaaaatctggcgcttgaatagaggcttagaggagaaaccaggaggtgataaactttccacggtgggttgggcctctcagaagaaaaaagagtcaagacctggcctagtaacagtaacgagtagccagagtactcctgccaaagcccccagggcaaagtgcaatccatccaattcttccccgtcatccgcagcttgtgccccaagctgtgctggagacctccctcttccttcaaatactcctacgttctctattaaaacctctcctgccaaggcccggtctcccatcaacagaagaggctctgtctcctccgtctctcccaagccaccttcatctttcaagatgtcgattagaaactgggtgacccgaacaccttcctcatcaccacccatcactccacctgcttcggagaccaagatcatgtctccgagaaaagcccttattcctgtgagccagaagtcatcccaagcagaggcttgctctgagtctagaaatagagtaaagaggaggctagactcaagctgtctggagagtgtgaaacaaaagtgtgtgaagagttgtaactgtgtgactgagcttgatggccaagttgaaaatcttcatttggatctgtgctgccttgctggtaaccaggaagaccttagtaaggactctctaggtcctaccaaatcaagcaaaattgaaggagctggtaccagtatctcagagcctccgtctcctatcagtccgtatgcttcagaaagctgtggaacgctacctcttcctttgagaccttgtggagaagggtctgaaatggtaggcaaagagaatagttccccagagaataaaaactggttgttggccatggcagccaaacggaaggctgagaatccatctccacgaagtccgtcatcccagacacccaattccaggagacagagcggaaagaaattgccaagcccggtcaccatcacgcccagctccatgaggaaaatctgcacatacttccatagaaagtcccaggaggacttctgtggtcctgaacactcaacagaattatagattctaatctgagtgagttactgagctttggtccactaaaacaagctgagctttggtccactaaaacaagatgaaaaatacaagagtgactctataactctggtctttaagaaagctgccttttcatttttagacaaaatcttttcaacgctgaaatgtacctaatctggttctactaccataatgtatatgcagcttcccgaggatgaatgctgtgtttaaatttcataaagtaaatttgtcactctagcattttgaatgaatagtcttcactttttaaattattcatcttctctataataatgacatcccagttcatggaggcaaaaaacaagtttcttgttatcctgaaactttctatgctcagtggaaagtatctgccagccacagcatgaggcctgtgaaggctgactgagaaatcctctgctgaagacccctggttctgttctgcctccaacatgtataattttatttgaaatacataatcttttcactatgcttttgtggggttttttttaagtatgtgtaaaaatgtgatgctcagataagtacatttatatcagttcagtgttaaaatgcagtctcttgagttaaagtcatctttattttaaatgcagtgataaatgtcaactcttcggagaaactaggagaacaacaacagaaagctgtgtttgtcttttttctctcaaatatatctcccgtatgagatttcaggtccccatgttttcaccaagcaatctgctatgtcagccaacccaacatcactttctacaggaggttatgatttttgccatttactagaggaagatgttttatgaaatcaatttggggtttgaattcaggtgcagtcatcagttctttaggggctgcaatgttttaaaaaaaataagtcatcagattttaagaaaaaagtgatgatttcttattgatatttttgtaacagaatatagctcttaactgaaaatccagaaccagaaacataaatcttgagtttcttttcatgtacataaaaagcaatagccttttagtatagatagccctgagccaaaaagtaatagaattttctctagatatttaatacagagagtgtatagactgactctaagttaataatgtgcaaaatatcttaaacatccctccccttattcaacaattatgtatcagtgatcttgaaccattgttttatatttttcacctttgtaacctcatggaaagaggctttacatactttctatgtactatttacttagaagggagcccccttccagtcatgaaacttcatttgttttatccatatccctgaggactgtgtagactttatgtcagtttttgtcattatttgaaaatctattctgacaactttttaattcctttgatcttataagttaaagctgtaacaactgaaattgcatggatcaagtaagcatagttttatccagggagaaaaataaaaggaagccatagaattgctctggtcaaaaccaagcacaccatagccttaactgaatatttaggaaatctgcctaatctgcttatatttggtgtttgttttttgactgttgggctttgggaagatgttatttatgaccaatatctgccagtaacgctgtttatctcacttgctttgaaagccaatgggggaaaaaaatccatgaaaaaaaaaagattgataaagtagatgattttgtttgtatccctacccatctcctggcagccctactgagtgaaattgggatacatttggctgtcagaaattataccgagtctactgggtataacatgtctcacttggaaagctagtacttttaaatgggtgccaaaggtcaactgtaatgagataattatccctgcctgtgtccatgtcagactttgagctgatcctgaataataaagccttttaccttatctgatgtccttttctgagctttttgcattacctagaagcagtctacaaaaaagaactatagtagtcaagaatcccttctacttgttcattaaaatgtttattcccaaagttataatctatttcaagctgaaagagcttttaataaaaaacatcttgcttg

SEQ ID NO: 8140 - DNA, 1637 bp, Homo sapiens
  source 1..1637: mol_type = unassigned DNA
aacgatttgtgttgtgagaggcgcaagctgcgatttctgctgaacttggaggcatttctacgacttttctctcagctgaggcttttcctccgaccctgatgctcttcaattcggtgctccgccagccccagcttggcgtcctgagaaatggatggtcttcacaataccctcttcaatcccttctgactggttatcagtgcagtggtaatgatgaacacacttcttatggagaaacaggagtcccagttcctccttttggatgtaccttctcttctgatgacaatacactaaaaatctggcgcttgaatagaggcttagaggagaaaccaggaggtgataaactttccacggtgggttgggcctctcagaagaaaaaagagtcaagacctggcctagtaacagtaacgagtagccagagtactcctgccaaagcccccagggcaaagtgcaatccatccaattcttccccgtcatccgcagcttgtgccccaagctgtgctggagacctccctcttccttcaaatactcctacgttctctattaaaacctctcctgccaaggcccggtctcccatcaacagaagaggctctgtctcctccgtctctcccaagccaccttcatctttcaagatgtcgattagaaactgggtgacccgaacaccttcctcatcaccacccatcactccacctgcttcggagaccaagatcatgtctccgagaaaagcccttattcctgtgagccagaagtcatcccaagcagaggcttgctctgagtctagaaatagagtaaagaggaggctagactcaagctgtctggagagtgtgaaacaaaagtgtgtgaagagttgtaactgtgtgactgagcttgatggccaagttgaaaatcttcatttggatctgtgctgccttgctggtaaccaggaagaccttagtaaggactctctaggtcctaccaaatcaagcaaaattgaaggagctggtaccagtatctcagagcctccgtctcctatcagtccgtatgcttcagaaagctgtggaacgctacctcttcctttgagaccttgtggagaagggtctgaaatggtaggcaaagagaatagttccccagagaataaaaactggttgttggccatggcagccaaacggaaggctgagaatccatctccacgaagtccgtcatcccagacacccaattccaggagacagagcggaaagaaattgccaagcccggtcaccatcacgcccagctccatgaggaaaatctgcacatacttccatagaaagtcccaggaggacttctgtggtcctgaacactcaacagaattatagattctaatctgagtgagttactgagctttggtccactaaaacaagctgagctttggtccactaaaacaagatgaaaaatacaagagtgactctataactctggtctttaagaaagctgccttttcatttttagacaaaatcttttcaacgctgaaatgtacctaatctggttctactaccataatgtatatgcagcttcccgaggatgaatgctgtgtttaaatttcataaagtaaatttgtcactctagcattttgaatgaatagtcttcactttttaaattattcatcttctctataataatgacat

SEQ ID NO: 8141 - DNA, 2530 bp, Homo sapiens
  source 1..2530: mol_type = unassigned DNA
agtttggcggccggggcttacagtggcgggagttggaggcgataacgatttgtgttgtgagaggcgcaagctgcgatttctgctgaacttggaggcatttctacgacttttctctcagctgaggcttttcctccgaccctgatgctcttcaattcggtgctccgccagccccagcttggcgtcctgagaaatgctcccaatatggaacatgtactagcagttgccaatgaagaaggctttgttcgattgtataacacagaatcacaaagtttcagaaagaagtgcttcaaagaatggatggctcactggaatgccgtctttgacctggcctgggttcctggtgaacttaaacttgttacagcagcaggtgatcaaacagccaaattttgggacgtaaaagctggtgagctgattggaacatgcaaaggtcatcaatgcagcctcaagtcagttgccttttctaagtttgagaaagctgtattctgtacgggtggaagagatggcaacattatggtctgggataccaggtgcaacaaaaaagatgggttttataggcaagtgaatcaaatcagtggagctcacaatacctcagacaagcaaaccccttcaaaacccaagaagaaacagaattcaaaaggacttgctccttctgtggatttccagcaaagtgttactgtggtcctctttcaagacgagaataccttagtctcagcaggagctgtggatgggataatcaaagtatgggatttacgtaagaattatactgcttatcgacaagaacccatagcatccaagtctttcctgtacccaggtagcagcactcgaaaacttggatattcaagtctgattttggattccactggctctactttatttgctaattgcacagacgataacatctacatgtttaatatgactgggttgaagacttctccagtggctattttcaatggacaccagaactctaccttttatgtaaaatccagccttagtccagatgaccagtttttagtcagtggctcaagtgatgaagctgcctacatatggaaggtctccacaccctggcaacctcctactgtgctcctgggtcattctcaagaggtcacgtctgtgtgctggtgtccatctgacttcacaaagattgctacctgttctgatgacaatacactaaaaatctggcgcttgaatagaggcttagaggagaaaccaggaggtgataaactttccacggtgggttgggcctctcagaagaaaaaagagtcaagacctggcctagtaacagtaacgagtagccagagtactcctgccaaagcccccagggcaaagtgcaatccatccaattcttccccgtcatccgcagcttgtgccccaagctgtgctggagacctccctcttccttcaaatactcctacgttctctattaaaacctctcctgccaaggcccggtctcccatcaacagaagaggctctgtctcctccgtctctcccaagccaccttcatctttcaagatgtcgattagaaactgggtgacccgaacaccttcctcatcaccacccatcactccacctgcttcggagaccaagatcatgtctccgagaaaagcccttattcctgtgagccagaagtcatcccaagcagaggcttgctctgagtctagaaatagagtaaagaggaggctagactcaagctgtctggagagtgtgaaacaaaagtgtgtgaagagttgtaactgtgtgactgagcttgatggccaagttgaaaatcttcatttggatctgtgctgccttgctggtaaccaggaagaccttagtaaggactctctaggtcctaccaaatcaagcaaaattgaaggagctggtaccagtatctcagagcctccgtctcctatcagtccgtatgcttcagaaagctgtggaacgctacctcttcctttgagaccttgtggagaagggtctgaaatggtaggcaaagagaatagttccccagagaataaaaactggttgttggccatggcagccaaacggaaggctgagaatccatctccacgaagtccgtcatcccagacacccaattccaggagacagagcggaaagaaattgccaagcccggtcaccatcacgcccagctccatgaggaaaatctgcacatacttccatagaaagtcccaggaggacttctgtggtcctgaacactcaacagaattatagattctaatctgagtgagttactgagctttggtccactaaaacaagctgagctttggtccactaaaacaagatgaaaaatacaagagtgactctataactctggtctttaagaaagctgccttttcatttttagacaaaatcttttcaacgctgaaatgtacctaatctggttctactaccataatgtatatgcagcttcccgaggatgaatgctgtgtttaaatttcataaagtaaatttgtcactctagcattttgaatgaatagtcttcactttttaaattattcatcttctctataataatgacatcccagttcatgga

SEQ ID NO: 8142 - DNA, 2634 bp, Homo sapiens
  source 1..2634: mol_type = unassigned DNA
tgggcatagatttcctctttgagaacatcaacctgatttttgagactttttgaaaaaattctttgtgaactacggagggtagaggtatcacacccaactatgaagatcagcatcctgctcatgttcctttggggattatcctgtgctctcccagtaaccaggtatcaaaataatgaatctgaggattctgaagaatggaagggtcatttggctcaggcaccaacaccacccttggcaaatgaagaccccagtgacagcactcagtcagaggagggcctgggctctgatgatcatcaatacatttataggctagctggtggcttctccaggagcacaggaaaaggaggagatgataaagatgacgatgaagatgacagtggagatgacacctttggtgacgatgacagtggcccagggcccaaagacagacaagaaggaggaaactccagactgggaagtgatgaggactctgatgacaccatacaagccagtgaagagagtgccccacaagggcaagacagtgcccaagataccaccagtgagagcagggaacttgacaatgaggaccgggtggacagcaagcctgagggaggtgactccactcaagagagtgagagtgaagagcactgggtgggaggtggcagtgatggggagagcagccatggagacggctccgagttggacgatgagggaatgcagagtgatgacccagagagcatcaggagtgaaaggggaaactccagaatgaacagtgcaggcatgaaatcaaaagaatctggagaaaacagtgagcaagcaaacactcaagattcaggtggcagccaattgctggagcatcccagtaggaaaatttttaggaagtctcgcatctcagaggaagatgacagaagcgagcttgatgacaacaacacaatggaagaagtcaagagtgactctacagaaaacagcaactccagagacactggcctcagccaacccaggagagacagcaagggtgactctcaagaagacagcaaggagaatctgtcccaggaagagagccaaaacgtagatggtcccagcagtgagtccagccaagaggccaacctgtcatctcaagagaacagcagtgagtctcaggaagaggtggtgagtgagtccaggggagataaccccgaccccacaactagttatgtagaagaccaggaagacagtgactccagcgaggaggacagctcgcacacactctcccactcaaaaagtgaatccagagaggagcaagcagacagcgaatccagtgagagcctcaacttctcagaggaaagcccggagtcccctgaggatgagaacagctccagccaggagggcctccagtctcacagcagctcagcagagagtcagagcgaggaaagccattctgaggaagacgacagtgactctcaagacagcagcagatccaaagaagatagcaactccacggagagcaaatcaagcagtgaggaagatggccagttgaaaaacattgagatagagagccggaaattaacagttgatgcctatcacaacaaacccattggggaccaagatgacaatgactgccaagacggctattagcatcagctgtcctaagaagcagttgtcacataaaggagtcttagggacttgaaaatgtatcatgataactataatttattgatgttttgatcaaaagaataaccagatgccatatttttcctgaaaggaattgctggacattacacttgtttttagggtgtcatcatttcacagaggtttaaatactgtggagtgacaccagaacacagccaaagaggctagaagcaagaaaggatctgcatgataactttgcagctgagatagttcctaattcatcaacgtaacaaacaaagctattgggtgtccatgatataccaggcactatgctaggtgttgagaatgtaaagcaggttaagacttgtttcttgctcctgaggagcgtatagaaggacccacaaagctacagagttaaagagggatatgtataagagaaacaagaattgttacaacccagtatggtgagtgccaagacagagagctatgaacacgatatctatctgggaacactgagaagggtgaccaatgcgttggagaacgagggagggcttcatagcagaagacattggagttggaaggttgcatagggtttcctcattggagaccgggaaattctattcttgggataaataatagtaaattctataggattcaatacttagtttgcaaaagcactttgaaattatggcacagtgagttgttttggataagaaaatctttttctcccaattaatttaccaattcatcatttttttttttttgtagaactcccataaacatcaccttactaatcactggtgatgataagaaggattgggtcaggaagagtgggagaaagaaattcctctttacgtagatactttttagctttattttttctaaaatcagtttgcgtgcaatgctagaaaaaaactgttctctgagtcctttacagagcaaaattctgtatgtaagattcaattgatttttgacaaataccatttgaaatattacctcaacataaaatacttgttttgtaataaagattataatacccagaagaaa

SEQ ID NO: 8143 - DNA, 2682 bp, Homo sapiens
  source 1..2682: mol_type = unassigned DNA
tgggcatagatttcctctttgagaacatcaacctgatttttgagactttttgaaaaaattctttgtgaactacggagggtagaggtatcacacccaactatgaagatcagcatcctgctcatgttcctttggggattatcctgtgctctcccagtaaccaggtatcaaaataatgaatctgaggattctgaagaatggaagggtcatttggctcaggcaccaacaccacccttggagagcagtgagtcatcagaaggcagtaaagttagctcagaggaacaggcaaatgaagaccccagtgacagcactcagtcagaggagggcctgggctctgatgatcatcaatacatttataggctagctggtggcttctccaggagcacaggaaaaggaggagatgataaagatgacgatgaagatgacagtggagatgacacctttggtgacgatgacagtggcccagggcccaaagacagacaagaaggaggaaactccagactgggaagtgatgaggactctgatgacaccatacaagccagtgaagagagtgccccacaagggcaagacagtgcccaagataccaccagtgagagcagggaacttgacaatgaggaccgggtggacagcaagcctgagggaggtgactccactcaagagagtgagagtgaagagcactgggtgggaggtggcagtgatggggagagcagccatggagacggctccgagttggacgatgagggaatgcagagtgatgacccagagagcatcaggagtgaaaggggaaactccagaatgaacagtgcaggcatgaaatcaaaagaatctggagaaaacagtgagcaagcaaacactcaagattcaggtggcagccaattgctggagcatcccagtaggaaaatttttaggaagtctcgcatctcagaggaagatgacagaagcgagcttgatgacaacaacacaatggaagaagtcaagagtgactctacagaaaacagcaactccagagacactggcctcagccaacccaggagagacagcaagggtgactctcaagaagacagcaaggagaatctgtcccaggaagagagccaaaacgtagatggtcccagcagtgagtccagccaagaggccaacctgtcatctcaagagaacagcagtgagtctcaggaagaggtggtgagtgagtccaggggagataaccccgaccccacaactagttatgtagaagaccaggaagacagtgactccagcgaggaggacagctcgcacacactctcccactcaaaaagtgaatccagagaggagcaagcagacagcgaatccagtgagagcctcaacttctcagaggaaagcccggagtcccctgaggatgagaacagctccagccaggagggcctccagtctcacagcagctcagcagagagtcagagcgaggaaagccattctgaggaagacgacagtgactctcaagacagcagcagatccaaagaagatagcaactccacggagagcaaatcaagcagtgaggaagatggccagttgaaaaacattgagatagagagccggaaattaacagttgatgcctatcacaacaaacccattggggaccaagatgacaatgactgccaagacggctattagcatcagctgtcctaagaagcagttgtcacataaaggagtcttagggacttgaaaatgtatcatgataactataatttattgatgttttgatcaaaagaataaccagatgccatatttttcctgaaaggaattgctggacattacacttgtttttagggtgtcatcatttcacagaggtttaaatactgtggagtgacaccagaacacagccaaagaggctagaagcaagaaaggatctgcatgataactttgcagctgagatagttcctaattcatcaacgtaacaaacaaagctattgggtgtccatgatataccaggcactatgctaggtgttgagaatgtaaagcaggttaagacttgtttcttgctcctgaggagcgtatagaaggacccacaaagctacagagttaaagagggatatgtataagagaaacaagaattgttacaacccagtatggtgagtgccaagacagagagctatgaacacgatatctatctgggaacactgagaagggtgaccaatgcgttggagaacgagggagggcttcatagcagaagacattggagttggaaggttgcatagggtttcctcattggagaccgggaaattctattcttgggataaataatagtaaattctataggattcaatacttagtttgcaaaagcactttgaaattatggcacagtgagttgttttggataagaaaatctttttctcccaattaatttaccaattcatcatttttttttttttgtagaactcccataaacatcaccttactaatcactggtgatgataagaaggattgggtcaggaagagtgggagaaagaaattcctctttacgtagatactttttagctttattttttctaaaatcagtttgcgtgcaatgctagaaaaaaactgttctctgagtcctttacagagcaaaattctgtatgtaagattcaattgatttttgacaaataccatttgaaatattacctcaacataaaatacttgttttgtaataaagattataatacccagaagaaa

SEQ ID NO: 8144 - DNA, 4281 bp, Homo sapiens
  source 1..4281: mol_type = unassigned DNA
tacagccattgattattattattcctaaagaaaatgaagataattacatatttttgcatttgggcagtagcatgggccattccagttcctcaaagcaaaccactggagagacatgtcgaaaaatccatgaatttgcatctcctagcaagatcaaatgtgtcagtacaggatgagttaaatgccagtggaaccatcaaagaaagtggtgtcctggtgcatgaaggtgatagaggaaggcaagagaatacccaagatggtcacaagggagaagggaatggctctaagtgggcagaagtaggagggaagagtttttctacatattccacattagcaaacgaagaggggaatattgagggctggaatggggacacaggaaaagcagaaacatatggtcatgatggaatacatgggaaagaagaaaacatcacagcaaatggcatccagggacaagtaagcatcattgacaatgctggagccacaaacagaagcaacactaatggaaatactgataagaatacccaaaatggggatgttggcgatgcaggtcacaatgaggatgtcgctgttgtccaagaagatggacctcaagtagctggaagcaataacagtacagacaatgaggatgaaataattgagaattcctgtagaaacgagggtaatacaagtgaaataacacctcagatcaacagcaagagaaatgggactaaggaagctgaggtaacaccaggcactggagaagatgctggcctggataattccgatgggagtcctagtgggaatggagcagatgaggatgaagacgagggttctggtgatgatgaagatgaagaagcagggaatggaaaagacagtagtaataacagcaagggccaggagggccaggaccatgggaaagaagatgatcatgatagtagcataggtcaaaattcagatagtaaagaatattatgaccctgaaggcaaagaagatccccataatgaagttgatggagacaagacctccaagagtgaggagaattctgctggtattccagaagacaatggcagccaaagaatagaggacacccagaagctcaaccatagagaaagcaaacgcgtagaaaatagaatcaccaaagaatcagagacacatgctgttgggaagagccaagataagggaatagaaatcaagggtcccagcagtggcaacagaaatattaccaaagaagttgggaaaggcaacgaaggtaaagaggataaaggacaacatggaatgatcttgggcaaaggcaatgtcaagacacaaggagaggttgtcaacatagaaggacctggccaaaaatcagaaccaggaaataaagttggacacagcaatacaggtagtgacagcaatagtgatggatatgacagttatgattttgatgataagtccatgcaaggagatgatcccaatagcagtgatgaatctaatggcaatgatgatgctaattcagaaagtgacaataacagcagtagccgaggagatgcttcttataactctgatgaatcaaaagataatggcaatggcagtgactcaaaaggagcagaagatgatgacagtgatagcacatcagacactaataatagtgacagtaatggcaatggtaacaatgggaatgatgacaatgacaaatcagacagtggcaaaggtaaatcagatagcagtgacagtgatagtagtgatagcagcaatagcagtgatagtagtgacagcagtgacagtgacagcagtgatagcaacagtagcagtgatagtgacagcagtgacagtgacagcagtgatagcagtgacagtgatagtagtgatagcagcaatagcagtgacagtagtgacagcagtgatagcagtgacagtagtgatagtagtgacagcagtgacagcaagtcagacagcagcaaatcagagagcgacagcagtgatagtgacagtaagtcagacagcagtgacagcaacagcagtgacagtagtgacaacagtgatagcagcgacagcagcaatagcagtaacagcagtgatagtagtgacagcagtgatagcagtgacagcagcagtagcagtgacagcagcaacagcagtgatagtagtgacagtagtgacagcagcaatagcagtgagagcagtgatagtagtgacagcagtgatagtgacagcagtgatagtagtgacagcagtaatagtaacagcagcgatagtgacagcagcaacagcagcgatagcagtgacagcagcaacagcagtgacagcagtgatagcagtgacagcagcaacagcagtgacagtagcgatagcagtgacagcagcaacagcagtgacagcagtgatagcagtgacagcagtgatagtagtgacagcagcaacagcagtgatagcaacgacagcagcaatagcagtgacagcagtgatagcagcaacagcagtgatagcagcaacagcagtgatagcagtgatagcagtgacagcagtgatagcgacagcagcaatagcagtgacagcagtaatagtagtgacagcagcgatagcagcaacagcagtgatagcagcgacagcagcgatagcagtgacggcagtgatagcgacagcagcaatagaagtgacagtagtaatagtagtgacagcagcgatagcagtgacagcagcaacagcagtgacagcagtgatagcagtgacagcaacgaaagcagcaatagcagtgacagcagtgatagcagcaacagcagtgatagtgacagcagtgatagcagcaacagcagtgacagcagtgatagcagcaacagcagtgatagcagtgaaagcagtaatagtagtgacaacagcaatagcagtgacagcagcaacagcagtgacagcagtgatagcagtgacagcagtaatagtagtgacagcagcaatagcagtgacagcagcaacagcagtgacagcagtgatagcaatagcagcgacagcagtgacagcagcaacagcagcgatagcagtgacagcagtgatagcagtgacagcagtgacagcagtgatagcagcaacagcagtgatagcagtgacagcagtgacagcagtgatagcagtaatagtagtgacagcagcaatagcagtgacagcagcaacagcagtgacagcagcgatagcagtgacagcagcgatagcagtgacagcagcgatagcagtgacagcagtgacagcagcaatagcagtgacagcagtgacagcagcgacagcagtgatagcagtgacagcagtgacagcagcgacagcagtgatagcagtgaaagcagtgatagcagtgacagcagcaatagcagtgacagcagcgatagcagcgacagcagcgacagcagcgatagcagtgacagcagcgatagcagtgacagcagtgacagcagcaatagcagtgacagcagtgacagcagcgacagcagtgatagcagtgacagcagcaacagcagtgacagcagtgacagcagtgaaagcagcgacagcagtgacagcagcgacagcagtgacagcagcgatagcagcgacagcagcgacagcagcgatagcagtgacagcagcaatagcagtgatagcagcgacagcagtgatagcagtgacagcagcgacagcagcgatagcagcgacagcagcgatagtagtgatagcagtgacagcagtgacagcagcgacagcagtgacagcagcgacagcagtgacagcagcgacagcagtgacagcaatgaaagcagcgacagcagtgacagcagcgatagcagtgacagcagcaacagcagtgacagcagcgacagcagtgatagcagtgacagcacatctgacagcaatgatgagagtgacagccagagcaagtctggtaacggtaacaacaatggaagtgacagtgacagtgacagtgaaggcagtgacagtaaccactcaaccagtgatgattagaacaaaagaaaaacccgtaagattccttttgtgaaaagtttggtaatgggataggaaaaaaagatttccaagaaagtaaagaaaggggagaaataaacataagacgtatgtaaacaaaaacaactgggggaatcaaatcaaacagttggattcagaaccaagacctaactcctgcagagacagactctgaatgcatgacctttggtacatgcctgttaatattcatgttctgaaaatattttgttaaaagtgtaaatctaaacataaaagaacaattaaaatattctttaatacttcacacagaaacctcaagtaatcactacatgataacttcaatttaag

SEQ ID NO: 8145 - DNA, 4331 bp, Homo sapiens
  source 1..4331: mol_type = unassigned DNA
atgcaaaagtccaggacagtgggccactttcagtcttcaaagagaaagataagaaattctggattttcaaaatccttttgaagccttttaagccattgattattattattcctaaagaaaatgaagataattacatatttttgcatttgggcagtagcatgggccattccagttcctcaaagcaaaccactggagagacatgtcgaaaaatccatgaatttgcatctcctagcaagatcaaatgtgtcagtacaggatgagttaaatgccagtggaaccatcaaagaaagtggtgtcctggtgcatgaaggtgatagaggaaggcaagagaatacccaagatggtcacaagggagaagggaatggctctaagtgggcagaagtaggagggaagagtttttctacatattccacattagcaaacgaagaggggaatattgagggctggaatggggacacaggaaaagcagaaacatatggtcatgatggaatacatgggaaagaagaaaacatcacagcaaatggcatccagggacaagtaagcatcattgacaatgctggagccacaaacagaagcaacactaatggaaatactgataagaatacccaaaatggggatgttggcgatgcaggtcacaatgaggatgtcgctgttgtccaagaagatggacctcaagtagctggaagcaataacagtacagacaatgaggatgaaataattgagaattcctgtagaaacgagggtaatacaagtgaaataacacctcagatcaacagcaagagaaatgggactaaggaagctgaggtaacaccaggcactggagaagatgctggcctggataattccgatgggagtcctagtgggaatggagcagatgaggatgaagacgagggttctggtgatgatgaagatgaagaagcagggaatggaaaagacagtagtaataacagcaagggccaggagggccaggaccatgggaaagaagatgatcatgatagtagcataggtcaaaattcagatagtaaagaatattatgaccctgaaggcaaagaagatccccataatgaagttgatggagacaagacctccaagagtgaggagaattctgctggtattccagaagacaatggcagccaaagaatagaggacacccagaagctcaaccatagagaaagcaaacgcgtagaaaatagaatcaccaaagaatcagagacacatgctgttgggaagagccaagataagggaatagaaatcaagggtcccagcagtggcaacagaaatattaccaaagaagttgggaaaggcaacgaaggtaaagaggataaaggacaacatggaatgatcttgggcaaaggcaatgtcaagacacaaggagaggttgtcaacatagaaggacctggccaaaaatcagaaccaggaaataaagttggacacagcaatacaggtagtgacagcaatagtgatggatatgacagttatgattttgatgataagtccatgcaaggagatgatcccaatagcagtgatgaatctaatggcaatgatgatgctaattcagaaagtgacaataacagcagtagccgaggagatgcttcttataactctgatgaatcaaaagataatggcaatggcagtgactcaaaaggagcagaagatgatgacagtgatagcacatcagacactaataatagtgacagtaatggcaatggtaacaatgggaatgatgacaatgacaaatcagacagtggcaaaggtaaatcagatagcagtgacagtgatagtagtgatagcagcaatagcagtgatagtagtgacagcagtgacagtgacagcagtgatagcaacagtagcagtgatagtgacagcagtgacagtgacagcagtgatagcagtgacagtgatagtagtgatagcagcaatagcagtgacagtagtgacagcagtgatagcagtgacagtagtgatagtagtgacagcagtgacagcaagtcagacagcagcaaatcagagagcgacagcagtgatagtgacagtaagtcagacagcagtgacagcaacagcagtgacagtagtgacaacagtgatagcagcgacagcagcaatagcagtaacagcagtgatagtagtgacagcagtgatagcagtgacagcagcagtagcagtgacagcagcaacagcagtgatagtagtgacagtagtgacagcagcaatagcagtgagagcagtgatagtagtgacagcagtgatagtgacagcagtgatagtagtgacagcagtaatagtaacagcagcgatagtgacagcagcaacagcagcgatagcagtgacagcagcaacagcagtgacagcagtgatagcagtgacagcagcaacagcagtgacagtagcgatagcagtgacagcagcaacagcagtgacagcagtgatagcagtgacagcagtgatagtagtgacagcagcaacagcagtgatagcaacgacagcagcaatagcagtgacagcagtgatagcagcaacagcagtgatagcagcaacagcagtgatagcagtgatagcagtgacagcagtgatagcgacagcagcaatagcagtgacagcagtaatagtagtgacagcagcgatagcagcaacagcagtgatagcagcgacagcagcgatagcagtgacggcagtgatagcgacagcagcaatagaagtgacagtagtaatagtagtgacagcagcgatagcagtgacagcagcaacagcagtgacagcagtgatagcagtgacagcaacgaaagcagcaatagcagtgacagcagtgatagcagcaacagcagtgatagtgacagcagtgatagcagcaacagcagtgacagcagtgatagcagcaacagcagtgatagcagtgaaagcagtaatagtagtgacaacagcaatagcagtgacagcagcaacagcagtgacagcagtgatagcagtgacagcagtaatagtagtgacagcagcaatagcagtgacagcagcaacagcagtgacagcagtgatagcaatagcagcgacagcagtgacagcagcaacagcagcgatagcagtgacagcagtgatagcagtgacagcagtgacagcagtgatagcagcaacagcagtgatagcagtgacagcagtgacagcagtgatagcagtaatagtagtgacagcagcaatagcagtgacagcagcaacagcagtgacagcagcgatagcagtgacagcagcgatagcagtgacagcagcgatagcagtgacagcagtgacagcagcaatagcagtgacagcagtgacagcagcgacagcagtgatagcagtgacagcagtgacagcagcgacagcagtgatagcagtgaaagcagtgatagcagtgacagcagcaatagcagtgacagcagcgatagcagcgacagcagcgacagcagcgatagcagtgacagcagcgatagcagtgacagcagtgacagcagcaatagcagtgacagcagtgacagcagcgacagcagtgatagcagtgacagcagcaacagcagtgacagcagtgacagcagtgaaagcagcgacagcagtgacagcagcgacagcagtgacagcagcgatagcagcgacagcagcgacagcagcgatagcagtgacagcagcaatagcagtgatagcagcgacagcagtgatagcagtgacagcagcgacagcagcgatagcagcgacagcagcgatagtagtgatagcagtgacagcagtgacagcagcgacagcagtgacagcagcgacagcagtgacagcagcgacagcagtgacagcaatgaaagcagcgacagcagtgacagcagcgatagcagtgacagcagcaacagcagtgacagcagcgacagcagtgatagcagtgacagcacatctgacagcaatgatgagagtgacagccagagcaagtctggtaacggtaacaacaatggaagtgacagtgacagtgacagtgaaggcagtgacagtaaccactcaaccagtgatgattagaacaaaagaaaaacccgtaagattccttttgtgaaaagtttggtaatgggataggaaaaaaagatttccaagaaagtaaagaaaggggagaaataaacataagacgtatgtaaacaaaaacaactgggggaatcaaatcaaacagttggattcagaaccaagacctaactcctgcagagacagactctgaatgcatgacctttggtacatgcctgttaatattcatgttctgaaaatattttgttaaaagtgtaaatctaaacataaaagaacaattaaaatattctttaatacttcacacagaa

SEQ ID NO: 8146 - DNA, 2716 bp, Homo sapiens
  source 1..2716: mol_type = unassigned DNA
acccgactccggaacctcttcccgcgccctgcccgggcgcctggctgcttggggtagaggccttccgccacacgcgcggccccgccccggccttcacgtgacctggcgtgcggagcgcgcacgcgggaacccgcgctggaggcgggcgagggccgaggggcagctagggagcgcggcttgaggagggcggggccgccccgcaggcccgccagtgtcctcagctgcctccgcgcgccaaagtcaaaccccgacacccgccggcgggccggtgagctcactagctgacccggcaggtcaggatctggcttagcggcgccgcgagctccagtgcgcgcacccgtggccgcctcccagccctctttgccggacgagctctgggccgccacaagactaaggaatggccaccccgcccaagagaagctgcccgtctttctcagccagctctgaggggacccgcatcaagaaaatctccatcgaagggaacatcgctgcagggaagtcaacatttgtgaatatccttaaacaattgtgtgaagattgggaagtggttcctgaacctgttgccagatggtgcaatgttcaaagtactcaagatgaatttgaggaacttacaatgtctcagaaaaatggtgggaatgttcttcagatgatgtatgagaaacctgaacgatggtcttttaccttccaaacatatgcctgtctcagtcgaataagagctcagcttgcctctctgaatggcaagctcaaagatgcagagaaacctgtattattttttgaacgatctgtgtatagtgacaggtatatttttgcatctaatttgtatgaatctgaatgcatgaatgagacagagtggacaatttatcaagactggcatgactggatgaataaccaatttggccaaagccttgaattggatggaatcatttatcttcaagccactccagagacatgcttacatagaatatatttacggggaagaaatgaagagcaaggcattcctcttgaatatttagagaagcttcattataaacatgaaagctggctcctgcataggacactgaaaaccaacttcgattatcttcaagaggtgcctatcttaacactggatgttaatgaagactttaaagacaaatatgaaagtctggttgaaaaggtcaaagagtttttgagtactttgtgatcttgctgaagactacaggcagccaaatggttccagatacttcagctttgtgtatcttcgtaacttcatattaatataagtttctttagaaaacccaagtttttaatcgtttttgttttaaggaaaaaagatttttaaaatgaatcttatgcaaaactttttgaccagtttcttttcttttgttttttttttaaaaaagacatttaaagacaaagacattatttctcatagcaggaaatgtagaggtagatggttccagtatcagcatagtgactaaactacattataaaagatccagcttccttctgtcattcccctcttttgtcttcctcagcaggttggcttttttccctggtgcctctcacttcgttggtgaccagtttcttaaactgaaagctttaatgttacatagtaaatggtagtgtgtcctgtgtaaattagtgtacctattaaaagttgcaaagtggaattaaaggaatccctagaataaggattctgaagttttattttaaattattatcttcttaacagtttagtcccacctcttacttcctgcctcagtctgctttctctactgtctggattaattaggcagcctgctataaagttaaagtcacacatttctattttgcaaacactgtgattactctttgctttgtagtttgctttgctttgtagggttctgcttttaagtttttctctttttcagacaaattactgataaaaatgatattgctctatatgtaatatatcctgaaagcattattttttgttgaataggaaataaaattaatgaagacagaggctagaaagcatccattaattaatgagacacacttaactacttatctctaaaccatctatgtgaatatttgtaaaaataatgaatggactcatcttagttctgtatataaatatattttctttctagtttgtttagttaaggtgtgcagtgtttttcctgtgtattaaacctttccattttacgttttagaaaattttatgtattttaaaataaggggaagagtcattttcacttttaaactactatttttctttccaagtcatttttgtttttggtttcttattcaaagatgataatttagtggattaaccagtccagacgcactgatctttgcaaaggagacttaatttcaaatctgtaattaccatacataaactgtctcattatacgtatgcatttttttagtttgtttttgtttggtataaattaatttgttaattaaatatttcttaagtataaaccttatgaactacagtggagctacactcattgaaatgtaatttcagttctaaaaagatgtaataatcattttagaattaaaatttattctacttttaaataaattatgaatattaaaggtgaaaattgtataaattactttgattccattttaagtggagacatatttcagtgatttttagtaacctttaaaaatgtataatgacttttaaaatttgtagaattgaaaagacgctaataaaaatttattatttatttgtcatgactcaaaa

SEQ ID NO: 8147 - DNA, 428 bp, Homo sapiens
  source 1..428: mol_type = unassigned DNA
gaggacaatcagaggcgatgtggaaacttctgtcttgtaatcacaggagtgaaggtgtcgggcaggctgagttaacagctgaacagaaacctacctacccaacgtgctaacttctatacagcatggtcgtgcatccaaatcaaatggaaagcggtatgggagatctggaaaggcctcctgtgggtggcatctgactacctaaattcccatcccagtttcacttactgactttgacacttggaacaagcagcctctcagtgcctgttttcccactggcaggtcaggatctggcttagcggcgccgcgagctccagtgcgcgcacccgtggccgcctcccagccctctttgccggacgagctctgggccgccacaagactaaggaatggccaccccgcccaagagaagctgcccgtctttctcagccagc

SEQ ID NO: 8148 - DNA, 1144 bp, Homo sapiens
  source 1..1144: mol_type = unassigned DNA
aacggtgcgctggagcgagtgagcagcgatacctagggcggaagtgctctcggcggaagtgatcgctgtgtgaatcgtgggtgggatggccgcgggccgcctctttctaagtcggcttcgagcacccttcagttccatggccaagagcccactcgagggcgtttcctcctccagaggcctgcacgcggggcgcgggccccgaaggctctccatcgaaggcaacattgctgtgggaaagtccacgtttgtgaagttactcacgaaaacttacccagaatggcacgtagctacagaacctgtagcaacatggcagaatatccaggctgctggcacccaaaaagcctgcactgcccaaagtcttggaaacttgctggatatgatgtaccgggagccagcacgatggtcctacacattccagacattttcctttttgagccgcctgaaagtacagctggagcccttccctgagaaactcttacaggccaggaagccagtacagatctttgagaggtctgtgtacagtgacaggtatatctttgcaaagaatctttttgaaaatggttccctcagtgacatcgagtggcatatctatcaggactggcattcttttctcctgtgggagtttgccagccggatcacattacatggcttcatctacctccaggcttctccccaggtttgtttgaagagactgtaccagagggccagggaggaggagaaaggaattgagctggcctatctagagcagctgcatggccaacacgaagcctggcttattcacaagacaacgaagctccactttgaggctctgatgaacattccagtgctggtgttggatgtcaatgatgatttttctgaggaagtaaccaaacaagaagacctcatgagagaggtaaacacctttgtaaagaatctgtaaccaataccatgaagttcaggctgtgatctgggctccctgactttctgaagctagaaaaatgttgtgtctcccaaccacctttccatccccagcccctctcatccctggagcactctgccgctcaagagctggtttgttaattattgttagactttgccattgttttcttttgtacctgaagcattttgaaaataaagtttacttaagttatgcttgtttttctaa

SEQ ID NO: 8149 - DNA, 933 bp, Homo sapiens
  source 1..933: mol_type = unassigned DNA
gggatggccgcgggccgcctctttctaagtcggcttcgagcacccttcagttccatggccaagagcccactcgagggcgtttcctcctccagaggcctgcacgcggggcgcgggccccgaaggctctccatcgaaggcaacattgcctgcactgcccaaagtcttggaaacttgctggatatgatgtaccgggagccagcacgatggtcctacacattccagacattttcctttttgagccgcctgaaagtacagctggagcccttccctgagaaactcttacaggccaggaagccagtacagatctttgagaggtctgtgtacagtgacaggtatatctttgcaaagaatctttttgaaaatggttccctcagtgacatcgagtggcatatctatcaggactggcattcttttctcctgtgggagtttgccagccggatcacattacatggcttcatctacctccaggcttctccccaggtttgtttgaagagactgtaccagagggccagggaggaggagaaaggaattgagctggcctatctagagcagctgcatggccaacacgaagcctggcttattcacaagacaacgaagctccactttgaggctctgatgaacattccagtgctggtgttggatgtcaatgatgatttttctgaggaagtaaccaaacaagaagacctcatgagagaggtaaacacctttgtaaagaatctgtaaccaataccatgaagttcaggctgtgatctgggctccctgactttctgaagctagaaaaatgttgtgtctcccaaccacctttccatccccagcccctctcatccctggagcactctgccgctcaagagctggtttgttaattattgttagactttgccattgttttcttttgtacctgaagcattttgaaaataaagtttacttaagtta

SEQ ID NO: 8150 - DNA, 880 bp, Homo sapiens
  source 1..880: mol_type = unassigned DNA
aacggtgcgctggagcgagtgagcagcgatacctagggcggaagtgctctcggcggaagtgatcgctgtgtgaatcgtgggtgggatggccgcgggccgcctctttctaagtcggcttcgagcacccttcagttccatggccaagagcccactcgagggcgtttcctcctccagaggcctgcacgcggggcgcgggccccgaaggctctccatcgaaggcaacattgctgtgggaaagtccacgtttgtgaagttactcacgaaaacttacccagaatggcacgtagctacagaacctgtagcaacatggcagaatatccaggctgctggcacccaaaaagcctgcactgcccaaagtcttggaaacttgctggatatgatgtaccgggagccagcacgatggtcctacacattccagacattttcctttttgagccgcctgaaagtacagctggagcccttccctgagaaactcttacaggccaggaagccagtacagatctttgagaggtctgtgtacagtgacaggctccactttgaggctctgatgaacattccagtgctggtgttggatgtcaatgatgatttttctgaggaagtaaccaaacaagaagacctcatgagagaggtaaacacctttgtaaagaatctgtaaccaataccatgaagttcaggctgtgatctgggctccctgactttctgaagctagaaaaatgttgtgtctcccaaccacctttccatccccagcccctctcatccctggagcactctgccgctcaagagctggtttgttaattattgttagactttgccattgttttcttttgtacctgaagcattttgaaaataaagtttacttaagttatgcttgtttttctaa

SEQ ID NO: 8151 - DNA, 981 bp, Homo sapiens
  source 1..981: mol_type = unassigned DNA
gggatggccgcgggccgcctctttctaagtcggcttcgagcacccttcagttccatggccaagagcccactcgagggcgtttcctcctccagaggcctgcacgcggggcgcgggccccgaaggctctccatcgaaggcaacattggtaacatcctcaagcaaatcagaatgagagcacccattcaggaaaccgcctgcactgcccaaagtcttggaaacttgctggatatgatgtaccgggagccagcacgatggtcctacacattccagacattttcctttttgagccgcctgaaagtacagctggagcccttccctgagaaactcttacaggccaggaagccagtacagatctttgagaggtctgtgtacagtgacaggtatatctttgcaaagaatctttttgaaaatggttccctcagtgacatcgagtggcatatctatcaggactggcattcttttctcctgtgggagtttgccagccggatcacattacatggcttcatctacctccaggcttctccccaggtttgtttgaagagactgtaccagagggccagggaggaggagaaaggaattgagctggcctatctagagcagctgcatggccaacacgaagcctggcttattcacaagacaacgaagctccactttgaggctctgatgaacattccagtgctggtgttggatgtcaatgatgatttttctgaggaagtaaccaaacaagaagacctcatgagagaggtaaacacctttgtaaagaatctgtaaccaataccatgaagttcaggctgtgatctgggctccctgactttctgaagctagaaaaatgttgtgtctcccaaccacctttccatccccagcccctctcatccctggagcactctgccgctcaagagctggtttgttaattattgttagactttgccattgttttcttttgtacctgaagcattttgaaaataaagtttacttaagtta

SEQ ID NO: 8152 - DNA, 1325 bp, Homo sapiens
  source 1..1325: mol_type = unassigned DNA
ctcttgcggagacgcgcgcgtcggggtttaacgcgtttctgggccgccgtaagcccggcctaggggcagctttgactcgagagccggctataggcgcatggaaggttccctggaacgggaggcgccagcgggggcgctggccgccgtgctaaagcacagctcgacgttgccgcccgaaagcacccaggtccggggctacgacttcaaccgcggtgtgaattaccgcgcactgctggaggccttcggcaccaccggcttccaagcaaccaacttcgggcgcgctgtacagcaagtcaatgccatgatcgagaagaagctggaaccactgtcacaggatgaagaccagcacgcggacctgacccagagccgccgcccacttaccagctgcaccattttcctgggatatacatccaacctcatcagttcaggcatccgtgagaccattcgctaccttgtgcagcacaacatggtggacgtattggtgaccacagctggcggcgtggaggaagacctcatcaagtgcctggcgcccacatacttgggcgagtttagcctcagggggaaggagctccgggagaacgggatcaataggatcggaaacctgctggtgcccaatgagaattactgcaagtttgaggactggctgatgcccattctggaccagatggtgatggagcagaacacagagggtgtaaagtggacgccttctaagatgatcgcccggctgggcaaggagatcaacaacccagagtccgtgtattactgggcccagaagaaccacatccctgtgtttagtcccgcacttacagacggctcgctgggcgacatgatcttcttccattcctacaagaacccgggcctggtcctggacatcgttgaggacctgaggctcatcaacacacaggccatctttgccaagtgcactgggatgatcattctgggcgggggcgtggtcaagcaccacattgccaatgccaacctcatgcggaacggggccgactacgctgtttacatcaacacagcccaggagtttgatggctctgactcaggtgcccgaccagacgaggctgtctcctggggcaagatccgggtggatgcacagcccgtcaaggtctatgctgacgcctccctggtcttccccctgcttgtggctgaaacctttgcccagaagatggatgccttcatgcatgagaagaacgaggactgagcggctgcggtcccaggaaggtcttaccccctcttctatttattaatttgcagacccagcccctcccctactttttggtcagctacgtctctagaataagatggtatctgaagtcctt

SEQ ID NO: 8153 - DNA, 1186 bp, Homo sapiens
  source 1..1186: mol_type = unassigned DNA
ctgtgctcttgcggagacgcgcgcgtcggggtttaacgcgtttctgggccgccgtaagcccggcctaggggcagctttgactcgagagccggctataggcgcatggaaggttccctggaacgggaggcgccagcgggggcgctggccgccgtgctaaagcacagctcgacgttgccgcccgaaagcacccaggtccggggctacgacttcaaccgcggtgtgaattaccgcgcactgctggaggccttcggcaccaccggcttccaagcaaccaacttcgggcgcgctgtacagcaagtcaatgccatgatcgagaagaagctggaaccactgtcacaggatgaagaccagcacgcggacctgacccagagccgccgcccacttaccagctgcaccattttcctgggatatacatccaacctcatcagttcaggcatccgtgagaccattcgctaccttgtgcagcacaacatggtggacgtattggtgaccacagctggcggcgtggaggaagacctcatcaagtgcctggcgcccacatacttgggcgagtttagcctcagggggaaggagctccgggagaacgggatcaataggatcggaaacctgctggtgcccaatgagaattactgcaagtttgaggactggctgatgcccattctggaccagatggtgatggagcagaacacagagggtgtaaagtggacgccttctaagatgatcgcccggctgggcaaggagatcaacaacccagagtccgtgtattactgggcccagaagaaccacatccctgtgtttagtcccgcacttacagacggctcgctgggcgacatgatcttcttccattcctacaagaacccgggcctggtcctggacatcgttgaggcccaggagtttgatggctctgactcaggtgcccgaccagacgaggctgtctcctggggcaagatccgggtggatgcacagcccgtcaaggtctatgctgacgcctccctggtcttccccctgcttgtggctgaaacctttgcccagaagatggatgccttcatgcatgagaagaacgaggactgagcggctgcggtcccaggaaggtcttaccccctcttctatttattaatttgcagacccagcccctcccctactttttggtcagctacgtctctagaataagatggtatctgaagtc

SEQ ID NO: 8154 - DNA, 1172 bp, Homo sapiens
  source 1..1172: mol_type = unassigned DNA
agatttgcttttcccagcggggaagggaccggatctgaaaggagatgctctctgattcctaaaagggtgggggctggctgggcgcggtggcgcatgcctataatcccagcattttgggaagccgaggcgggtggatcaagagaagaggagttcgagacaagcctggccaacatgatcgagaagaagctggaaccactgtcacaggatgaagaccagcacgcggacctgacccagagccgccgcccacttaccagctgcaccattttcctgggatatacatccaacctcatcagttcaggcatccgtgagaccattcgctaccttgtgcagcacaacatggtggacgtattggtgaccacagctggcggcgtggaggaagacctcatcaagtgcctggcgcccacatacttgggcgagtttagcctcagggggaaggagctccgggagaacgggatcaataggatcggaaacctgctggtgcccaatgagaattactgcaagtttgaggactggctgatgcccattctggaccagatggtgatggagcagaacacagagggtgtaaagtggacgccttctaagatgatcgcccggctgggcaaggagatcaacaacccagagtccgtgtattactgggcccagaagaaccacatccctgtgtttagtcccgcacttacagacggctcgctgggcgacatgatcttcttccattcctacaagaacccgggcctggtcctggacatcgttgaggacctgaggctcatcaacacacaggccatctttgccaagtgcactgggatgatcattctgggcgggggcgtggtcaagcaccacattgccaatgccaacctcatgcggaacggggccgactacgctgtttacatcaacacagcccaggagtttgatggctctgactcaggtgcccgaccagacgaggctgtctcctggggcaagatccgggtggatgcacagcccgtcaaggtctatgctgacgcctccctggtcttccccctgcttgtggctgaaacctttgcccagaagatggatgccttcatgcatgagaagaacgaggactgagcggctgcggtcccaggaaggtcttaccccctcttctatttattaatttgcagacccagcccctcccctactttttggtcagctacgtctctaga

SEQ ID NO: 8155 - DNA, 1130 bp, Homo sapiens
  source 1..1130: mol_type = unassigned DNA
catgcacagttaaaaatggactttctttcccctgtctttcatgtcacaggcttcatattgatggggaagctgcctattaggggaatagatgacttctcatgtgtattaatgaaagcaatgtattgcaggctgggtagctggtagaaatgttgtgggcgtttgtaagtggaagatttacgccattataaccctaatatattcctgcagagtaacaacacagcctatctaatatacaatgatggagtccctaaacctgtgaattacagcagaaagtatggacacaccaaaggtttactgctgtggaacagagttcaagggttctggctgattcattccatccctcagtttcctccaattccggaagaaggctatgattatccacccacagggagacgaaatggacaaagtggcatctgcataactttcaagtacaaccagtatgaggcaatagattctcagctcttggtctgcaaccccaacgtctatagctgctccatcccagccacctttcaccaggagctcattcacatgccccagctgtgcaccagggccagctcatcagagattcctggcaggctcctcaccacacttcagtcggcccagggacaaaaattcctccattttgcaaagtcggattcttttcttgacgacatctttgcagcctggatggctcaacggctgaagacacacttgttaacagaaacctggcagcgaaaaagacaagagcttccttcaaactgctcccttccttaccatgtctacaatataaaagcaattaaattatcacgacactcttatttcagttcttatcaagatcatgccaagtggtgtatttcccaaaagggcaccaaaaatcgctggacatgtattggagacctaaatcggagtccacaccaagccttcagaagtggaggattcatttgtacccagaattggcaaatttaccaagcatttcaaggattagtattatactatgaaagctgtaagtaaacttggtgaaaggacacaggtactatcattgaaaaccttgacaatgggtcttcttccattacaccttctttatattttaaaggcctgtgaatatacttataacctgcatatcacaaaataaaacatttttctctcatgtt

SEQ ID NO: 8156 - DNA, 1269 bp, Homo sapiens
  source 1..1269: mol_type = unassigned DNA
atggggaaagtgtcctgctgtggcatgaaataaatgaaacagaaaatgatggcaagactgctaagaacatcctttgctttgctcttccttggcctctttggggtgctgggggcagcaacaatttcatgcagaaatgaagaagggaaagctgtggactggtttactttttataagttacctaaaagacaaaacaaggaaagtggagagactgggttagagtacctgtacctagactctacaactagaagctggaggaagagtgagcaactaatgaatgacaccaagagtgttttgggaaggacattacaacagctatatgaagcatatgcctctaagagtaacaacacagcctatctaatatacaatgatggagtccctaaacctgtgaattacagcagaaagtatggacacaccaaaggtttactgctgtggaacagagttcaagggttctggctgattcattccatccctcagtttcctccaattccggaagaaggctatgattatccacccacagggagacgaaatggacaaagtggcatctgcataactttcaagtacaaccagtatgaggcaatagattctcagctcttggtctgcaaccccaacgtctatagctgctccatcccagccacctttcaccaggagctcattcacatgccccagctgtgcaccagggccagctcatcagagattcctggcaggctcctcaccacacttcagtcggcccagggacaaaaattcctccattttgcaaagtcggattcttttcttgacgacatctttgcagcctggatggctcaacggctgaagacacacttgttaacagaaacctggcagcgaaaaagacaagagcttccttcaaactgctcccttccttaccatgtctacaatataaaagcaattaaattatcacgacactcttatttcagttcttatcaagatcatgccaagtggtgtatttcccaaaagggcaccaaaaatcgctggacatgtattggagacctaaatcggagtccacaccaagccttcagaagtggaggattcatttgtacccagaattggcaaatttaccaagcatttcaaggattagtattatactatgaaagctgtaagtaaacttggtgaaaggacacaggtactatcattgaaaaccttgacaatgggtcttcttccattacaccttctttatattttaaaggcctgtgaatatacttataacctgcatatcacaaaataaaacatttttctctcatgtttaccatttaa

SEQ ID NO: 8157 - DNA, 2010 bp, Homo sapiens
  source 1..2010: mol_type = unassigned DNA
gagtctgtaccctcgtgatgtccccgccccggttcccaggcaagtttagggaagtgaaaggcgccaggtgccagtcctggcctctgatgtaacccagcgccccgcagtcccgacacagattcctggatctcagccccatagcagctatgatcccgctgctgctggcagcgctgctgtgcgtccccgccggggccctgacctgctacggggactccgggcagcctgtagactggttcgtggtctacaagctgccagctcttagagggtccggggaggcggcgcagagagggctgcagtacaagtatctggacgagagctccggaggctggcgggacggcagggcactcatcaacagcccggagggggccgtgggccgaagcctgcagccgctgtaccggagcaacaccagccagctcgccttcctgctctacaatgaccaaccgcctcaacccagcaaggctcaggactcttccatgcgtgggcacacgaagggtgtcctgctccttgaccacgatgggggcttctggctggtccacagtgtacctaacttccctccaccggcctcctctgctgcatacagctggcctcatagcgcctgtacctacgggcagaccctgctctgtgtgtcttttcccttcgctcagttctcgaagatgggcaagcagctgacctacacctacccctgggtctataactaccagctggaagggatctttgcccaggaattccccgacttggagaatgtggtcaagggccaccacgttagccaagaaccctggaacagcagcatcacactcacatcccaggccggggctgttttccagagctttgccaagttcagcaaatttggagatgacctgtactccggctggttggcagcagcccttggtaccaacctgcaggtccagttctggcacaaaactgtaggcatcctgccctctaactgctcggatatctggcaggttctgaatgtgaaccagatagctttccctggaccagccggcccaagcttcaacagcacagaggaccactccaaatggtgcgtgtccccaaaagggccctggacctgcgtgggtgacatgaatcggaaccagggagaggagcaacggggtgggggcacactgtgtgcccagctgccagccctctggaaagccttccagccgctggtgaagaactaccagccctgtaatggcatggccaggaagcccagcagagcttataagatctaacccttatggccaggtgcagtggctcacgtatgtaatcccagcactttgggaagccaaggagggaggatcacttgaactcaggaattcgagaccagcctgggctacatagtgagaccacatctctactagaacttaaaaaaagttagccaggcacggtgataaatgcctgtagtcccagccactgaagccagaggatcgattgaaccagggagatcatggtcacagtgaactatgattacgccaacctgggtcacatagcaagactctgtttcaaaaaaaaagggggggcgggggacgggtgggtgcagtggctcacatctgtaaccccagcactttgggaggctgagatgggcagatcacttgaggtcaggagttcgagaccagcctggccaacatggtgaaaccccatatccattaaaaatatttaaaaattagccagacatggtggcacgcgtctgtggtcctagctcctcgggaggctgaggcaggagaatcgcttgaactcgggaggcagaggttgtcatgagctgagctaacaccacggcacttcagcctgggtgacagaatgagactctgtgtcaaaaaaataaaaaataaaaaatctaagggctcaggaaccagtttggacttgattttgaatcccagttcatccccttcctagctgtatgaccttgattgtgtgccttaaccgctctgtgacacagtctacctgtctgcaaaatgggaaacataatacctgccatcaggattgttgaggagtaaataaatggaaattggtgga

SEQ ID NO: 8158 - DNA, 1037 bp, Homo sapiens
  source 1..1037: mol_type = unassigned DNA
agtcctggcctctgatgtaacccagcgccccgcagtcccgacacagattcctggatctcagccccatagcagctatgatcccgctgctgctggcagcgctgctgtgcgtccccgccggggccctgacctgctacggggactccgggcagcctgtagactggttcgtggtctacaagctgccagctcttagagggtccggggaggcggcgcagagagggctgcagtacaagtatctggacgagagctccggaggctggcgggacggcagggcactcatcaacagcccggagggggccgtgggccgaagcctgcagccgctgtaccggagcaacaccagccagctcgccttcctgctctacaatgaccaaccgcctcaacccagcaaggctcaggactcttccatgcgtgggcacacgaagggcaagcagctgacctacacctacccctgggtctataactaccagctggaagggatctttgcccaggaattccccgacttggagaatgtggtcaagggccaccacgttagccaagaaccctggaacagcagcatcacactcacatcccaggccggggctgttttccagagctttgccaagttcagcaaatttggagatgacctgtactccggctggttggcagcagcccttggtaccaacctgcaggtccagttctggcacaaaactgtaggcatcctgccctctaactgctcggatatctggcaggttctgaatgtgaaccagatagctttccctggaccagccggcccaagcttcaacagcacagaggaccactccaaatggtgcgtgtccccaaaagggccctggacctgcgtgggtgacatgaatcggaaccagggagaggagcaacggggtgggggcacactgtgtgcccagctgccagccctctggaaagccttccagccgctggtgaagaactaccagccctgtaatggcatggccaggaagcccagcagagcttataagatctaacccttatggccaggtgcagtggctcacgtatgtaatcccagcact

SEQ ID NO: 8159 - DNA, 2652 bp, Homo sapiens
  source 1..2652: mol_type = unassigned DNA
cttgaacgcctgacctcgtatccacccgcctcagcctcccaaagtgctgggattacaggcatgagccaccacgcccagcccataatttattgattttttaaaatttgtccagccttctattaccacgtcgaatccattagctacagccatcccatgagaagctgagtggattcagccccacctcctgctcacagaccctgtccgagcacctcatttgtcccaacagcattactgcaggacccccaggacgttggactgccagctccctgggtctcctcctctctggggcagatcctcagtcctcccttgacttcacgactgtggccagatcatgtgtggactgtccctctctttgggtctccagagcgcttgcatcaaacacccctaactcagaagtgtgcagccacactgggactcagaacccaacaacagggacagaagactcacgcccttggggtgcccggtctcgtggcatcaggcatgacttccagctcctgcgccttccccagcaactgctgactggggacccagaccgggagctgagcgacgggcctggcgagcgaagctcggggtctcactcaggcaccagcccctccttgccccaggcttgagtgactcacagccctattcaggcaggagctgctcttctggggtatcgcgatccacttaaggatgaggcagacttggtgacaagctggtctgagcagcgcttccagagccagaactgagcccagtgagagcgcaccctggagcagcctggattcctggggtgtccccggcagccacacacagccatgcactacccaactgcactcctcttcctcatcctggccaatggggcccaggcctttcgcatctgcgccttcaatgcccagcggctgacactggccaaggtggccagggagcaggtgatggacaccttagttcggatactggctcgctgtgacatcatggtgctgcaggaggtggtggactcttccggcagcgccatccccctcctgcttcgagaactcaatcgatttgatggctctgggccctacagcaccctgagcagcccccagctggggcgcagcacctacatggagacgtatgtgtacttctatcggtcacacaaaacacaggtcctgagttcctacgtgtacaacgatgaggatgacgtctttgcccgggagccatttgtggcccagttctctttgcccagcaatgtccttcccagcctggtgttggtcccgctgcacaccactcctaaggccgtagagaaggagctgaacgccctctacgatgtgtttctggaggtctcccagcactggcagagcaaggacgtgatcctgcttggggacttcaatgctgactgcgcttcactgaccaaaaagcgcctggacaagctggagctgcggactgagccaggcttccactgggtgattgccgatggggaggacaccacagtgcgggccagcacccactgcacctatgaccgcgtcgtgctgcacggggagcgctgccggagtctgctgcacactgcggctgcctttgacttccccacgagcttccagctcaccgaggaggaggccctcaacatcagtgaccactaccccgtggaggtggagctgaagctgagccaggcgcacagcgtccagcctctcagcctcactgttctgttgctgctatcactcctgtcccctcagctgtgccctgctgcctgagcgtccccctacccccccagggcctgctgccttttgggacttaaaccccagcctcccccgtccatccagccctggggctggggggcttcaactatagttgccctgtgactgtagtccacccctgcctgccttgtttgatttggctcttgttctttggttgggcttgtgcctagattaggagaggaagccaggggccctgcactcatgccacctgccaggtagtgtagtatcaggagtggagacaaagtgggctctgggttggggtaggggaagggagggttcagaaagaggaatgaagatgttgtatgacaagaaggaaagttactgagaacaaaaacccagattggtgagataggacacttgtgcagcagatatgccaatgggccatgtttattgtggattggtaagaatcaccaggaaaccattaagccccaatagctacaaggagggtggttaatctgctatatcaaactccttccctgaaaccagcaaacaccgggaaacattttggctcattataatccggtgaacaatgcagtcaggcctgttataaccgctgagcagccacactcgcacctcctgggtgctgtagtctgtgttggtacaggcttctgcatgcctggtaaagtccagccaaggctggtcaaggcaacatctccacacagaaaatctgcaccagttatgtaagctaaaaagctgtgtgaacccaggtgtcccggaaaggggctgcaggacacagcaaaatgccagcagcgtgccggacccctcccttccatcctcctctccaaagaacagaggtcaggaaaaacactggctgggacgctagaagggtcatgtgttaactataatcacatttatggtttggaaccatcaccccaaggtaaaaaaaaaataaaaggtattcccaggtatgtttggcaaaataaaataaaggtaattaaaaacctaa

SEQ ID NO: 8160 - DNA, 2249 bp, Homo sapiens
  source 1..2249: mol_type = unassigned DNA
tgtgcacggtcaggtggttcatgtactctggcggggaaggagaggtcaggcgctccgggctcgcccgctaggtcggggccgcggcgtcccccaccctaagtcccacctccggccgggcatgggtacccgggcgggcctgcctcggcctgggcccactcactggtccagaagcagctgtaggtgcccaccaagcccatgacgacgctgctggccagggtccagccctattcaggcaggagctgctcttctggggtatcgcgatccacttaaggatgaggcagacttggtgacaagctggtctgagcagcgcttccagagccagaactgagcccagtgagagcgcaccctggagcagcctggattcctggggtgtccccggcagccacacacagccatgcactacccaactgcactcctcttcctcatcctggccaatggggcccaggcctttcgcatctgcgccttcaatgcccagcggctgacactggccaaggtggccagggagcaggtgatggacaccttagttcggatactggctcgctgtgacatcatggtgctgcaggaggtggtggactcttccggcagcgccatccccctcctgcttcgagaactcaatcgatttgatggctctgggccctacagcaccctgagcagcccccagctggggcgcagcacctacatggagacgtatgtgtacttctatcggtcacacaaaacacaggtcctgagttcctacgtgtacaacgatgaggatgacgtctttgcccgggagccatttgtggcccagttctctttgcccagcaatgtccttcccagcctggtgttggtcccgctgcacaccactcctaaggccgtagagaaggagctgaacgccctctacgatgtgtttctggaggtctcccagcactggcagagcaaggacgtgatcctgcttggggacttcaatgctgactgcgcttcactgaccaaaaagcgcctggacaagctggagctgcggactgagccaggcttccactgggtgattgccgatggggaggacaccacagtgcgggccagcacccactgcacctatgaccgcgtcgtgctgcacggggagcgctgccggagtctgctgcacactgcggctgcctttgacttccccacgagcttccagctcaccgaggaggaggccctcaacatcagtgaccactaccccgtggaggtggagctgaagctgagccaggcgcacagcgtccagcctctcagcctcactgttctgttgctgctatcactcctgtcccctcagctgtgccctgctgcctgagcgtccccctacccccccagggcctgctgccttttgggacttaaaccccagcctcccccgtccatccagccctggggctggggggcttcaactatagttgccctgtgactgtagtccacccctgcctgccttgtttgatttggctcttgttctttggttgggcttgtgcctagattaggagaggaagccaggggccctgcactcatgccacctgccaggtagtgtagtatcaggagtggagacaaagtgggctctgggttggggtaggggaagggagggttcagaaagaggaatgaagatgttgtatgacaagaaggaaagttactgagaacaaaaacccagattggtgagataggacacttgtgcagcagatatgccaatgggccatgtttattgtggattggtaagaatcaccaggaaaccattaagccccaatagctacaaggagggtggttaatctgctatatcaaactccttccctgaaaccagcaaacaccgggaaacattttggctcattataatccggtgaacaatgcagtcaggcctgttataaccgctgagcagccacactcgcacctcctgggtgctgtagtctgtgttggtacaggcttctgcatgcctggtaaagtccagccaaggctggtcaaggcaacatctccacacagaaaatctgcaccagttatgtaagctaaaaagctgtgtgaacccaggtgtcccggaaaggggctgcaggacacagcaaaatgccagcagcgtgccggacccctcccttccatcctcctctccaaagaacagaggtcaggaaaaacactggctgggacgctagaagggtcatgtgttaactataatcacatttatggtttggaaccatcaccccaaggtaaaaaaaaaataaaaggtattcccaggtatgtttggcaaaataaaataaaggtaattaaaaacc

SEQ ID NO: 8161 - DNA, 2110 bp, Homo sapiens
  source 1..2110: mol_type = unassigned DNA
ggggcgtccggcccagccaggcccttcctggccgggtggctcaggaacacagcctcttcctcttttttttcccctcctagccctattcaggcaggagctgctcttctggggtatcgcgatccacttaaggatgaggcagacttggtgacaagctggtctgagcagcgcttccagagccagaactgagcccagtgagagcgcaccctggagcagcctggattcctggggtgtccccggcagccacacacagccatgcactacccaactgcactcctcttcctcatcctggccaatggggcccaggcctttcgcatctgcgccttcaatgcccagcggctgacactggccaaggtggccagggagcaggtgatggacaccttagttcggatactggctcgctgtgacatcatggtgctgcaggaggtggtggactcttccggcagcgccatccccctcctgcttcgagaactcaatcgatttgatggctctgggccctacagcaccctgagcagcccccagctggggcgcagcacctacatggagacgtatgtgtacttctatcggtcacacaaaacacaggtcctgagttcctacgtgtacaacgatgaggatgacgtctttgcccgggagccatttgtggcccagttctctttgcccagcaatgtccttcccagcctggtgttggtcccgctgcacaccactcctaaggccgtagagaaggagctgaacgccctctacgatgtgtttctggaggtctcccagcactggcagagcaaggacgtgatcctgcttggggacttcaatgctgactgcgcttcactgaccaaaaagcgcctggacaagctggagctgcggactgagccaggcttccactgggtgattgccgatggggaggacaccacagtgcgggccagcacccactgcacctatgaccgcgtcgtgctgcacggggagcgctgccggagtctgctgcacactgcggctgcctttgacttccccacgagcttccagctcaccgaggaggaggccctcaacatcagtgaccactaccccgtggaggtggagctgaagctgagccaggcgcacagcgtccagcctctcagcctcactgttctgttgctgctatcactcctgtcccctcagctgtgccctgctgcctgagcgtccccctacccccccagggcctgctgccttttgggacttaaaccccagcctcccccgtccatccagccctggggctggggggcttcaactatagttgccctgtgactgtagtccacccctgcctgccttgtttgatttggctcttgttctttggttgggcttgtgcctagattaggagaggaagccaggggccctgcactcatgccacctgccaggtagtgtagtatcaggagtggagacaaagtgggctctgggttggggtaggggaagggagggttcagaaagaggaatgaagatgttgtatgacaagaaggaaagttactgagaacaaaaacccagattggtgagataggacacttgtgcagcagatatgccaatgggccatgtttattgtggattggtaagaatcaccaggaaaccattaagccccaatagctacaaggagggtggttaatctgctatatcaaactccttccctgaaaccagcaaacaccgggaaacattttggctcattataatccggtgaacaatgcagtcaggcctgttataaccgctgagcagccacactcgcacctcctgggtgctgtagtctgtgttggtacaggcttctgcatgcctggtaaagtccagccaaggctggtcaaggcaacatctccacacagaaaatctgcaccagttatgtaagctaaaaagctgtgtgaacccaggtgtcccggaaaggggctgcaggacacagcaaaatgccagcagcgtgccggacccctcccttccatcctcctctccaaagaacagaggtcaggaaaaacactggctgggacgctagaagggtcatgtgttaactataatcacatttatggtttggaaccatcaccccaaggtaaaaaaaaaataaaaggtattcccaggtatgtttggcaaaataaaataaaggtaattaaaaacctaa

SEQ ID NO: 8162 - DNA, 2666 bp, Homo sapiens
  source 1..2666: mol_type = unassigned DNA
gtggggcgtccggcccagccaggcccttcctggccgggtggctcaggaacacagcctcttcctcttttttttcccctcctagccctattcaggcaggagctgctcttctggggtatcgcgatccacttaaggatgaggcagacttggtgacaagctggtctgagcaggtatgggagccccctggggagacggaagaagggaggaagttgccttctgcctggggagggtttgagagggagagggaagcctagggctcccaccaaggctgatattgacagccagggtttggggctgaagccaggaaccgtcactctctctggttcttactggtagccctcatgggggtccctgacgccagagcctccaaggctgcatgtgccagcccagggctgcccacatacccatgtatatcccagaataggcaccagggtagggaacccaaactagcatgagtgacagagcaggtggtcagggagaaacagacatcaaacccagccaggagagagacaccgcaacagagagacagagaagggaaaccagagacgagagggaaagtgagacagagacggacagagcctcagagaggtaggaagtgagcccgaagggaaggtgacaggttgatagagaaaagcaggcagacagagcagaggaactcatgcctcaggatgcaaaagccacatggacagggcgtggagcaaggagccgagccctgcaaggtcagcgcttccagagccagaactgagcccagtgagagcgcaccctggagcagcctggattcctggggtgtccccggcagccacacacagccatgcactacccaactgcactcctcttcctcatcctggccaatggggcccaggcctttcgcatctgcgccttcaatgcccagcggctgacactggccaaggtggccagggagcaggtgatggacaccttagttcggatactggctcgctgtgacatcatggtgctgcaggaggtggtggactcttccggcagcgccatccccctcctgcttcgagaactcaatcgatttgatggctctgggccctacagcaccctgagcagcccccagctggggcgcagcacctacatggagacgtatgtgtacttctatcggtcacacaaaacacaggtcctgagttcctacgtgtacaacgatgaggatgacgtctttgcccgggagccatttgtggcccagttctctttgcccagcaatgtccttcccagcctggtgttggtcccgctgcacaccactcctaaggccgtagagaaggagctgaacgccctctacgatgtgtttctggaggtctcccagcactggcagagcaaggacgtgatcctgcttggggacttcaatgctgactgcgcttcactgaccaaaaagcgcctggacaagctggagctgcggactgagccaggcttccactgggtgattgccgatggggaggacaccacagtgcgggccagcacccactgcacctatgaccgcgtcgtgctgcacggggagcgctgccggagtctgctgcacactgcggctgcctttgacttccccacgagcttccagctcaccgaggaggaggccctcaacatcagtgaccactaccccgtggaggtggagctgaagctgagccaggcgcacagcgtccagcctctcagcctcactgttctgttgctgctatcactcctgtcccctcagctgtgccctgctgcctgagcgtccccctacccccccagggcctgctgccttttgggacttaaaccccagcctcccccgtccatccagccctggggctggggggcttcaactatagttgccctgtgactgtagtccacccctgcctgccttgtttgatttggctcttgttctttggttgggcttgtgcctagattaggagaggaagccaggggccctgcactcatgccacctgccaggtagtgtagtatcaggagtggagacaaagtgggctctgggttggggtaggggaagggagggttcagaaagaggaatgaagatgttgtatgacaagaaggaaagttactgagaacaaaaacccagattggtgagataggacacttgtgcagcagatatgccaatgggccatgtttattgtggattggtaagaatcaccaggaaaccattaagccccaatagctacaaggagggtggttaatctgctatatcaaactccttccctgaaaccagcaaacaccgggaaacattttggctcattataatccggtgaacaatgcagtcaggcctgttataaccgctgagcagccacactcgcacctcctgggtgctgtagtctgtgttggtacaggcttctgcatgcctggtaaagtccagccaaggctggtcaaggcaacatctccacacagaaaatctgcaccagttatgtaagctaaaaagctgtgtgaacccaggtgtcccggaaaggggctgcaggacacagcaaaatgccagcagcgtgccggacccctcccttccatcctcctctccaaagaacagaggtcaggaaaaacactggctgggacgctagaagggtcatgtgttaactataatcacatttatggtttggaaccatcaccccaaggtaaaaaaaaaataaaaggtattcccaggtatgtttggcaaaataaaataaaggtaattaaaaacctaa

SEQ ID NO: 8163 - DNA, 3008 bp, Homo sapiens
  source 1..3008: mol_type = unassigned DNA
gtactctggcggggaaggagaggtcaggcgctccgggctcgcccgctaggtcggggccgcggcgtcccccaccctaagtcccacctccggccgggcatgggtacccgggcgggcctgcctcggcctgggcccactcactggtccagaagcagctgtaggtgcccaccaagcccatgacgacgctgctggccagggtccagagcgcttgcatcaaacacccctaactcagaagtgtgcagccacactgggactcagaacccaacaacagggacagaagactcacgcccttggggtgcccggtctcgtggcatcaggcatgacttccagctcctgcgccttccccagcaactgctgactggggacccagaccgggagctgagcgacgggcctggcgagcgaagctcggggtctcactcaggcaccagcccctccttgccccaggcttgagtgactcacagccctattcaggcaggagctgctcttctggggtatcgcgatccacttaaggatgaggcagacttggtgacaagctggtctgagcagcgcttccagagccagaactgagcccagtgagagcgcaccctggagcagcctggattcctggggtgtccccggcagccacacacagccatgcactacccaactgcactcctcttcctcatcctggccaatggggcccaggcctttcgcatctgcgccttcaatgcccagcggctgacactggccaaggtggccagggagcaggtgatggacaccttagttcggatactggctcgctgtgacatcatggtgctgcaggaggtggtggactcttccggcagcgccatccccctcctgcttcgagaactcaatcgatttgatggctctgggccctacagcaccctgagcagcccccagctggggcgcagcacctacatggagacgtatgtgtacttctatcggtcacacaaaacacaggtcctgagttcctacgtgtacaacgatgaggatgacgtctttgcccgggagccatttgtggcccagttctctttgcccagcaatgtccttcccagcctggtgttggtcccgctgcacaccactcctaaggccgtagagaaggagctgaacgccctctacgatgtgtttctggaggtctcccagcactggcagagcaaggacgtgatcctgcttggggacttcaatgctgactgcgcttcactgaccaaaaagcgcctggacaagctggagctgcggactgagccaggcttccactgggtgattgccgatggggaggacaccacagtgcgggccagcacccactgcacctatgaccgcgtcgtgctgcacggggagcgctgccggagtctgctgcacactgcggctgcctttgacttccccacgagcttccagctcaccgaggaggaggccctcaacatcagtgaccactaccccgtggaggtggagctgaagctgagccaggcgcacagcgtccagcctctcagcctcactgttctgttgctgctatcactcctgtcccctcagctgtgccctgctgcctgagcgtccccctacccccccagggcctgctgccttttgggacttaaaccccagcctcccccgtccatccagccctggggctggggggcttcaactatagttgccctgtgactgtagtccacccctgcctgccttgtttgatttggctcttgttctttggttgggcttgtgcctagattaggagaggaagccaggggccctgcactcatgccacctgccaggtagtgtagtatcaggagtggagacaaagtgggctctgggttggggtaggggaagggagggttcagaaagaggaatgaagatgttgtatgacaagaaggaaagttactgagaacaaaaacccagattggtgagataggacacttgtgcagcagatatgccaatgggccatgtttattgtggattggtaagaatcaccaggaaaccattaagccccaatagctacaaggagggtggttaatctgctatatcaaactccttccctgaaaccagcaaacaccgggaaacattttggctcattataatccggtgaacaatgcagtcaggcctgttataaccgctgagcagccacactcgcacctcctgggtgctgtagtctgtgttggtacaggcttctgcatgcctggtaaagtccagccaaggctggtcaaggcaacatctccacacagaaaatctgcaccagttatgtaagctaaaaagctgtgtgaacccaggtgtcccggaaaggggctgcaggacacagcaaaatgccagcagcgtgccggacccctcccttccatcctcctctccaaagaacagaggtcaggaaaaacactggctgggacgctagaagggtcatgtgttaactataatcacatttatggtttggaaccatcaccccaaggtaaaaaaaaaataaaaggtattcccaggtatgtttggcaaaataaaataaaggtaattaaaaacctaagaaatggctgtaaactgagattacaaaaaaccagaggccttttgggagccacaggctgggggctggggccaacataccccagctctgggaccaaaagcctttggagtcctgtccctggatacagatgctcaggccacccacctagcactcctctcatttttgctgctcccccaaaagccagcgctgttctacaatagttcaggtcagacatctaagatccccaggccaaaccatgccacacacgtgtctgttccgaggtcttgttacaaatgaccaaaggttagcctagacctttggtcaggtggtgaaggccctgggaatgcaggttctagaaggggtgggggcatggggcccaggaggttgctagagataggaaatggggcaaatcgcaggtgacctcagcagtacctggatgattcccaccaaggaggaatggccaaaccagatgggtgagaacaagcccaatgtgatgcacacctacccttgctaaataaacgctgctggtcagcctctagcccac

SEQ ID NO: 8164 - DNA, 2665 bp, Homo sapiens
  source 1..2665: mol_type = unassigned DNA
gtactctggcggggaaggagaggtcaggcgctccgggctcgcccgctaggtcggggccgcggcgtcccccaccctaagtcccacctccggccgggcatgggtacccgggcgggcctgcctcggcctgggcccactcactggtccagaagcagctgtaggtgcccaccaagcccatgacgacgctgctggccagggtccagcgcttccagagccagaactgagcccagtgagagcgcaccctggagcagcctggattcctggggtgtccccggcagccacacacagccatgcactacccaactgcactcctcttcctcatcctggccaatggggcccaggcctttcgcatctgcgccttcaatgcccagcggctgacactggccaaggtggccagggagcaggtgatggacaccttagttcggatactggctcgctgtgacatcatggtgctgcaggaggtggtggactcttccggcagcgccatccccctcctgcttcgagaactcaatcgatttgatggctctgggccctacagcaccctgagcagcccccagctggggcgcagcacctacatggagacgtatgtgtacttctatcggtcacacaaaacacaggtcctgagttcctacgtgtacaacgatgaggatgacgtctttgcccgggagccatttgtggcccagttctctttgcccagcaatgtccttcccagcctggtgttggtcccgctgcacaccactcctaaggccgtagagaaggagctgaacgccctctacgatgtgtttctggaggtctcccagcactggcagagcaaggacgtgatcctgcttggggacttcaatgctgactgcgcttcactgaccaaaaagcgcctggacaagctggagctgcggactgagccaggcttccactgggtgattgccgatggggaggacaccacagtgcgggccagcacccactgcacctatgaccgcgtcgtgctgcacggggagcgctgccggagtctgctgcacactgcggctgcctttgacttccccacgagcttccagctcaccgaggaggaggccctcaacatcagtgaccactaccccgtggaggtggagctgaagctgagccaggcgcacagcgtccagcctctcagcctcactgttctgttgctgctatcactcctgtcccctcagctgtgccctgctgcctgagcgtccccctacccccccagggcctgctgccttttgggacttaaaccccagcctcccccgtccatccagccctggggctggggggcttcaactatagttgccctgtgactgtagtccacccctgcctgccttgtttgatttggctcttgttctttggttgggcttgtgcctagattaggagaggaagccaggggccctgcactcatgccacctgccaggtagtgtagtatcaggagtggagacaaagtgggctctgggttggggtaggggaagggagggttcagaaagaggaatgaagatgttgtatgacaagaaggaaagttactgagaacaaaaacccagattggtgagataggacacttgtgcagcagatatgccaatgggccatgtttattgtggattggtaagaatcaccaggaaaccattaagccccaatagctacaaggagggtggttaatctgctatatcaaactccttccctgaaaccagcaaacaccgggaaacattttggctcattataatccggtgaacaatgcagtcaggcctgttataaccgctgagcagccacactcgcacctcctgggtgctgtagtctgtgttggtacaggcttctgcatgcctggtaaagtccagccaaggctggtcaaggcaacatctccacacagaaaatctgcaccagttatgtaagctaaaaagctgtgtgaacccaggtgtcccggaaaggggctgcaggacacagcaaaatgccagcagcgtgccggacccctcccttccatcctcctctccaaagaacagaggtcaggaaaaacactggctgggacgctagaagggtcatgtgttaactataatcacatttatggtttggaaccatcaccccaaggtaaaaaaaaaataaaaggtattcccaggtatgtttggcaaaataaaataaaggtaattaaaaacctaagaaatggctgtaaactgagattacaaaaaaccagaggccttttgggagccacaggctgggggctggggccaacataccccagctctgggaccaaaagcctttggagtcctgtccctggatacagatgctcaggccacccacctagcactcctctcatttttgctgctcccccaaaagccagcgctgttctacaatagttcaggtcagacatctaagatccccaggccaaaccatgccacacacgtgtctgttccgaggtcttgttacaaatgaccaaaggttagcctagacctttggtcaggtggtgaaggccctgggaatgcaggttctagaaggggtgggggcatggggcccaggaggttgctagagataggaaatggggcaaatcgcaggtgacctcagcagtacctggatgattcccaccaaggaggaatggccaaaccagatgggtgagaacaagcccaatgtgatgcacacctacccttgctaaataaacgctgctggtcagcctctagcccac

SEQ ID NO: 8165 - DNA, 942 bp, Homo sapiens
  source 1..942: mol_type = unassigned DNA
tgtactctggcggggaaggagaggtcaggcgctccgggctcgcccgctaggtcggggccgcggcgtcccccaccctaagtcccacctccggccgggcatgggtacccgggcgggcctgcctcggcctgggcccactcactggtccagaagcagctgtaggtgcccaccaagcccatgacgacgctgctggccagggtccagagcgcttgcatcaaacacccctaactcagaagtgtgcagccacactgggactcagaacccaacaacagggacagaagactcacgcccttggggtgcccggtctcgtggcatcaggcatgacttccagctcctgcgccttccccagcaactgctgactggggacccagaccgggagctgagcgacgggcctggcgagcgaagctcggggtctcactcaggcaccagcccctccttgccccaggcttgagtgactcacagccctattcaggcaggagctgctcttctggggtatcgcgatccacttaaggatgaggcagacttggtgacaagctggtctgagcagcgcttccagagccagaactgagcccagtgagagcgcaccctggagcagcctggattcctggggtgtccccggcagccacacacagccatgcactacccaactgcactcctcttcctcatcctggccaatggggcccaggcctttcgcatctgcgccttcaatgcccagcggctgacactggccaaggtggccagggagcaggtgatggacaccttagttcggatactggctcgctgtgacatcatggtgctgcaggaggtggtggactcttccggcagcgccatccccctcctgcttcgagaactcaatcgatttgatggctctgggccctacagcaccctgagcagcccccagctggggcgcagcacctacatggagacgtatgtgtacttctatcg

SEQ ID NO: 8166 - DNA, 847 bp, Homo sapiens
  source 1..847: mol_type = unassigned DNA
tactctggcggggaaggagaggtcaggcgctccgggctcgcccgctaggtcggggccgcggcgtcccccaccctaagtcccacctccggccgggcatgggtacccgggcgggcctgcctcggcctgggcccactcactggtccagaagcagctgtaggtgcccaccaagcccatgacgacgctgctggccagggtccagcattactgcaggacccccaggacgttggactgccagctccctgggtctcctcctctctggggcagatcctcagtcctcccttgacttcacgactgtggccagatcatgtgtggactgtccctctctttgggtctccagagcgcttgcatcaaacacccctaactcagaagtgtgcagccacactgggactcagaacccaacaacagggacagaagactcacgcccttggggtgcccggtctcgtggcatcaggcatgacttccagctcctgcgccttccccagcaactgctgactggggacccagaccgggagctgagcgacgggcctggcgagcgaagctcggggtctcactcaggcaccagcccctccttgccccaggcttgagtgactcacagccctattcaggcaggagctgctcttctggggtatcgcgatccacttaaggatgaggcagacttggtgacaagctggtctgagcagcgcttccagagccagaactgagcccagtgagagcgcaccctggagcagcctggattcctggggtgtccccggcagccacacacagccatgcactacccaactgcactcctcttcctcatcctggccaatggggcccaggcctttcgcatctgcgccttcaatgccca

SEQ ID NO: 8167 - DNA, 904 bp, Homo sapiens
  source 1..904: mol_type = unassigned DNA
ggcggggaaggagaggtcaggcgctccgggctcgcccgctaggtcggggccgcggcgtcccccaccctaagtcccacctccggccgggcatgggtacccgggcgggcctgcctcggcctgggcccactcactggtccagaagcagctgtaggtgcccaccaagcccatgacgacgctgctggccagggtccagcgcttccagagccagaactgagcccagtgagagcgcaccctggagcagcctggattcctggggtgtccccggcagccacacacagccatgcactacccaactgcactcctcttcctcatcctggccaatggggcccaggcctttcgcatctgcgccttcaatgcccagcggctgacactggccaaggtggccagggagcaggtgatggacaccttagttcggatactggctcgctgtgacatcatggtgctgcaggaggtggtggactcttccggcagcgccatccccctcctgcttcgagaactcaatcgatttgatggctctgggccctacagcaccctgagcagcccccagctggggcgcagcacctacatggagacgtatgtgtacttctatcggtcacacaaaacacaggtcctgagttcctacgtgtacaacgatgaggatgacgtctttgcccgggagccatttgtggcccagttctctttgcccagcaatgtccttcccagcctggtgttggtcccgctgcacaccactcctaaggccgtagagaaggagctgaacgccctctacgatgtgtttctggaggtctcccagcactggcagagcaaggacgtgatcctgcttggggacttcaatgctgactgcgcttcactgaccaaaaagcgcctggacaagctggagctgcggactgagccaggcttccactgg

SEQ ID NO: 8168 - DNA, 1463 bp, Homo sapiens
  source 1..1463: mol_type = unassigned DNA
cagcctatgacacttttgctcctcctgaaatctccatatcttgcttttctcaaattccaaggtagcctttgcgcaacatatcactctccactgactcttgtcccatcagggcccatagtggatggctgtatgggggccatgtgactgaactcctgatcctcgtttcagcccactcatgtgacatgcatggagctcttcagcagggacttactgaccaggacaagagcttgagactttgaggggatctgattgtcactgcacaatcaaggacagtattcccaagagtggatgttgctcaagatagtccaaggaattctatgaagaaaaggactccacagacaataaattttggacaccctgtttcaacacagtgcatcttagagactggtgtttgcaagtatatggagcaggaaacttcatcccgaagatggagaccccggggctgtcagcaggcgttagagtcttgaagccagagcagcgccaggatgtcacgggagctggccccactgctgcttctcctcctctccatccacagcgccctggccatgaggatctgctccttcaacgtcaggtcctttggggaaagcaagcaggaagacaagaatgccatggatgtcattgtgaaggtcatcaaacgctgtgacatcatactcgtgatggaaatcaaggacagcaacaacaggatctgccccatactgatggagaagctgaacagaaattcaaggagaggcataacgtacaactatgtgattagctctcggcttggaagaaacacatataaagaacaatatgcctttctctacaaggaaaagctggtgtctgtgaagaggagttatcactaccatgactatcaggatggagacgcagatgtgttttccagggagccctttgtggtctggttccaatctccccacactgctgtcaaagacttcgtgattatccccctgcacaccaccccagagacatccgttaaggagatcgatgagttggttgaggtctacacggacgtgaaacaccgctggaaggcggagaatttcattttcatgggtgacttcaatgccggctgcagctacgtccccaagaaggcctggaagaacatccgcttgaggactgaccccaggtttgtttggctgatcggggaccaagaggacaccacggtgaagaagagcaccaactgtgcatatgacaggattgtgcttagaggacaagaaatcgtcagttctgttgttcccaagtcaaacagtgtttttgacttccagaaagcttacaagctgactgaagaggaggccctggatgtcagcgaccactttccagttgaatttaaactacagtcttcaagggccttcaccaacagcaaaaaatctgtcactctaaggaagaaaacaaagagcaaacgctcctagacccaagggtctcatcttattaaccatttcttgcctctaaataaaatgtctctaacagat

SEQ ID NO: 8169 - DNA, 1294 bp, Homo sapiens
  source 1..1294: mol_type = unassigned DNA
agatgtcagagctggctcccggttgggatatgagtgactttgtggaggatggcgcctaaatgaggcatgccaatttctgcaccagggtgacgaacataagggctccttaaaggctagcccaatgtatctgtatttccttggggattaaaacccatgatcttcagttcctcagagaactgaaagttgcaaggagaaatccagtaattcctgttatctgcaggctttataagtcagtggagcctgcggaagtggccagaatccagcactccaagcactgctgtcttctcacagagtcttgaagccagagcagcgccaggatgtcacgggagctggccccactgctgcttctcctcctctccatccacagcgccctggccatgaggatctgctccttcaacgtcaggtcctttggggaaagcaagcaggaagacaagaatgccatggatgtcattgtgaaggtcatcaaacgctgtgacatcatactcgtgatggaaatcaaggacagcaacaacaggatctgccccatactgatggagaagctgaacagaaattcaaggagaggcataacgtacaactatgtgattagctctcggcttggaagaaacacatataaagaacaatatgcctttctctacaaggaaaagctggtgtctgtgaagaggagttatcactaccatgactatcaggatggagacgcagatgtgttttccagggagccctttgtggtctggttccaatctccccacactgctgtcaaagacttcgtgattatccccctgcacaccaccccagagacatccgttaaggagatcgatgagttggttgaggtctacacggacgtgaaacaccgctggaaggcggagaatttcattttcatgggtgacttcaatgccggctgcagctacgtccccaagaaggcctggaagaacatccgcttgaggactgaccccaggtttgtttggctgatcggggaccaagaggacaccacggtgaagaagagcaccaactgtgcatatgacaggattgtgcttagaggacaagaaatcgtcagttctgttgttcccaagtcaaacagtgtttttgacttccagaaagcttacaagctgactgaagaggaggccctggatgtcagcgaccactttccagttgaatttaaactacagtcttcaagggccttcaccaacagcaaaaaatctgtcactctaaggaagaaaacaaagagcaaacgctcctagacccaagggtctcatcttattaaccatttcttgcctctaaataaaatgtctctaacaga

SEQ ID NO: 8170 - DNA, 2109 bp, Homo sapiens
  source 1..2109: mol_type = unassigned DNA
gttatgacctgggaaatgtgagcaggtagaggctacattaagaagtttgctctttgaccaataaaagccctggaaagattttaatcagagcaggcctgcccttcagaaagtgactcttgaggtccaggcacagccctgtgtggaagatagtgtgtgaggctgaaacccagagtgtgtcatcatctggaaacaaccctgcaaagcccactcatgtgacatgcatggagctcttcagcagggacttactgaccaggacaagagcttgagactttgaggggatctgattgtcactgcacaatcaaggacagtattcccaagagtggatgttgctcaagatagtccaaggaattctatgaagaaaaggactccacagacaataaattttggacaccctgtttcaacacaggtgcatcttagagactggtgtttgcaagtatatggagcaggaaacttcatcccgaagatggagaccccggggctgtcagcaggcgttaggctttataagtcagtggagcctgcggaagtggccagaatccagcactccaagcactgctgtcttctcacagagtcttgaagccagagcagcgccaggatgtcacgggagctggccccactgctgcttctcctcctctccatccacagcgccctggccatgaggatctgctccttcaacgtcaggtcctttggggaaagcaagcaggaagacaagaatgccatggatgtcattgtgaaggtcatcaaacgctgtgacatcatactcgtgatggaaatcaaggacagcaacaacaggatctgccccatactgatggagaagctgaacagaaattcaaggagaggcataacgtacaactatgtgattagctctcggcttggaagaaacacatataaagaacaatatgcctttctctacaaggaaaagctggtgtctgtgaagaggagttatcactaccatgactatcaggatggagacgcagatgtgttttccagggagccctttgtggtctggttccaatctccccacactgctgtcaaagacttcgtgattatccccctgcacaccaccccagagacatccgttaaggagatcgatgagttggttgaggtctacacggacgtgaaacaccgctggaaggcggagaatttcattttcatgggtgacttcaatgccggctgcagctacgtccccaagaaggcctggaagaacatccgcttgaggactgaccccaggtttgtttggctgatcggggaccaagaggacaccacggtgaagaagagcaccaactgtgcatatgacaggattgtgcttagaggacaagaaatcgtcagttctgttgttcccaagtcaaacagtgtttttgacttccagaaagcttacaagctgactgaagaggaggtaaggttgccatcttgtctttctatgccattgtcctggaaagatgagttagcttgggcaacatgatgagactccatctctatgaaaaattcaaaaaaattagctgggcatggtgatgcatgcctatggtcccagctacttgggaggctgaggtgggaggatcacttgagtccaggaagcggaggttgcagtgagccaagatcgcaccactgcactccaggctgggcaacagagtgagatcctgtctcaaaaaaaaaaaaaaaaaaagatgggttgatgccaccctttgaggtcaccactgaagacacaacattgggcactagaccttgaccctcaatgcctatgattctgtgatttgaggcccctccaaaatttctgatcgagctggtcttggaatgacgcttaccagtaagtgttctgtggggtgacttcgggcatttcctctcccctccctggtcctaaatttgctcatcgctaaaatgaaagcatctcccaggcatctcctaatttccatgtctacctcccctttctccttataggccctggatgtcagcgaccactttccagttgaatttaaactacagtcttcaagggccttcaccaacagcaaaaaatctgtcactctaaggaagaaaacaaagagcaaacgctcctagacccaagggtctcatcttattaaccatttcttgcctctaaataaaatgtctctaacagat

SEQ ID NO: 8171 - DNA, 786 bp, Homo sapiens
  source 1..786: mol_type = unassigned DNA
cagcctatgacacttttgctcctcctgaaatctccatatcttgcttttctcaaattccaaggtagcctttgcgcaacatatcactctccactgactcttgtcccatcagggcccatagtggatggctgtatgggggccatgtgactgaactcctgatcctcgtttcagcccactcatgtgacatgcatggagctcttcagcagggacttactgaccaggacaagagcttgagactttgaggggatctgattgtcactgcacaatcaaggacagtattcccaagagtggatgttgctcaagatagtccaaggaattctatgaagaaaaggactccacagacaataaattttggacaccctgtttcaacacagtgcatcttagagactggtgtttgcaagtatatggagcaggaaacttcatcccgaagatggagaccccggggctgtcagcaggcgttagagtcttgaagccagagcagcgccaggatgtcacgggagctggccccactgctgcttctcctcctctccatccacagcgccctggccatgaggatctgctccttcaacgtcaggtcctttggggaaagcaagcaggaagacaagaatgccatggatgtcattgtgaaggtcatcaaacgctgtgacatcatactcgtgatggaaatcaaggacagcaacaacaggatctgccccatactgatggagaagctgaacagaaattcaaggagaggcataacgtacaactatgtgattagctctcggcttggaagaaacacatataaagaac

SEQ ID NO: 8172 - DNA, 1321 bp, Homo sapiens
  source 1..1321: mol_type = unassigned DNA
agaatccagcactccaagcactgctgtcttctcacagagtcttgaagccagagcagcgccaggatgtcacgggagctggccccactgctgcttctcctcctctccatccacagcgccctggccatgaggatctgctccttcaacgtcaggtcctttggggaaagcaagcaggaagacaagaatgccatggatgtcattgtgaaggtcatcaaacgctgtgacatcatactcgtgatggaaatcaaggacagcaacaacaggatctgccccatactgatggagaagctgaacagggaaaagctggtgtctgtgaagaggagttatcactaccatgactatcaggatggagacgcagatgtgttttccagggagccctttgtggtctggttccaatctccccacactgctgtcaaagacttcgtgattatccccctgcacaccaccccagagacatccgttaaggagatcgatgagttggttgaggtctacacggacgtgaaacaccgctggaaggcggagaatttcattttcatgggtgacttcaatgccggctgcagctacgtccccaagaaggcctggaagaacatccgcttgaggactgaccccaggtttgtttggctgatcggggaccaagaggacaccacggtgaagaagagcaccaactgtgcatatgacaggattgtgcttagaggacaagaaatcgtcagttctgttgttcccaagtcaaacagtgtttttgacttccagaaagcttacaagctgactgaagaggaggccctggatgtcagcgaccactttccagttgaatttaaactacagtcttcaagggccttcaccaacagcaaaaaatctgtcactctaaggaagaaaacaaagagcaaacgctcctagacccaagggtctcatcttattaaccatttcttgcctctaaataaaatgtctctaacagatatgaactgctccctgtacttaggaaacaagagtgatccaactgctttcattttttgacctgaatttattctgacttgagccaaattggaaggagaatcttttgtatctctcttggtctcatacctcccctgaattgtctaaaagggaaccaggggcatttgtagaccaaaatgatgatcttcatgccctgagccagagccccatccactgtcactggccctgctcaaccctgtcatgcgagaggctgcagggggaggaagagcgtcagctttcagtcctcatgaggggtcctgttccacacgcaatgaccagaaacaccaaggccccagctgcccctgtgatttgggcaattaactgttttaagagtctg

SEQ ID NO: 8173 - DNA, 1170 bp, Homo sapiens
  source 1..1170: mol_type = unassigned DNA
gggcgcgtcttcagggtggaagcctggcgcacgtccggaggtgccgaggacccaaccagcccaaactctgggggaaatgactcccctctgccctcgccccgcgctctgctaccatttccttacgtctctgcttcgctcagcgatgcaaaacgcgcgaacggcagagggccgaagccgcggtactctccgggccaggcccgcccctcggccggccgcgcagcacgggattccccggccgctgtccagcgctggccgcctgagccaaggctgccgcggagccagtacagtcggggccgctggctggaagggcgagcttcctaaggcggggggaagcccggcgccggggccggagacacccgccatttcacccagtaagcgggcccggcctgcggaggtgggcggcatgcagctccgctttgcccggctctccgagcacgccacggcccccacccggggctccgcgcgcgccgcgggctacgacctgtacagtgcctatgattacacaataccacctatggagaaagctgttgtgaaaacggacattcagatagcgctcccttctgggtgttatggaagagtggctccacggtcaggcttggctgcaaaacactttattgatgtaggagctggtgtcatagatgaagattatagaggaaatgttggtgttgtactgtttaattttggcaaagaaaagtttgaagtcaaaaaaggtgatcgaattgcacagctcatttgcgaacggattttttatccagaaatagaagaagttcaagccttggatgacaccgaaaggggttcaggaggttttggttccactggaaagaattaaaatttatgccaagaacagaaaacaagaagtcatacctttttcttaaaaaaaaaaaaaaagtttttgcttcaagtgttttggtgttttgcacttctgtaaacttactagctttaccttctaaaagtactgcattttttacttttttttatgatcaaggaaaagatcattaaaaaaaaacacaaagaagtttttctttgtgtttggatcaaaaagaaactttgtttttccgcaattgaaggttgtatgtaaatctgctttgtggtgacctgatgtaaacagtgtcttcttaaaatcaaatgtaaatcaattacagattaaaaaaaaaagcctgtatttaactc

SEQ ID NO: 8174 - DNA, 2147 bp, Homo sapiens
  source 1..2147: mol_type = unassigned DNA
ggtcatgttcccaggacgggcgcgtcttcagggtggaagcctggcgcacgtccggaggtgccgaggacccaaccagcccaaactctgggggaaatgactcccctctgccctcgccccgcgctctgctaccatttccttacgtctctgcttcgctcagcgatgcaaaacgcgcgaggcgcacggcagagggccgaagccgcggtactctccgggccaggcccgcccctcggccgcgccgcgcagcacgggattccccggccgctgtccagcgctggccgcctgagccaaggctgccgcggagccagtacagtcggggccgctggctggaagggcgagcttcctaaggcggggggaagcccggcgccggggccggagacacccgccatttcacccagtaagcgggcccggcctgcggaggtgggcggcatgcagctccgctttgcccggctctccgagcacgccacggcccccacccggggctccgcgcgcgccgcgggctacgacctgtacagtgcctatgattacacaataccacctatggagaaagctgttgtgaaaacggacattcagatagcgctcccttctgggtgttatggaagagtggctccacggtcaggcttggctgcaaaacactttattgatgtaggagctggtgtcatagatgaagattatagaggaaatgttggtgttgtactgtttaattttggcaaagaaaagtttgaagtcaaaaaaggtgatcgaattgcacagctcatttgcgaacggattttttatccagaaatagaagaagttcaagccttggatgacaccgaaaggggttcaggaggttttggttccactggaaagaattaaaatttatgccaagaacagaaaacaagaagtcatacctttttcttaaaaaaaaaaaaaaagtttttgcttcaagtgttttggtgttttgcacttctgtaaacttactagctttaccttctaaaagtactgcattttttacttttttttatgatcaaggaaaagatcattaaaaaaaaacacaaagaagtttttctttgtgtttggatcaaaaagaaactttgtttttccgcaattgaaggttgtatgtaaatctgctttgtggtgacctgatgtaaacagtgtcttcttaaaatcaaatgtaaatcaattacagattaaaaaaaaaagcctgtatttaactcatatgatctcccttcagcaacttattttgctttaattgctttaaatcttaagcaatattttttattcagtaaacaaattctttcacaaggtacaaaatcttgcataagctgaactaaaataaaaatgaaaaggagagattaaaggtattccttgttcttcccttctcttcactagtctaaaaacttctttttaatcttaagattctttgtgatgagggtgagaaaaagaatcctcagtttatttttccactattaatctttcttttgataaatcctctattgactgggtagaggtatgtttgtgaaagacatgtaacttggggatttgttactttaggtttgttcccttgaatttcatctcatcaggcaaattgtactagttgtagttacgagttttccctcagtgaagtagcaataggctgtaatcaagaaaatatgccatttatagagataagataaatgaaataatacttcagccaccaggtttttctgtctcacatacataagcagcatttcattgcagatatgggactgattctgtggcttaccttgattaacatcttttggaagttttgctagtgtgctttcctttctttactatgtttctcagattcctttgtatcagggttttgggtgtcacttaggttttgtccatcagattctgtgagacaccaggcatcgttttgaggatgtgggttatacacatggagtgcttctggaactatcagcccacttgaccacccagtttgtggaagcacaggcaagagtgttcttttctggtgattctccaggccatttaataccctgcaatgtaattgtccctctgtggctcacatttcattagtgagccatgaaatcaactcagtgggacatagccagcatttttgcataccaggttgggctataaaatatttctgttgtcaataaattttaaatgttttcctgctaaactaa

SEQ ID NO: 8175 - DNA, 1935 bp, Homo sapiens
  source 1..1935: mol_type = unassigned DNA
agccagaactgtggactcgtcccggggaggggcggtgggtggggcggggctggcgggaaatttcggttttggcgcgctccctgcggcgacgctcatcgtgcgctctcctcttcccccggtggtctcctcgctcgccttctggctctgccatgccctgctctgaagagacacccgccatttcacccagtaagcgggcccggcctgcggaggtgggcggcatgcagctccgctttgcccggctctccgagcacgccacggcccccacccggggctccgcgcgcgccgcgggctacgacctgtacagtgcctatgattacacaataccacctatggagaaagctgttgtgaaaacggacattcagatagcgctcccttctgggtgttatggaagagtggctccacggtcaggcttggctgcaaaacactttattgatgtaggagctggtgtcatagatgaagattatagaggaaatgttggtgttgtactgtttaattttggcaaagaaaagtttgaagtcaaaaaaggtgatcgaattgcacagctcatttgcgaacggattttttatccagaaatagaagaagttcaagccttggatgacaccgaaaggggttcaggaggttttggttccactggaaagaattaaaatttatgccaagaacagaaaacaagaagtcatacctttttcttaaaaaaaaaaaaaaagtttttgcttcaagtgttttggtgttttgcacttctgtaaacttactagctttaccttctaaaagtactgcattttttacttttttttatgatcaaggaaaagatcattaaaaaaaaacacaaagaagtttttctttgtgtttggatcaaaaagaaactttgtttttccgcaattgaaggttgtatgtaaatctgctttgtggtgacctgatgtaaacagtgtcttcttaaaatcaaatgtaaatcaattacagattaaaaaaaaaagcctgtatttaactcatatgatctcccttcagcaacttattttgctttaattgctttaaatcttaagcaatattttttattcagtaaacaaattctttcacaaggtacaaaatcttgcataagctgaactaaaataaaaatgaaaaggagagattaaaggtattccttgttcttcccttctcttcactagtctaaaaacttctttttaatcttaagattctttgtgatgagggtgagaaaaagaatcctcagtttatttttccactattaatctttcttttgataaatcctctattgactgggtagaggtatgtttgtgaaagacatgtaacttggggatttgttactttaggtttgttcccttgaatttcatctcatcaggcaaattgtactagttgtagttacgagttttccctcagtgaagtagcaataggctgtaatcaagaaaatatgccatttatagagataagataaatgaaataatacttcagccaccaggtttttctgtctcacatacataagcagcatttcattgcagatatgggactgattctgtggcttaccttgattaacatcttttggaagttttgctagtgtgctttcctttctttactatgtttctcagattcctttgtatcagggttttgggtgtcacttaggttttgtccatcagattctgtgagacaccaggcatcgttttgaggatgtgggttatacacatggagtgcttctggaactatcagcccacttgaccacccagtttgtggaagcacaggcaagagtgttcttttctggtgattctccaggccatttaataccctgcaatgtaattgtccctctgtggctcacatttcattagtgagccatgaaatcaactcagtgggacatagccagcatttttgcataccaggttgggctataaaatatttctgttgtcaataaattttaaatgttttcctgctaaa

SEQ ID NO: 8176 - DNA, 769 bp, Homo sapiens
  source 1..769: mol_type = unassigned DNA
ggctgcgactgcttccgaggtcatgttcccaggacgggcgcgtcttcagggtggaagcctggcgcacgtccggagagacacccgccatttcacccagtaagcgggcccggcctgcggaggtgggcggcatgcagctccgctttgcccggctctccgagcacgccacggcccccacccggggctccgcgcgcgccgcgggctacgacctgtacagtgcctatgattacacaataccacctatggagaaagctgttgtgaaaacggacattcagatagcgctcccttctgggtgttatggaagagtggctccacggtcaggcttggctgcaaaacactttattgatgtaggagctggtgtcatagatgaagattatagaggaaatgttggtgttgtactgtttaattttggcaaagaaaagtttgaagtcaaaaaaggtgatcgaattgcacagctcatttgcgaacggattttttatccagaaatagaagaagttcaagccttggatgacaccgaaaggggttcaggaggttttggttccactggaaagaattaaaatttatgccaagaacagaaaacaagaagtcatacctttttcttaaaaaaaaaaaaaaagtttttgcttcaagtgttttggtgttttgcacttctgtaaacttactagctttaccttctaaaagtactgcattttttacttttttttatgatcaaggaaaagatcattaaaaaaaaacacaaagaagtttttctttgtgtttggatcaaaaagaa

SEQ ID NO: 8177 - DNA, 1712 bp, Homo sapiens
  source 1..1712: mol_type = unassigned DNA
gtgccgagactcgccactgccgcggccgctgggcctgagtgtcgccttcgccgccatggacgccaccgggcgctgacagacctatggagagtcagggtgtgcctcccgggccttatcgggccaccaagctgtggaatgaagttaccacatcttttcgagcaggaatgcctctaagaaaacacagacaacactttaaaaaatatggcaattgtttcacagcaggagaagcagtggattggctttatgacctattaagaaataatagcaattttggtcctgaagttacaaggcaacagactatccaactgttgaggaaatttcttaagaatcatgtaattgaagatatcaaagggaggtggggatcagaaaatgttgatgataacaaccagctcttcagatttcctgcaacttcgccacttaaaactctaccacgaagaactcctaaaaggcatggattacatttatctcaggaaaatggcgagaaaataaagcatgaaataatcaatgaagatcaagaaaatgcaattgataatagagaactaagccaggaagatgttgaagaagtttggagatatgttattctgatctacctgcaaaccattttaggtgtgccatccctagaagaagtcataaatccaaaacaagtaattccccaatatataatgtacaacatggccaatacaagtaaacgtggagtagttatactacaaaacaaatcagatgacctccctcactgggtattatctgccatgaagtgcctagcaaattggccaagaagcaatgatatgaataatccaacttatgttggatttgaacgagatgtattcagaacaatcgcagattattttctagatctccctgaacctctacttacttttgaatattacgaattatttgtaaacattttgggaaatttcaaggattttaggagctccataccagttgtttgtggctacatcacagtttcagatagatccagtgggatacataaaattcaagatgatccacagtcttcaaaattccttcacttaaacaatttgaattccttcaaatcaactgagtgccttcttctcagtctgcttcatagagaaaaaaacaaagaagaatcagattctactgagagactacagataagcaatccaggatttcaagaaagatgtgctaagaaaatgcagctagttaatttaagaaacagaagagcttgctgcaacctcatttagagagggttgccatcgatgctctacagttatgttgtttgttacttcccccaccaaatcgtagaaagcttcaacttttaatgcgtatgatttcccgaatgagtcaaaatgttgatatgcccaaacttcatgatgcaatgggtacgaggtcactgatgatacataccttttctcgatgtgtgttatgctgtgctgaagaagtggatcttgatgagcttcttgctggaagattagtttctttcttaatggatcatcatcaggaaattcttcaagtaccctcttacttacagactgcagtggaaaaacatcttgactacttaaaaaagggacatattgaaaatcctggagatggactatttgctcctttgccaacttactcatactgtaagcagattagtgctcaggagtttgatgagcaaaaagtttctacctctcaagctgcaattgcagaacttttagaaaatattattaaaaacaggagtttacctctaaagg

SEQ ID NO: 8178 - DNA, 4586 bp, Homo sapiens
  source 1..4586: mol_type = unassigned DNA
agctactggagccccaggacgcagccgagcggccctcgccgactccttcccgagcctggctgtggcgtcacgtgacccgcggcgcggccaatccgcgcagccctctatgctattcaaatcggcggcggggccaacggttgtgccgagactcgccactgccgcggccgctgggcctgagtgtcgccttcgccgccatggacgccaccgggcgctgacagacctatggagagtcagggtgtgcctcccgggccttatcgggccaccaagctgtggaatgaagttaccacatcttttcgagcaggaatgcctctaagaaaacacagacaacactttaaaaaatatggcaattgtttcacagcaggagaagcagtggattggctttatgacctattaagaaataatagcaattttggtcctgaagttacaaggcaacagactatccaactgttgaggaaatttcttaagaatcatgtaattgaagatatcaaagggaggtggggatcagaaaatgttgatgataacaaccagctcttcagatttcctgcaacttcgccacttaaaactctaccacgaaggtatccagaattgagaaaaaacaacatagagaacttttccaaagataaagatagcatttttaaattacgaaacttatctcgtagaactcctaaaaggcatggattacatttatctcaggaaaatggcgagaaaataaagcatgaaataatcaatgaagatcaagaaaatgcaattgataatagagaactaagccaggaagatgttgaagaagtttggagatatgttattctgatctacctgcaaaccattttaggtgtgccatccctagaagaagtcataaatccaaaacaagtaattccccaatatataatgtacaacatggccaatacaagtaaacgtggagtagttatactacaaaacaaatcagatgacctccctcactgggtattatctgccatgaagtgcctagcaaattggccaagaagcaatgatatgaataatccaacttatgttggatttgaacgagatgtattcagaacaatcgcagattattttctagatctccctgaacctctacttacttttgaatattacgaattatttgtaaacattttgggcttgctgcaacctcatttagagagggttgccatcgatgctctacagttatgttgtttgttacttcccccaccaaatcgtagaaagcttcaacttttaatgcgtatgatttcccgaatgagtcaaaatgttgatatgcccaaacttcatgatgcaatgggtacgaggtcactgatgatacataccttttctcgatgtgtgttatgctgtgctgaagaagtggatcttgatgagcttcttgctggaagattagtttctttcttaatggatcatcatcaggaaattcttcaagtaccctcttacttacagactgcagtggaaaaacatcttgactacttaaaaaagggacatattgaaaatcctggagatggactatttgctcctttgccaacttactcatactgtaagcagattagtgctcaggagtttgatgagcaaaaagtttctacctctcaagctgcaattgcagaacttttagaaaatattattaaaaacaggagtttacctctaaaggagaaaagaaaaaaactaaaacagtttcagaaggaatatcctttgatatatcagaaaagatttccaaccacggagagtgaagcagcactttttggtgacaaacctacaatcaagcaaccaatgctgattttaagaaaaccaaagttccgtagtctaagataactaactgaattaaaaattatgtaatacttgtggaactttgataaatgaagccatatctgagaatgtagctactcaaaaggaagtctgtcattaataaggtatttctaaataaacacattatgtaaggaagtgccaaaatagttatcaatgtgagactcttaggaaactaactagatctcaattgagagcacataacaatagatgataccaaatactttttgtttttaacacagctatccagtaaggctatcatgatgtgtgctaaaattttatttacttgaattttgaaaactgagctgtgttagggattaaactataattctgttcttaaaagaaaatttatctgcaaatgtgcaagttctgagatattagctaatgaattagttgtttggggttacttctttgtttctaagtataagaatgtgaagaatatttgaaaactcaatgaaataattctcagctgccaaatgttgcactcttttatatattctttttccacttttgatctatttatatatatgtatgtgtttttaaaatatgtgtatattttatcagatttggttttgccttaaatattatccccaattgcttcagtcattcatttgttcagtatatatattttgaattctagttttcataatctattagaagatggggatataaaagaagtataaggcaatcatatattcattcaaaagatatttatttagcaactgctatgtgcctttcgttgttccagatatgcagagacaatgataaataaaacatataatctcttccataaggtatttattttttaatcaagggagatacacctatcagatgtttaaaataacaacactacccactgaaatcagggcatatagaatcattcagctaaagagtgacttctatgatgatggaacaggtctctaagctagtggttttcaaactggtacacattagactcacccgaggaattttaaaacagcctatatgcccagggcctaacttacactaattaaatctgaattttggggatgttgtatagggattagtattttttttaatctaggtgattccaatattcagccaactgtgagaatcaatggcctaaatgctttttataaacatttttataagtgtcaagataatggcacattgactttattttttcattggaagaaaatgcctgccaagtataaatgactctcatcttaaaacaaggttcttcaggtttctgcttgattgacttggtacaaacttgaagcaagttgccttctaatttttactccaagattgtttcatatctattccttaagtgtaaagaaatatataatgcatggtttgtaataaaatcttaatgtttaatgactgttctcatttctcaatgtaatttcatactgtttctctataaaatgatagtattccatttaacattactgatttttattaaaaacctggacagaaaattataaattataaatatgactttatcctggctataaaattattgaaccaaaatgaattctttctaaggcatttgaatactaaaacgtttattgtttatagatatgtaaaatgtggattatgttgcaaattgagattaaaattatttggggttttgtaacaatataattttgcttttgtattatagacaaatatataaataataaaggcaggcaactttcatttgcactaatgtacatgcaattgagattacaaaatacatggtacaatgctttaataacaaactctgccagtcaggtttgaatcctactgtgctattaactagctagtaaactcagacaagttacttaacttctctaagccccagttttgttatctataaaatgaatattataatagtacctctttttaggattgcgaggattaagcaggataatgcatgtaaagtgttagcacagtgtctcacatagaataagcactctataaatattttactagaatcacctaggattatagcactagaagagatcttagcaaaaatgtggtcctttctgttgctttggacagacatgaaccaaaacaaaattacggacaattgatgagccttattaactatcttttcattatgagacaaaggttctgattatgcctactggttgaaattttttaatctagtcaagaaggaaaatttgatgaggaaggaaggaatggatatcttcagaagggcttcgcctaagctggaacatggatagattccattctaacataaagatctttaagttcaaatatagatgagttgactggtagatttggtggtagttgctttctcgggatataagaagcaaaatcaactgctacaagtaaagaggggatggggaaggtgttgcacatttaaagagagaaagtgtgaaaaagcctaattgtgggaatgcacaggtttcaccagatcagatgatgtctggttattctgtaaattatagttcttatcccagaaattactgcctccaccatccctaatatcttctaattggtatcatataatgacccactcttcttatgttatccaaacagttatgtggcatttagtaatggaatgtacatggaatttcccactgacttacctttctgtccttgggaagcttaaactctgaatcttctcatctgtaaaatgtgaattaaagtatctacctaactgagttgtgattgtagtgaaagaaaggcaatatatttaaatcttgaatttagcaagcccacgcttgatttttatgtcctttcctcttgccttgtattgagtttaagatctctactgattaaaactcttttgctatcaa

SEQ ID NO: 8179 - DNA, 5331 bp, Homo sapiens
  source 1..5331: mol_type = unassigned DNA
tgctattcaaatcggcggcggggccaacggttgtgccgagactcgccactgccgcggccgctgggcctgagtgtcgccttcgccgccatggacgccaccgggcgctgacagacctatggagagtcagggtgtgcctcccgggccttatcgggccaccaagctgtggaatgaagttaccacatcttttcgagcaggaatgcctctaagaaaacacagacaacactttaaaaaatatggcaattgtttcacagcaggagaagcagtggattggctttatgacctattaagaaataatagcaattttggtcctgaagttacaaggcaacagactatccaactgttgaggaaatttcttaagaatcatgtaattgaagatatcaaagggaggtggggatcagaaaatgttgatgataacaaccagctcttcagatttcctgcaacttcgccacttaaaactctaccacgaaggtatccagaattgagaaaaaacaacatagagaacttttccaaagataaagatagcatttttaaattacgaaacttatctcgtagaactcctaaaaggcatggattacatttatctcaggaaaatggcgagaaaataaagcatgaaataatcaatgaagatcaagaaaatgcaattgataatagagaactaagccaggaagatgttgaagaagtttggagatatgttattctgatctacctgcaaaccattttaggtgtgccatccctagaagaagtcataaatccaaaacaagtaattccccaatatataatgtacaacatggccaatacaagtaaacgtggagtagttatactacaaaacaaatcagatgacctccctcactgggtattatctgccatgaagtgcctagcaaattggccaagaagcaatgatatgaataatccaacttatgttggatttgaacgagatgtattcagaacaatcgcagattattttctagatctccctgaacctctacttacttttgaatattacgaattatttgtaaacattttggttgtttgtggctacatcacagtttcagatagatccagtgggatacataaaattcaagatgatccacagtcttcaaaattccttcacttaaacaatttgaattccttcaaatcaactgagtgccttcttctcagtctgcttcatagagaaaaaaacaaagaagaatcagattctactgagagactacagataagcaatccaggatttcaagaaagatgtgctaagaaaatgcagctagttaatttaagaaacagaagagtgagtgctaatgacataatgggaggaagttgtcataatttaatagggttaagtaatatgcatgatctatcctctaacagcaaaccaaggtgctgttctttggaaggaattgtagatgtgccagggaattcaagtaaagaggcatccagtgtctttcatcaatcttttccgaacatagaaggacaaaataataaactgtttttagagtctaagcccaaacaggaattcctgttgaatcttcattcagaggaaaatattcaaaagccattcagtgctggttttaagagaacctctactttgactgttcaagaccaagaggagttgtgtaatgggaaatgcaagtcaaaacagctttgtaggtctcagagtttgcttttaagaagtagtacaagaaggaatagttatatcaatacaccagtggctgaaattatcatgaaaccaaatgttggacaaggcagcacaagtgtgcaaacagctatggaaagtgaactcggagagtctagtgccacaatcaataaaagactctgcaaaagtacaatagaactttcagaaaattctttacttccagcttcttctatgttgactggcacacaaagcttgctgcaacctcatttagagagggttgccatcgatgctctacagttatgttgtttgttacttcccccaccaaatcgtagaaagcttcaacttttaatgcgtatgatttcccgaatgagtcaaaatgttgatatgcccaaacttcatgatgcaatgggtacgaggtcactgatgatacataccttttctcgatgtgtgttatgctgtgctgaagaagtggatcttgatgagcttcttgctggaagattagtttctttcttaatggatcatcatcaggaaattcttcaagtaccctcttacttacagactgcagtggaaaaacatcttgactacttaaaaaagggacatattgaaaatcctggagatggactatttgctcctttgccaacttactcatactgtaagcagattagtgctcaggagtttgatgagcaaaaagtttctacctctcaagctgcaattgcagaacttttagaaaatattattaaaaacaggagtttacctctaaaggagaaaagaaaaaaactaaaacagtttcagaaggaatatcctttgatatatcagaaaagatttccaaccacggagagtgaagcagcactttttggtgacaaacctacaatcaagcaaccaatgctgattttaagaaaaccaaagttccgtagtctaagataactaactgaattaaaaattatgtaatacttgtggaactttgataaatgaagccatatctgagaatgtagctactcaaaaggaagtctgtcattaataaggtatttctaaataaacacattatgtaaggaagtgccaaaatagttatcaatgtgagactcttaggaaactaactagatctcaattgagagcacataacaatagatgataccaaatactttttgtttttaacacagctatccagtaaggctatcatgatgtgtgctaaaattttatttacttgaattttgaaaactgagctgtgttagggattaaactataattctgttcttaaaagaaaatttatctgcaaatgtgcaagttctgagatattagctaatgaattagttgtttggggttacttctttgtttctaagtataagaatgtgaagaatatttgaaaactcaatgaaataattctcagctgccaaatgttgcactcttttatatattctttttccacttttgatctatttatatatatgtatgtgtttttaaaatatgtgtatattttatcagatttggttttgccttaaatattatccccaattgcttcagtcattcatttgttcagtatatatattttgaattctagttttcataatctattagaagatggggatataaaagaagtataaggcaatcatatattcattcaaaagatatttatttagcaactgctatgtgcctttcgttgttccagatatgcagagacaatgataaataaaacatataatctcttccataaggtatttattttttaatcaagggagatacacctatcagatgtttaaaataacaacactacccactgaaatcagggcatatagaatcattcagctaaagagtgacttctatgatgatggaacaggtctctaagctagtggttttcaaactggtacacattagactcacccgaggaattttaaaacagcctatatgcccagggcctaacttacactaattaaatctgaattttggggatgttgtatagggattagtattttttttaatctaggtgattccaatattcagccaactgtgagaatcaatggcctaaatgctttttataaacatttttataagtgtcaagataatggcacattgactttattttttcattggaagaaaatgcctgccaagtataaatgactctcatcttaaaacaaggttcttcaggtttctgcttgattgacttggtacaaacttgaagcaagttgccttctaatttttactccaagattgtttcatatctattccttaagtgtaaagaaatatataatgcatggtttgtaataaaatcttaatgtttaatgactgttctcatttctcaatgtaatttcatactgtttctctataaaatgatagtattccatttaacattactgatttttattaaaaacctggacagaaaattataaattataaatatgactttatcctggctataaaattattgaaccaaaatgaattctttctaaggcatttgaatactaaaacgtttattgtttatagatatgtaaaatgtggattatgttgcaaattgagattaaaattatttggggttttgtaacaatataattttgcttttgtattatagacaaatatataaataataaaggcaggcaactttcatttgcactaatgtacatgcaattgagattacaaaatacatggtacaatgctttaataacaaactctgccagtcaggtttgaatcctactgtgctattaactagctagtaaactcagacaagttacttaacttctctaagccccagttttgttatctataaaatgaatattataatagtacctctttttaggattgcgaggattaagcaggataatgcatgtaaagtgttagcacagtgtctcacatagaataagcactctataaatattttactagaatcacctaggattatagcactagaagagatcttagcaaaaatgtggtcctttctgttgctttggacagacatgaaccaaaacaaaattacggacaattgatgagccttattaactatcttttcattatgagacaaaggttctgattatgcctactggttgaaattttttaatctagtcaagaaggaaaatttgatgaggaaggaaggaatggatatcttcagaagggcttcgcctaagctggaacatggatagattccattctaacataaagatctttaagttcaaatatagatgagttgactggtagatttggtggtagttgctttctcgggatataagaagcaaaatcaactgctacaagtaaagaggggatggggaaggtgttgcacatttaaagagagaaagtgtgaaaaagcctaattgtgggaatgcacaggtttcaccagatcagatgatgtctggttattctgtaaattatagttcttatcccagaaattactgcctccaccatccctaatatcttctaattggtatcatataatgacccactcttcttatgttatccaaacagttatgtggcatttagtaatggaatgtacatggaatttcccactgacttacctttctgtccttgggaagcttaaactctgaatcttctcatctgtaaaatgtgaattaaagtatctacctaactgagttgtgattgtagtgaaagaaaggcaatatatttaaatcttgaatttagcaagcccacgcttgatttttatgtcctttcctcttgccttgtattgagtttaagatctctactgattaaaactcttttgctatcaa

SEQ ID NO: 8180 - DNA, 2499 bp, Homo sapiens
  source 1..2499: mol_type = unassigned DNA
aaactgctgctcctccggctggcggggatcagcgctggcgcggctgcggccgctgctgcctacgcgccatggagcatcgcatcgtggggcccgggccgtaccgagctaccaggctgtggaatgagaccgtggagctttttcgtgctaagatgccgttacggaaacatcgctgtcgtttcaagagctatgagcattgtttcacagcggccgaagctgtggattggctgcatgagctgctgaggtgcagtcaaaacttcggccctgaagtgacccgcaaacaaacggtccagctgctaaaaaaattcctgaagaatcacgttattgaagacatcaagggaaaatggggtgaggaagattttgaagacaatcgtcacttatacagatttcctccttcttcacccctgaaaccatatccaaagaagcccccaaaccaaaaggatgttattaaatttccagaatggaatgatctcccaccaggcacttcacaagagaacatcccagtgaggccagttgtgatgaattctgagatgtggtacaagcgtcacagtattgcaattggagaggtgccagcttgccgtcttgtccaccgcagacagctgacagaggccaatgtagaagagatatggaagtctatgacattatcatacttacagaaaattcttggcctggattccttagaagaagttttagacgtcaaacttgtcaattcgaagttcatcatccataatgtatatagtgttagcaagcagggagttgttattcttgatgacaagtcaaaagaacttcctcattgggtgctgtcagctatgaagtgtttggcaaattggcccaactgttctgatttgaagcagcctatgtacttgggatttgaaaaagatgtctttaaaaccatagctgattactatggtcacttgaaagagcctctacttacatttcatctttttgatgcttttgtcagtgtactgggtttgttacagaaggagaaagtggcagttgaagcatttcagatttgctgccttctcctacctcctgaaaataggagaaagttacagctattgatgaggatgatggcaaggatttgcttaaacaaagagatgccacccctgtgtgatggctttggtacccgaacactgatggttcagacattttcccgttgcatcttgtgttccaaggatgaagtggacttggatgagttattagctgctagattggtaacgtttctgatggacaattaccaggaaattctgaaagtccctttggccttgcagacctctatagaggagcgtgtggctcatctacgaagagtccagataaaatacccaggagctgatatggatatcactttatctgctccatcattttgccgtcaaattagtccagaggaatttgaatatcaaagatcatatggctctcaggaacctctggcagccttgttggaggaagtcataacagatgccaaactctccaacaaagagaaaaagaagaaactgaagcagtttcagaaatcctatcctgaagtctatcaagaacgatttcctacaccagaaagtgcagcacttctgtttcctgaaaaacccaaaccgaaaccacagctgctaatgtgggcactaaagaagcctttccaaccatttcaaagaactagaagttttcgaatgtaataatacttccacagcaacaggtgctagagaccactgttgttgttttgagtgaatggtggttaggagaaagactttggtggtggaagaaagaaaagcataaaacaaagactactgaaatatagataaagattgccttagtttttaaaaatgtttggccattagtatttttataaaactcaatgctagttttaaagtgtataaattggttaaaatttatgagtcaaatatatagtgataatgttaacatgtttgtaattgctacagaatttaagggtatttttatctctgtgctttctttttcatggtgtttattaaataattgtgtatatacatcctagctactgatatctttattatagccttaagacttaattttaagtcttaaaaatagcgtgtatacttgaataagaaagacactgggtactgttactgtgatgctattgacttagtagccaattatcatttctcctgtataaattccagtttttattgctgcacataaattttttaatgtcttatattgtgatagctatgtcttttattgcagatttattggatgttatgacagattttactaaagctagtgtttttataacatatatattagttgatgtttacctataagtggagtagattttcatctgcctgcaatggtataatttcagtcttagctaaaaatggaaagttgaactggataaattctttgggtacccttagacctctgattctaagtcaaatgcaaatgggttaaataaaatgagactacttcctttataaatatattttcatccttttgaaagtaagtgaaatgtaaataaacttattttttttaaaaatgcca

SEQ ID NO: 8181 - DNA, 1569 bp, Homo sapiens
  source 1..1569: mol_type = unassigned DNA
atcagcgctggcgcggctgcggccgctgctgcctacgcgccatggagcatcgcatcgtggggcccgggccgtaccgagctaccaggctgtggaatgagaccgtggagctttttcgtgctaagatgccgttacggaaacatcgctgtcgtttcaagagctatgagcattgtttcacagcggccgaagctgtggattggctgcatgagctgctgaggtgcagtcaaaacttcggccctgaagtgacccgcaaacaaacggtccagctgctaaaaaaattcctgaagaatcacgttattgaagacatcaagggaaaatggggtgaggaagattttgaagacaatcgtcacttatacagatttcctccttcttcacccctgaaaccatatccaaagaagcccccaaaccaaaaggatgttattaaatttccagaatggaatgatctcccaccaggcacttcacaagagaacatcccagtgaggccagttgtgatgaattctgagatgtggtacaagcgtcacagtattgcaattggagaggtgccagcttgccgtcttgtccaccgcagacagctgacagaggccaatgtagaagagatatggaagtctatgacattatcatacttacagaaaattcttggcctggattccttagaagaagttttagacgtcaaacttgtcaattcgaagttcatcatccataatgtatatagtgttagcaagcagggagttgttattcttgatgacaagtcaaaagaacttcctcattgggtgctgtcagctatgaagtgtttggcaaattggcccaactgttctgatttgaagcagcctatgtacttgggatttgaaaaagatgtctttaaaaccatagctgattactatggtcacttgaaagagcctctacttacatttcatctttttgatgcttttgtcagtgtactgggtttgttacagaaggagaaagtggcagttgaagcatttcagatttgctgccttctcctacctcctgaaaataggagaaagttacagctattgatgaggatgatggcaaggatttgcttaaacaaagagatgccacccctgtgtgatggctttggtacccgaacactgatggttcagacattttcccgttgcatcttgtgttccaaggatgaagtggacttggatgagttattagctgctagattggtaacgtttctgatggacaattaccaggaaattctgaaagtccctttggccttgcagacctctatagaggagcgtgtggctcatctacgaagagtccagtttcagaaatcctatcctgaagtctatcaagaacgatttcctacaccagaaagtgcagcacttctgtttcctgaaaaacccaaaccgaaaccacagctgctaatgtgggcactaaagaagcctttccaaccatttcaaagaactagaagttttcgaatgtaataatacttccacagcaacaggtgctagagaccactgttgttgttttgagtgaatggtggttaggagaaagactttggtggtggaagaaagaaaagcataaaacaaagactactgaaatatagat

SEQ ID NO: 8182 - DNA, 1596 bp, Homo sapiens
  source 1..1596: mol_type = unassigned DNA
atcagcgctggcgcggctgcggccgctgctgcctacgcgccatggagcatcgcatcgtggggcccgggccgtaccgagctaccaggctgggattgattctgttatcctgaagtggtccagtgtttcttatacttgaagattaggatcattgtgtgtggaatgagaccgtggagctttttcgtgctaagatgccgttacggaaacatcgctgtcgtttcaagagctatgagcattgtttcacagcggccgaagctgtggattggctgcatgagctgctgaggtgcagtcaaaacttcggccctgaagtgacccgcaaacaaacggtccagctgctaaaaaaattcctgaagaatcacgttattgaagacatcaagggaaaatggggtgaggaagattttgaagacaatcgtcacttatacagatttcctccttcttcacccctgaaaccatatccaaagaagcccccaaaccaaaaggatgttattaaatttccagaatggaatgatctcccaccaggcacttcacaagagaacatcccagtgaggccagttgtgatgaattctgagatgtggtacaagcgtcacagtattgcaattggagaggtgccagcttgccgtcttgtccaccgcagacagctgacagaggccaatgtagaagagatatggaagtctatgacattatcatacttacagaaaattcttggcctggattccttagaagaagttttagacgtcaaacttgtcaattcgaagttcatcatccataatgtatatagtgttagcaagcagggagttgttattcttgatgacaagtcaaaagaacttcctcattgggtgctgtcagctatgaagtgtttggcaaattggcccaactgttctgatttgaagcagcctatgtacttgggatttgaaaaagatgtctttaaaaccatagctgattactatggtcacttgaaagagcctctacttacatttcatctttttgatgcttttgtcagtgtactgggtttgttacagaaggagaaagtggcagttgaagcatttcagatttgctgccttctcctacctcctgaaaataggagaaagttacagctattgatgaggatgatggcaaggatttgcttaaacaaagagatgccacccctgtgtgatggctttggtacccgaacactgatggttcagacattttcccgttgcatcttgtgttccaaggatgaagtggacttggatgagttattagctgctagattggtaacgtttctgatggacaattaccaggaaattctgaaagtccctttggccttgcagacctctatagaggagcgtgtggctcatctacgaagagtccagtttcagaaatcctatcctgaagtctatcaagaacgatttcctacaccagaaagtgcagcacttctgtttcctgaaaaacccaaaccgaaaccacagctgctaatgtgggcactaaagaagcctttccaaccatttcaaagaactagaagttttcgaatgtaataatacttccacagcaacaggtgctagagaccactgttgttgttttgagtgaatggtggttaggagaaagactttggtggtggaa

SEQ ID NO: 8183 - DNA, 5405 bp, Homo sapiens
  source 1..5405: mol_type = unassigned DNA
atctggaggaggcgcagggaacctggagagggtccagccctcagtgccccggccagaggcgggaaggggctctagagcttcgggaggcaagatgacttctctgccccaagcttggaacagctaaagggaaaaacagtgcaagatgagaacaacaaaggtctacaaactcgtcatccacaagaagggctttgggggcagtgatgatgagctagttgtgaaccccaaagtgttccctcacatcaagcttggagacattgtagagattgcacaccccaacgatgaatacagccctctgcttttgcaggtcaagtctcttaaggaagatttacagaaggaaactatcagtgtggaccagactgtgactcaagtgttccggctgagaccttatcaggatgtctatgttaatgtcgtagaccctaaggatgtgacccttgacctagtggaattaacttttaaggatcagtatattggccgtggggatatgtggcgactaaagaaaagtttggtcagcacatgtgcctatatcacccagaaggtggagtttgctggcatcagagcacaggctggtgaactgtgggttaagaatgagaaggtcatgtgtggctacatcagtgaagataccagggtggtgtttcgttctacgtcggctatggtttacatatttattcagatgagctgtgaaatgtgggattttgatatttatggggatttgtattttgagaaagctgtgaatggtttccttgctgatctatttaccaagtggaaggagaagaactgtagtcatgaagtgacagtggtcctgttttctagaactttctatgatgcaaaatctgttgatgaatttcctgaaataaaccgagcctcaattcgacaggatcacaaggggagattctatgaagacttttacaaagtggtggtgcagaatgagagaagagaagaatggacttcacttctcgtaaccattaaaaaactcttcatccagtatccagtgttggtgcgactggaacaggcagagggctttcctcaaggagataattctacctcagcacaaggaaactacctggaggccatcaatctgtcattcaatgtgtttgataagcactacatcaaccgcaactttgaccgaactgggcagatgtcagtggtgatcacgcccggggtgggtgtctttgaagtggaccgcctactcatgatcctgaccaagcagcggatgatagataatggaattggtgtggatttggtgtgcatgggagagcaaccgttacatgctgtcccattgttcaagctccataatcggagtgctccccgtgattctcgtctgggcgatgactataatatccctcactggataaaccacagtttctacacatccaaaagccagctcttttgtaatagtttcaccccacgaataaaactggcaggaaagaagcccgcctctgagaaagcaaaaaatggccgtgatacatctctcgggagtccaaaagaatctgagaacgcccttcccatccaagtagattatgacgcctatgacgctcaagtgttcaggctgcccggcccatcccgggcccagtgcctcaccacctgcagatctgtgcgagagcgagagagtcacagtcgaaagagtgccagctcctgtgatgtttcatccagcccttccctaccaagccgcacactgcccactgaggaagtgaggagccaggcttctgacgacagctccctaggcaagagtgccaacatcctgatgatcccacacccccacctgcaccagtatgaagtcagcagctccttgggatacaccagcactcgagatgtcctggagaacatgatggagccaccacagcgagactccagtgcaccagggaggtttcacgttggcagtgcagaatccatgctgcatgttcgacctggtggatacacgccccagagagcactgattaaccccttcgctccctctcggatgcccatgaagcttacgtccaacagaaggcgctggatgcacacttttcctgtggggccatccggagaagccatccagatccaccaccagacccgacagaatatggcggagctacaaggcagcgggcagagggatccaactcactcctctgcagagctgctggagttagcatatcatgaagctgctggaaggcacagcaattcccgccagcctggtgacggcatgtccttcttgaacttcagtggaacagaggagctttctgtcggcctgcttagcaacagtggtgcaggtatgaatcctaggacccagaataaggattctctagaggacagtgtttctacctctccagacccaattctgacactgtctgctccccctgtagtgccaggcttctgttgcacagttggagtggactggaagtctctcactactccggcgtgcctcccccttaccaccgactacttccctgaccgccagggcctgcagaatgactacacagagggctgttatgatctccttccagaagcagacatcgacaggagggacgaagatggtgtgcagatgacagcccagcaggtatttgaagagtttatttgccaacgtctcatgcagggctaccaaatcatagtgcagcccaagacacagaaacccaatcctgctgtcccgcccccgctgagcagtagcccactctatagccgaggccttgtgtcccgaaaccgccctgaggaggaggaccagtattggctgagtatgggcagaacgttccacaaagtgacgctgaaggataagatgatcacagtgacgcgataccttcccaagtatccttatgaatctgcccagatccactacacctacagcctctgtccttcccactcagactcagagttcgtctcctgctgggtggaattctcccacgaacggctggaggagtacaagtggaattacttagatcagtatatctgttctgccggctctgaagacttcagcttaattgagtccctgaagttctggaggacccgcttcctgctgctgccagcctgtgtcaccgccaccaagcgcatcacggagggggaggcccactgcgacatctatggggacaggccccgtgcagacgaggacgagtggcaactcctggatggttttgtccgctttgtggagggcttgaatcgcattcgcaggcggcatcgctcggatcgcatgatgcggaaagggaccgccatgaaaggcttgcagatgactgggcccatttccacgcattctctggagtcaactgcacccccagtggggaagaagggaacctcagctctctctgccctgttggagatggaggccagtcagaagtgcctgggagaacagcaggcagctgtgcatggtgggaagagctccgcccagtcagccgagagcagcagcgttgccatgactcccacctacatggacagcccacgaaaggtatctgtggaccaaacagccactcctatgttggacggcaccagtttgggcatatgcacaggccaatccatggacagaggcaacagccagacctttgggaactcccagaacataggagaacagggctactcctccacaaactccagtgacagcagctctcagcagctggtggcaagctccttgacctcatcctctaccctgacagagatcctggaagccatgaagcacccctcgacaggagtccagctgctctctgaacagaagggcctctcaccgtactgcttcatcagcgcggaggtggtacactggttggtgaaccacgtggaggggatccagacacaggcgatggccattgacatcatgcagaaaatgctggaagagcagctcatcacacatgcatctggcgaagcctggcggaccttcatctacggcttctatttctacaagatagtaacggacaaagagcccgaccgagtggccatgcagcagcccgccaccacctggcacacagcaggagtggacgacttcgccagcttccagcgcaagtggtttgaggtggcctttgtggcagaagagctcgtgcactctgagattcctgcctttctcctgccctggctgcctagccggccagcctcctatgcaagtaggcacagctcctttagccgaagttttggaggacggagccaggcggcagcacttttagctgccactgtcccagagcagaggactgtgaccctggatgttgacgtgaacaaccgcacagaccggctggagtggtgcagctgttattaccatggcaacttttctctgaatgcagcctttgagatcaagctgcactggatggcggtgaccgcagcagtactcttcgagatggtccaaggttggcatcggaaagccacctcctgtggcttcttgttagtcccagttttggaggggccttttgcactgcccagttacctgtatggcgacccccttcgtgcccagctcttcatcccactcaacatcagctgcttgctcaaggagggcagcgagcacctgtttgatagctttgaacccgaaacgtactgggatcgaatgcacctcttccaggaagccattgcacacaggtttgggtttgtacaagataaatattctgcctctgcttttaacttccctgctgagaacaagcctcagtatatccacgttacaggaacagtgtttctgcagctgccctactccaagcgcaagttctcagggcagcagcggcggcggcggaactccaccagctccaccaaccagaacatgttctgcgaggagcgggtcggctacaactgggcctacaacaccatgctcaccaaaacatggcgctccagcgccacaggggatgaaaagtttgctgatcggctgctgaaggacttcacggacttctgcatcaaccgtgacaaccggctggtcacgttctggacaagttgcctggagaagatgcatgccagtgccccgtgaggccaggctgcacctgtgctgggggaaggtgggtgagccactgccctcaaacccggggcggaggattccaggcaggctctaggagtcaggtgtccgtttgctgctatcagtgagtgggggccattgttttttgtttgtttgtttgtttgtttgtttgtttttggcccccacgacaagtcttctactctagaagaaagactttggaagcagctgctgctgctgccaccactcctgtcagcaagtgctcagagcaggtgggaggcacagattgtccgtgggagggctccagtgtctgggaagagggcaggcggcccccatgaatgtcctcggaagggggtggctcctggtagcatccttttccttcaccatctatgggatattaggggcagaatctgccacttcttgcccaggagtgtgcacagatgtaagataattttgtgaaataatgtaccatagactctcaccaactgtatatacctgtacatatcagaagcaaataaagagctccacgtgcatc

SEQ ID NO: 8184 - DNA, 5128 bp, Homo sapiens
  source 1..5128: mol_type = unassigned DNA
atctggaggaggcgcagggaacctggagagggtccagccctcagtgccccggccagaggcgggaaggggctctagagcttcgggaggcaagatgacttctctgccccaagcttggaacagctaaagggaaaaacagtgcaagatgagaacaacaaaggtctacaaactcgtcatccacaagaagggctttgggggcagtgatgatgagctagttgtgaaccccaaagtgttccctcacatcaagcttggagacattgtagagattgcacaccccaacgatgaatacagccctctgcttttgcaggtcaagtctcttaaggaagatttacagaaggaaactatcagtgtggaccagactgtgactcaagtgttccggctgagaccttatcaggatgtctatgttaatgtcgtagaccctaaggatgtgacccttgacctagtggaattaacttttaaggatcagtatattggccgtggggatatgtggcgactaaagaaaagtttggtcagcacatgtgcctatatcacccagaaggtggagtttgctggcatcagagcacaggctggtgaactgtgggttaagaatgagaaggtcatgtgtggctacatcagtgaagataccagggtggtgtttcgttctacgtcggctatggtttacatatttattcagatgagctgtgaaatgtgggattttgatatttatggggatttgtattttgagaaagctgtgaatggtttccttgctgatctatttaccaagtggaaggagaagaactgtagtcatgaagtgacagtggtcctgttttctagaactttctatgatgcaaaatctgttgatgaatttcctgaaataaaccgagcctcaattcgacaggatcacaaggggagattctatgaagacttttacaaagtggtggtgcagaatgagagaagagaagaatggacttcacttctcgtaaccattaaaaaactcttcatccagtatccagtgttggtgcgactggaacaggcagagggctttcctcaaggagataattctacctcagcacaaggaaactacctggaggccatcaatctgtcattcaatgtgtttgataagcactacatcaaccgcaactttgaccgaactgggcagatgtcagtggtgatcacgcccggggtgggtgtctttgaagtggaccgcctactcatgatcctgaccaagcagcggatgatagataatggaattggtgtggatttggtgtgcatgggagagcaaccgttacatgctgtcccattgttcaagctccataatcggagtgctccccgtgattctcgtctgggcgatgactataatatccctcactggataaaccacagtttctacacatccaaaagccagctcttttgtaatagtttcaccccacgaataaaactggcaggaaagaagcccgcctctgagaaagcaaaaaatggccgtgatacatctctcgggagtccaaaagaatctgagaacgcccttcccatccaagtagattatgacgcctatgacgctcaagtgttcaggctgcccggcccatcccgggcccagtgcctcaccacctgcagatctgtgcgagagcgagagagtcacagtcgaaagagtgccagctcctgtgatgtttcatccagcccttccctaccaagccgcacactgcccactgaggaagtgaggagccaggcttctgacgacagctccctaggcaagagtgccaacatcctgatgatcccacacccccacctgcaccagtatgaagtcagcagctccttgggatacaccagcactcgagatgtcctggagaacatgatggagccaccacagcgagactccagtgcaccagggaggtttcacgttggcagtgcagaatccatgctgcatgttcgacctggtggatacacgccccagagagcactgattaaccccttcgctccctctcggatgcccatgaagcttacgtccaacagaaggcgctggatgcacacttttcctgtgggtatgaatcctaggacccagaataaggattctctagaggacagtgtttctacctctccagacccaattctgacactgtctgctccccctgtagtgccaggcttctgttgcacagttggagtggactggaagtctctcactactccggcgtgcctcccccttaccaccgactacttccctgaccgccagggcctgcagaatgactacacagagggctgttatgatctccttccagaagcagacatcgacaggagggacgaagatggtgtgcagatgacagcccagcaggtatttgaagagtttatttgccaacgtctcatgcagggctaccaaatcatagtgcagcccaagacacagaaacccaatcctgctgtcccgcccccgctgagcagtagcccactctatagccgaggccttgtgtcccgaaaccgccctgaggaggaggaccagtattggctgagtatgggcagaacgttccacaaagtgacgctgaaggataagatgatcacagtgacgcgataccttcccaagtatccttatgaatctgcccagatccactacacctacagcctctgtccttcccactcagactcagagttcgtctcctgctgggtggaattctcccacgaacggctggaggagtacaagtggaattacttagatcagtatatctgttctgccggctctgaagacttcagcttaattgagtccctgaagttctggaggacccgcttcctgctgctgccagcctgtgtcaccgccaccaagcgcatcacggagggggaggcccactgcgacatctatggggacaggccccgtgcagacgaggacgagtggcaactcctggatggttttgtccgctttgtggagggcttgaatcgcattcgcaggcggcatcgctcggatcgcatgatgcggaaagggaccgccatgaaaggcttgcagatgactgggcccatttccacgcattctctggagtcaactgcacccccagtggggaagaagggaacctcagctctctctgccctgttggagatggaggccagtcagaagtgcctgggagaacagcaggcagctgtgcatggtgggaagagctccgcccagtcagccgagagcagcagcgttgccatgactcccacctacatggacagcccacgaaaggacggggccttctttatggagtttgtccgcagcccacgcacagcatcgtccgccttctaccctcaggtatctgtggaccaaacagccactcctatgttggacggcaccagtttgggcatatgcacaggccaatccatggacagaggcaacagccagacctttgggaactcccagaacataggagaacagggctactcctccacaaactccagtgacagcagctctcagcagctggtggcaagctccttgacctcatcctctaccctgacagagatcctggaagccatgaagcacccctcgacaggagtccagctgctctctgaacagaagggcctctcaccgtactgcttcatcagcgcggaggtggtacactggttggtgaaccacgtggaggggatccagacacaggcgatggccattgacatcatgcagtggccatgcagcagcccgccaccacctggcacacagcaggagtggacgacttcgccagcttccagcgcaagtggtttgaggtggcctttgtggcagaagagctcgtgcactctgagattcctgcctttctcctgccctggctgcctagccggccagcctcctatgcaagtaggcacagctcctttagccgaagttttggaggacggagccaggcggcagcacttttagctgccactgtcccagagcagaggactgtgaccctggatgttgacgtgaacaaccgcacagaccggctggagtggtgcagctgttattaccatggcaacttttctctgaatgcagcctttgagatcaagctgcactggatggcggtgaccgcagcagtactcttcgagatggtccaaggttggcatcggaaagccacctcctgtggcttcttgttagtcccagttttggaggggccttttgcactgcccagttacctgtatggcgacccccttcgtgcccagctcttcatcccactcaacatcagctgcttgctcaaggagggcagcgagcacctgtttgatagctttgaacccgaaacgtactgggatcgaatgcacctcttccaggaagccattgcacacaggtttgggtttgtacaagataaatattctgcctctgcttttaacttccctgctgagaacaagcctcagtatatccacgttacaggaacagtgtttctgcagctgccctactccaagcgcaagttctcagggcagcagcggcggcggcggaactccaccagctccaccaaccagaacatgttctgcgaggagcgggtcggctacaactgggcctacaacaccatgctcaccaaaacatggcgctccagcgccacaggggatgaaaagtttgctgatcggctgctgaaggacttcacggacttctgcatcaaccgtgacaaccggctggtcacgttctggacaagttgcctggagaagatgcatgccagtgccccgtgaggccaggctgcacctgtgctgggggaaggtgggtgagccactgccctcaaacccggggcggaggattccaggcaggctctaggagtcaggtgtccgtttgctgctatcagtgagtgggggccattgttttttgtttgtttgtttgtttgtttgtttgtttttggcccccacgacaagtcttctactctagaagaaagactttggaagcagctgctgctgctgccaccactcctgtcagcaagtgctcagagcaggtgggaggcacagattgtccgtgggagggctccagtgtctgggaagagggcaggcggcccccatgaatgtcctcggaagggggtggctcctggtagcatccttttccttcaccatctatgggatattaggggcagaatctgccacttcttgcccaggagtgtgcacagatgtaagataattttgtgaaataatgtaccatagactctcaccaactgtatatacctgtacatatcagaagcaaataaagagctccacgtgcatc

SEQ ID NO: 8185 - DNA, 5171 bp, Homo sapiens
  source 1..5171: mol_type = unassigned DNA
atctggaggaggcgcagggaacctggagagggtccagccctcagtgccccggccagaggcgggaaggggctctagagcttcgggaggcaagatgacttctctgccccaagcttggaacagctaaagggaaaaacagtgcaagatgagaacaacaaaggtctacaaactcgtcatccacaagaagggctttgggggcagtgatgatgagctagttgtgaaccccaaagtgttccctcacatcaagcttggagacattgtagagattgcacaccccaacgatgaatacagccctctgcttttgcaggtcaagtctcttaaggaagatttacagaaggaaactatcagtgtggaccagactgtgactcaagtgttccggctgagaccttatcaggatgtctatgttaatgtcgtagaccctaaggatgtgacccttgacctagtggaattaacttttaaggatcagtatattggccgtggggatatgtggcgactaaagaaaagtttggtcagcacatgtgcctatatcacccagaaggtggagtttgctggcatcagagcacaggctggtgaactgtgggttaagaatgagaaggtcatgtgtggctacatcagtgaagataccagggtggtgtttcgttctacgtcggctatggtttacatatttattcagatgagctgtgaaatgtgggattttgatatttatggggatttgtattttgagaaagctgtgaatggtttccttgctgatctatttaccaagtggaaggagaagaactgtagtcatgaagtgacagtggtcctgttttctagaactttctatgatgcaaaatctgttgatgaatttcctgaaataaaccgagcctcaattcgacaggatcacaaggggagattctatgaagacttttacaaagtggtggtgcagaatgagagaagagaagaatggacttcacttctcgtaaccattaaaaaactcttcatccagtatccagtgttggtgcgactggaacaggcagagggctttcctcaaggagataattctacctcagcacaaggaaactacctggaggccatcaatctgtcattcaatgtgtttgataagcactacatcaaccgcaactttgaccgaactgggcagatgtcagtggtgatcacgcccggggtgggtgtctttgaagtggaccgcctactcatgatcctgaccaagcagcggatgatagataatggaattggtgtggatttggtgtgcatgggagagcaaccgttacatgctgtcccattgttcaagctccataatcggagtgctccccgtgattctcgtctgggcgatgactataatatccctcactggataaaccacagtttctacacatccaaaagccagctcttttgtaatagtttcaccccacgaataaaactggcaggaaagaagcccgcctctgagaaagcaaaaaatggccgtgatacatctctcgggagtccaaaagaatctgagaacgcccttcccatccaagtagattatgacgcctatgacgctcaagtgttcaggctgcccggcccatcccgggcccagtgcctcaccacctgcagatctgtgcgagagcgagagagtcacagtcgaaagagtgccagctcctgtgatgtttcatccagcccttccctaccaagccgcacactgcccactgaggaagtgaggagccaggcttctgacgacagctccctaggcaagagtgccaacatcctgatgatcccacacccccacctgcaccagtatgaagtcagcagctccttgggatacaccagcactcgagatgtcctggagaacatgatggagccaccacagcgagactccagtgcaccagggaggtttcacgttggcagtgcagaatccatgctgcatgttcgacctggtggatacacgccccagagagcactgattaaccccttcgctccctctcggatgcccatgaagcttacgtccaacagaaggcgctggatgcacacttttcctgtggagacaagctgtttttatctttccataggtatgaatcctaggacccagaataaggattctctagaggacagtgtttctacctctccagacccaatgccaggcttctgttgcacagttggagtggactggaagtctctcactactccggcgtgcctcccccttaccaccgactacttccctgaccgccagggcctgcagaatgactacacagagggctgttatgatctccttccagaagcagacatcgacaggagggacgaagatggtgtgcagatgacagcccagcaggtatttgaagagtttatttgccaacgtctcatgcagggctaccaaatcatagtgcagcccaagacacagaaacccaatcctgctgtcccgcccccgctgagcagtagcccactctatagccgaggccttgtgtcccgaaaccgccctgaggaggaggaccagtattggctgagtatgggcagaacgttccacaaagtgacgctgaaggataagatgatcacagtgacgcgataccttcccaagtatccttatgaatctgcccagatccactacacctacagcctctgtccttcccactcagactcagagttcgtctcctgctgggtggaattctcccacgaacggctggaggagtacaagtggaattacttagatcagtatatctgttctgccggctctgaagacttcagcttaattgagtccctgaagttctggaggacccgcttcctgctgctgccagcctgtgtcaccgccaccaagcgcatcacggagggggaggcccactgcgacatctatggggacaggccccgtgcagacgaggacgagtggcaactcctggatggttttgtccgctttgtggagggcttgaatcgcattcgcaggcggcatcgctcggatcgcatgatgcggaaagggaccgccatgaaaggcttgcagatgactgggcccatttccacgcattctctggagtcaactgcacccccagtggggaagaagggaacctcagctctctctgccctgttggagatggaggccagtcagaagtgcctgggagaacagcaggcagctgtgcatggtgggaagagctccgcccagtcagccgagagcagcagcgttgccatgactcccacctacatggacagcccacgaaaggtatctgtggaccaaacagccactcctatgttggacggcaccagtttgggcatatgcacaggccaatccatggacagaggcaacagccagacctttgggaactcccagaacataggagaacagggctactcctccacaaactccagtgacagcagctctcagcagctggtggcaagctccttgacctcatcctctaccctgacagagatcctggaagccatgaagcacccctcgacaggagtccagctgctctctgaacagaagggcctctcaccgtactgcttcatcagcgcggaggtggtacactggttggtgaaccacgtggaggggatccagacacaggcgatggccattgacatcatgcagaaaatgctggaagagcagctcatcacacatgcatctggcgaagcctggcggaccttcatctacggcttctatttctacaagatagtaacggacaaagagcccgaccgagtggccatgcagcagcccgccaccacctggcacacagcaggagtggacgacttcgccagcttccagcgcaagtggtttgaggtggcctttgtggcagaagagctcgtgcactctgagattcctgcctttctcctgccctggctgcctagccggccagcctcctatgcaagtaggcacagctcctttagccgaagttttggaggacggagccaggcggcagcacttttagctgccactgtcccagagcagaggactgtgaccctggatgttgacgtgaacaaccgcacagaccggctggagtggtgcagctgttattaccatggcaacttttctctgaatgcagcctttgagatcaagctgcactggatggcggtgaccgcagcagtactcttcgagatggtccaaggttggcatcggaaagccacctcctgtggcttcttgttagtcccagttttggaggggccttttgcactgcccagttacctgtatggcgacccccttcgtgcccagctcttcatcccactcaacatcagctgcttgctcaaggagggcagcgagcacctgtttgatagctttgaacccgaaacgtactgggatcgaatgcacctcttccaggaagccattgcacacaggtttgggtttgtacaagataaatattctgcctctgcttttaacttccctgctgagaacaagcctcagtatatccacgttacaggaacagtgtttctgcagctgccctactccaagcgcaagttctcagggcagcagcggcggcggcggaactccaccagctccaccaaccagaacatgttctgcgaggagcgggtcggctacaactgggcctacaacaccatgctcaccaaaacatggcgctccagcgccacaggggatgaaaagtttgctgatcggctgctgaaggacttcacggacttctgcatcaaccgtgacaaccggctggtcacgttctggacaagttgcctggagaagatgcatgccagtgccccgtgaggccaggctgcacctgtgctgggggaaggtgggtgagccactgccctcaaacccggggcggaggattccaggcaggctctaggagtcaggtgtccgtttgctgctatcagtgagtgggggccattgttttttgtttgtttgtttgtttgtttgtttgtttttggcccccacgacaagtcttctactctagaagaaagactttggaagcagctgctgctgctgccaccactcctgtcagcaagtgctcagagcaggtgggaggcacagattgtccgtgggagggctccagtgtctgggaagagggcaggcggcccccatgaatgtcctcggaagggggtggctcctggtagcatccttttccttcaccatctatgggatattaggggcagaatctgccacttcttgcccaggagtgtgcacagatgtaagataattttgtgaaataatgtaccatagactctcaccaactgtatatacctgtacatatcagaagcaaataaagagctccacgtgcatc

SEQ ID NO: 8186 - DNA, 2395 bp, Homo sapiens
  source 1..2395: mol_type = unassigned DNA
ggcgtaggcggggtatctggaggaggcgcagggaacctggagagggtccagccctcagtgccccggccagaggcgggaaggggctctagagcttcgggaggcaagatgacttctctgccccaagcttggaacagctaaagggaaaaacagtgcaagatgagaacaacaaaggtctacaaactcgtcatccacaagaagggctttgggggcagtgatgatgagctagttgtgaaccccaaagtgttccctcacatcaagcttggagacattgtagagattgcacaccccaacgatgaatacagccctctgcttttgcaggtcaagtctcttaaggaagatttacagaaggaaactatcagtgtggaccagactgtgactcaagtgttccggctgagaccttatcaggatgtctatgttaatgtcgtagaccctaaggatgtgacccttgacctagtggaattaacttttaaggatcagtatattggccgtggggatatgtggcgactaaagaaaagtttggtcagcacatgtgcctatatcacccagaaggtggagtttgctggcatcagagcacaggctggtgaactgtgggttaagaatgagaaggtcatgtgtggctacatcagtgaagataccagggtggtgtttcgttctacgtcggctatggtttacatatttattcagatgagctgtgaaatgtgggattttgatatttatggggatttgtattttgagaaagctgtgaatggtttccttgctgatctatttaccaagtggaaggagaagaactgtagtcatgaagtgacagtggtcctgttttctagaactttctatgatgcaaaatctgttgatgaatttcctgaaataaaccgagcctcaattcgacaggatcacaaggggagattctatgaagacttttacaaagtggtggtgcagaatgagagaagagaagaatggacttcacttctcgtaaccattaaaaaactcttcatccagtatccagtgttggtgcgactggaacaggcagagggctttcctcaaggagataattctacctcagcacaaggaaactacctggaggccatcaatctgtcattcaatgtgtttgataagcactacatcaaccgcaactttgaccgaactgggcagatgtcagtggtgatcacgcccggggtgggtgtctttgaagtggaccgcctactcatgatcctgaccaagcagcggatgatagataatggaattggtgtggatttggtgtgcatgggagagcaaccgttacatgctgtcccattgttcaagctccataatcggagtgctccccgtgattctcgtctgggcgatgactataatatccctcactggataaaccacagtttctacacatccaaaagccagctcttttgtaatagtttcaccccacgaataaaactggcaggaaagaagcccgcctctgagaaagcaaaaaatggccgtgatacatctctcgggagtccaaaagaatctgagaacgcccttcccatccaagtagattatgacgcctatgacgctcaagtgttcaggctgcccggcccatcccgggcccagtgcctcaccacctgcagatctgtgcgagagcgagagagtcacagtcgaaagagtgccagctcctgtgatgtttcatccagcccttccctaccaagccgcacactgcccactgaggaagtgaggagccaggcttctgacgacagctccctaggcaagagtgccaacatcctgatgatcccacacccccacctgcaccagtatgaagtcagcagctccttgggatacaccagcactcgagagcacctaggataaagtgcagtgatgcaatcacagctcacctcagtgcggccttgaactcctggactcaatcgatcctcccacctctgcctcccaagtaactgggactatagcatgccaccacacccagctgattatcatatttttttttgtagaggtggggaagtgcagtgatgcaatcacagctcacctcagtgcggccttgaactcctggactcaattgatcctcccacttctgcctcccaagtaactgggactatagcatgccaccacacccagctgattatcatatttttttttgtagaggtggggttttaccattcccaggctggtcttgaactcctggactcgagggatccacccattggcctccaaaagtgctgagattacaggcatgaaccaatgttaccgcaccctgcctctattatactattttttgtttagcctttcttcatccatcatttaactgtatgcctttccatatgttaatggaaagcttttcttaggcctagggtcaaaagggtttatttccttatgatttccatttgtgccatatataaaacaacctctgtct

SEQ ID NO: 8187 - DNA, 5410 bp, Homo sapiens
  source 1..5410: mol_type = unassigned DNA
atctggaggaggcgcagggaacctggagagggtccagccctcagtgccccggccagaggcgggaaggggctctagagcttcgggaggcaagatgacttctctgccccaagcttggaacagctaaagggaaaaacagtgcaagatgagaacaacaaaggtctacaaactcgtcatccacaagaagggctttgggggcagtgatgatgagctagttgtgaaccccaaagtgttccctcacatcaagcttggagacattgtagagattgcacaccccaacgatgaatacagccctctgcttttgcaggtcaagtctcttaaggaagatttacagaaggaaactatcagtgtggaccagactgtgactcaagtgttccggctgagaccttatcaggatgtctatgttaatgtcgtagaccctaaggatgtgacccttgacctagtggaattaacttttaaggatcagtatattggccgtggggatatgtggcgactaaagaaaagtttggtcagcacatgtgcctatatcacccagaaggtggagtttgctggcatcagagcacaggctggtgaactgtgggttaagaatgagaaggtcatgtgtggctacatcagtgaagataccagggtggtgtttcgttctacgtcggctatggtttacatatttattcagatgagctgtgaaatgtgggattttgatatttatggggatttgtattttgagaaagctgtgaatggtttccttgctgatctatttaccaagtggaaggagaagaactgtagtcatgaagtgacagtggtcctgttttctagaactttctatgatgcaaaatctgttgatgaatttcctgaaataaaccgagcctcaattcgacaggatcacaaggggagattctatgaagacttttacaaagtggtggtgcagaatgagagaagagaagaatggacttcacttctcgtaaccattaaaaaactcttcatccagtatccagtgttggtgcgactggaacaggcagagggctttcctcaaggagataattctacctcagcacaaggaaactacctggaggccatcaatctgtcattcaatgtgtttgataagcactacatcaaccgcaactttgaccgaactgggcagatgtcagtggtgatcacgcccggggtgggtgtctttgaagtggaccgcctactcatgatcctgaccaagcagcggatgatagataatggaattggtgtggatttggtgtgcatgggagagcaaccgttacatgctgtcccattgttcaagctccataatcggagtgctccccgtgattctcgtctgggcgatgactataatatccctcactggataaaccacagtttctacacatccaaaagccagctcttttgtaatagtttcaccccacgaataaaactggcaggaaagaagcccgcctctgagaaagcaaaaaatggccgtgatacatctctcgggagtccaaaagaatctgagaacgcccttcccatccaagtagattatgacgcctatgacgctcaagtgttcaggctgcccggcccatcccgggcccagtgcctcaccacctgcagatctgtgcgagagcgagagagtcacagtcgaaagagtgccagctcctgtgatgtttcatccagcccttccctaccaagccgcacactgcccactgaggaagtgaggagccaggcttctgacgacagctccctaggcaagagtgccaacatcctgatgatcccacacccccacctgcaccagtatgaagtcagcagctccttgggatacaccagcactcgagatgtcctggagaacatgatggagccaccacagcgagactccagtgcaccagggaggtttcacgttggcagtgcagaatccatgctgcatgttcgacctggtggatacacgccccagagagcactgattaaccccttcgctccctctcggatgcccatgaagcttacgtccaacagaaggcgctggatgcacacttttcctgtggggccatccggagaagccatccagatccaccaccagacccgacagaatatggcggagctacaaggcagcgggcagagggatccaactcactcctctgcagagctgctggagttagcatatcatgaagctgctggaaggcacagcaattcccgccagcctggtgacggcatgtccttcttgaacttcagtggaacagaggagctttctgtcggcctgcttagcaacagtggtgcaggtatgaatcctaggacccagaataaggattctctagaggacagtgtttctacctctccagacccaattctgacactgtctgctccccctgtagtgccaggcttctgttgcacagttggagtggactggaagtctctcactactccggcgtgcctcccccttaccaccgactacttccctgaccgccagggcctgcagaatgactacacagagggctgttatgatctccttccagaagcagacatcgacaggagggacgaagatggtgtgcagatgacagcccagcaggtatttgaagagtttatttgccaacgtctcatgcagggctaccaaatcatagtgcagcccaagacacagaaacccaatcctgctgtcccgcccccgctgagcagtagcccactctatagccgaggccttgtgtcccgaaaccgccctgaggaggaggaccagtattggctgagtatgggcagaacgttccacaaagtgacgctgaaggataagatgatcacagtgacgcgataccttcccaagtatccttatgaatctgcccagatccactacacctacagcctctgtccttcccactcagactcagagttcgtctcctgctgggtggaattctcccacgaacggctggaggagtacaagtggaattacttagatcagtatatctgttctgccggctctgaagacttcagcttaattgagtccctgaagttctggaggacccgcttcctgctgctgccagcctgtgtcaccgccaccaagcgcatcacggagggggaggcccactgcgacatctatggggacaggccccgtgcagacgaggacgagtggcaactcctggatggttttgtccgctttgtggagggcttgaatcgcattcgcaggcggcatcgctcggatcgcatgatgcggaaagggaccgccatgaaaggcttgcagatgactgggcccatttccacgcattctctggagtcaactgcacccccagtggggaagaagggaacctcagctctctctgccctgttggagatggaggccagtcagaagtgcctgggagaacagcaggcagctgtgcatggtgggaagagctccgcccagtcagccgagagcagcagcgttgccatgactcccacctacatggacagcccacgaaaggacggggccttctttatggagtttgtccgcagcccacgcacagcatcgtccgccttctaccctcaggtatctgtggaccaaacagccactcctatgttggacggcaccagtttgggcatatgcacaggccaatccatggacagaggcaacagccagacctttgggaactcccagaacataggagaacagggctactcctccacaaactccagtgacagcagctctcagcagctggtggcaagctccttgacctcatcctctaccctgacagagatcctggaagccatgaagcacccctcgacaggagtccagctgctctctgaacagaagggcctctcaccgtactgcttcatcagcgcggaggtggtacactggttggtgaaccacgtggaggggatccagacacaggcgatggccattgacatcatgcagaaaatgctggaagagcagctcatcacacatgcatctggcgaagcctggcggaccttcatctacggcttctatttctacaagatagtaacggacaaagagcccgaccgagtggccatgcagcagcccgccaccacctggcacacagcaggagtggacgacttcgccagcttccagcgcaagtggtttgaggtggcctttgtggcagaagagctcgtgcactctgagattcctgcctttctcctgccctggctgcctagccggccagcctcctatgcaagtaggcacagctcctttagccgaagttttggaggacggagccaggcggcagcacttttagctgccactgtcccagagcagaggactgtgaccctggatgttgacgtgaacaaccgcacagaccggctggagtggtgcagctgttattaccatggcaacttttctctgaatgcagcctttgagatcaagctgcactggatggcggtgaccgcagcagtactcttcgagatggtccaaggttggcatcggaaagccacctcctgtggcttcttgttagtcccagttttggaggggccttttgcactgcccagttacctgtatggcgacccccttcgtgcccagctcttcatcccactcaacatcagctgcttgctcaaggagggcagcgagcacctgtttgatagtttgggtttgtacaagataaatattctgcctctgcttttaacttccctgctgagaacaagcctcagtatatccacgttacaggaacagtgtttctgcagctgccctactccaagcgcaagttctcagggcagcagcggcggcggcggaactccaccagctccaccaaccagaacatgttctgcgaggagcgggtcggctacaactgggcctacaacaccatgctcaccaaaacatggcgctccagcgccacaggggatgaaaagtttgctgatcggctgctgaaggacttcacggacttctgcatcaaccgtgacaaccggctggtcacgttctggacaagttgcctggagaagatgcatgccagtgccccgtgaggccaggctgcacctgtgctgggggaaggtgggtgagccactgccctcaaacccggggcggaggattccaggcaggctctaggagtcaggtgtccgtttgctgctatcagtgagtgggggccattgttttttgtttgtttgtttgtttgtttgtttgtttttggcccccacgacaagtcttctactctagaagaaagactttggaagcagctgctgctgctgccaccactcctgtcagcaagtgctcagagcaggtgggaggcacagattgtccgtgggagggctccagtgtctgggaagagggcaggcggcccccatgaatgtcctcggaagggggtggctcctggtagcatccttttccttcaccatctatgggatattaggggcagaatctgccacttcttgcccaggagtgtgcacagatgtaagataattttgtgaaataatgtaccatagactctcaccaactgtatatacctgtacatatcagaagcaaataaagagctccacgtgcatc

SEQ ID NO: 8188 - DNA, 5296 bp, Homo sapiens
  source 1..5296: mol_type = unassigned DNA
gaggcaagatgacttctctgccccaagcttggaacagctaaagggaaaaacagtgcaagatgagaacaacaaaggtctacaaactcgtcatccacaagaagggctttgggggcagtgatgatgagctagttgtgaaccccaaagtgttccctcacatcaagcttggagacattgtagagattgcacaccccaacgatgaatacagccctctgcttttgcaggtcaagtctcttaaggaagatttacagaaggaaactatcagtgtggaccagactgtgactcaagtgttccggctgagaccttatcaggatgtctatgttaatgtcgtagaccctaaggatgtgacccttgacctagtggaattaacttttaaggatcagtatattggccgtggggatatgtggcgactaaagaaaagtttggtcagcacatgtgcctatatcacccagaaggtggagtttgctggcatcagagcacaggctggtgaactgtgggttaagaatgagaaggtcatgtgtggctacatcagtgaagataccagggtggtgtttcgttctacgtcggctatggtttacatatttattcagatgagctgtgaaatgtgggattttgatatttatggggatttgtattttgagaaagctgtgaatggtttccttgctgatctatttaccaagtggaaggagaagaactgtagtcatgaagtgacagtggtcctgttttctagaactttctatgatgcaaaatctgttgatgaatttcctgaaataaaccgagcctcaattcgacaggatcacaaggggagattctatgaagacttttacaaagtggtggtgcagaatgagagaagagaagaatggacttcacttctcgtaaccattaaaaaactcttcatccagtatccagtgttggtgcgactggaacaggcagagggctttcctcaaggagataattctacctcagcacaaggaaactacctggaggccatcaatctgtcattcaatgtgtttgataagcactacatcaaccgcaactttgaccgaactgggcagatgtcagtggtgatcacgcccggggtgggtgtctttgaagtggaccgcctactcatgatcctgaccaagcagcggatgatagataatggaattggtgtggatttggtgtgcatgggagagcaaccgttacatgctgtcccattgttcaagctccataatcggagtgctccccgtgattctcgtctgggcgatgactataatatccctcactggataaaccacagtttctacacatccaaaagccagctcttttgtaatagtttcaccccacgaataaaactggcaggaaagaagcccgcctctgagaaagcaaaaaatggccgtgatacatctctcgggagtccaaaagaatctgagaacgcccttcccatccaagtagattatgacgcctatgacgctcaagtgttcaggctgcccggcccatcccgggcccagtgcctcaccacctgcagatctgtgcgagagcgagagagtcacagtcgaaagagtgccagctcctgtgatgtttcatccagcccttccctaccaagccgcacactgcccactgaggaagtgaggagccaggcttctgacgacagctccctaggcaagagtgccaacatcctgatgatcccacacccccacctgcaccagtatgaagtcagcagctccttgggatacaccagcactcgagatgtcctggagaacatgatggagccaccacagcgagactccagtgcaccagggaggtttcacgttggcagtgcagaatccatgctgcatgttcgacctggtggatacacgccccagagagcactgattaaccccttcgctccctctcggatgcccatgaagcttacgtccaacagaaggcgctggatgcacacttttcctgtggggccatccggagaagccatccagatccaccaccagacccgacagaatatggcggagctacaaggcagcgggcagagggatccaactcactcctctgcagagctgctggagttagcatatcatgaagctgctggaaggcacagcaattcccgccagcctggtgacggcatgtccttcttgaacttcagtggaacagaggagctttctgtcggcctgcttagcaacagtggtgcaggtatgaatcctaggacccagaataaggattctctagaggacagtgtttctacctctccagacccaatgccaggcttctgttgcacagttggagtggactggaagtctctcactactccggcgtgcctcccccttaccaccgactacttccctgaccgccagggcctgcagaatgactacacagagggctgttatgatctccttccagaagcagacatcgacaggagggacgaagatggtgtgcagatgacagcccagcaggtatttgaagagtttatttgccaacgtctcatgcagggctaccaaatcatagtgcagcccaagacacagaaacccaatcctgctgtcccgcccccgctgagcagtagcccactctatagccgaggccttgtgtcccgaaaccgccctgaggaggaggaccagtattggctgagtatgggcagaacgttccacaaagtgacgctgaaggataagatgatcacagtgacgcgataccttcccaagtatccttatgaatctgcccagatccactacacctacagcctctgtccttcccactcagactcagagttcgtctcctgctgggtggaattctcccacgaacggctggaggagtacaagtggaattacttagatcagtatatctgttctgccggctctgaagacttcagcttaattgagtccctgaagttctggaggacccgcttcctgctgctgccagcctgtgtcaccgccaccaagcgcatcacggagggggaggcccactgcgacatctatggggacaggccccgtgcagacgaggacgagtggcaactcctggatggttttgtccgctttgtggagggcttgaatcgcattcgcaggcggcatcgctcggatcgcatgatgcggaaagggaccgccatgaaaggcttgcagatgactgggcccatttccacgcattctctggagtcaactgcacccccagtggggaagaagggaacctcagctctctctgccctgttggagatggaggccagtcagaagtgcctgggagaacagcaggcagctgtgcatggtgggaagagctccgcccagtcagccgagagcagcagcgttgccatgactcccacctacatggacagcccacgaaaggtatctgtggaccaaacagccactcctatgttggacggcaccagtttgggcatatgcacaggccaatccatggacagaggcaacagccagacctttgggaactcccagaacataggagaacagggctactcctccacaaactccagtgacagcagctctcagcagctggtggcaagctccttgacctcatcctctaccctgacagagatcctggaagccatgaagcacccctcgacaggagtccagctgctctctgaacagaagggcctctcaccgtactgcttcatcagcgcggaggtggtacactggttggtgaaccacgtggaggggatccagacacaggcgatggccattgacatcatgcagaaaatgctggaagagcagctcatcacacatgcatctggcgaagcctggcggaccttcatctacggcttctatttctacaagatagtaacggacaaagagcccgaccgagtggccatgcagcagcccgccaccacctggcacacagcaggagtggacgacttcgccagcttccagcgcaagtggtttgaggtggcctttgtggcagaagagctcgtgcactctgagattcctgcctttctcctgccctggctgcctagccggccagcctcctatgcaagtaggcacagctcctttagccgaagttttggaggacggagccaggcggcagcacttttagctgccactgtcccagagcagaggactgtgaccctggatgttgacgtgaacaaccgcacagaccggctggagtggtgcagctgttattaccatggcaacttttctctgaatgcagcctttgagatcaagctgcactggatggcggtgaccgcagcagtactcttcgagatggtccaaggttggcatcggaaagccacctcctgtggcttcttgttagtcccagttttggaggggccttttgcactgcccagttacctgtatggcgacccccttcgtgcccagctcttcatcccactcaacatcagctgcttgctcaaggagggcagcgagcacctgtttgatagctttgaacccgaaacgtactgggatcgaatgcacctcttccaggaagccattgcacacaggtttgggtttgtacaagataaatattctgcctctgcttttaacttccctgctgagaacaagcctcagtatatccacgttacaggaacagtgtttctgcagctgccctactccaagcgcaagttctcagggcagcagcggcggcggcggaactccaccagctccaccaaccagaacatgttctgcgaggagcgggtcggctacaactgggcctacaacaccatgctcaccaaaacatggcgctccagcgccacaggggatgaaaagtttgctgatcggctgctgaaggacttcacggacttctgcatcaaccgtgacaaccggctggtcacgttctggacaagttgcctggagaagatgcatgccagtgccccgtgaggccaggctgcacctgtgctgggggaaggtgggtgagccactgccctcaaacccggggcggaggattccaggcaggctctaggagtcaggtgtccgtttgctgctatcagtgagtgggggccattgttttttgtttgtttgtttgtttgtttgtttgtttttggcccccacgacaagtcttctactctagaagaaagactttggaagcagctgctgctgctgccaccactcctgtcagcaagtgctcagagcaggtgggaggcacagattgtccgtgggagggctccagtgtctgggaagagggcaggcggcccccatgaatgtcctcggaagggggtggctcctggtagcatccttttccttcaccatctatgggatattaggggcagaatctgccacttcttgcccaggagtgtgcacagatgtaagataattttgtgaaataatgtaccatagactctcaccaactgtatatacctgtacatatcagaagcaaataaagagctccacgtgcatca

SEQ ID NO: 8189 - DNA, 5378 bp, Homo sapiens
  source 1..5378: mol_type = unassigned DNA
atctggaggaggcgcagggaacctggagagggtccagccctcagtgccccggccagaggcgggaaggggctctagagcttcgggaggcaagatgacttctctgccccaagcttggaacagctaaagggaaaaacagtgcaagatgagaacaacaaaggtctacaaactcgtcatccacaagaagggctttgggggcagtgatgatgagctagttgtgaaccccaaagtgttccctcacatcaagcttggagacattgtagagattgcacaccccaacgatgaatacagccctctgcttttgcaggtcaagtctcttaaggaagatttacagaaggaaactatcagtgtggaccagactgtgactcaagtgttccggctgagaccttatcaggatgtctatgttaatgtcgtagaccctaaggatgtgacccttgacctagtggaattaacttttaaggatcagtatattggccgtggggatatgtggcgactaaagaaaagtttggtcagcacatgtgcctatatcacccagaaggtggagtttgctggcatcagagcacaggctggtgaactgtgggttaagaatgagaaggtcatgtgtggctacatcagtgaagataccagggtggtgtttcgttctacgtcggctatggtttacatatttattcagatgagctgtgaaatgtgggattttgatatttatggggatttgtattttgagaaagctgtgaatggtttccttgctgatctatttaccaagtggaaggagaagaactgtagtcatgaagtgacagtggtcctgttttctagaactttctatgatgcaaaatctgttgatgaatttcctgaaataaaccgagcctcaattcgacaggatcacaaggggagattctatgaagacttttacaaagtggtggtgcagaatgagagaagagaagaatggacttcacttctcgtaaccattaaaaaactcttcatccagtatccagtgttggtgcgactggaacaggcagagggctttcctcaaggagataattctacctcagcacaaggaaactacctggaggccatcaatctgtcattcaatgtgtttgataagcactacatcaaccgcaactttgaccgaactgggcagatgtcagtggtgatcacgcccggggtgggtgtctttgaagtggaccgcctactcatgatcctgaccaagcagcggatgatagataatggaattggtgtggatttggtgtgcatgggagagcaaccgttacatgctgtcccattgttcaagctccataatcggagtgctccccgtgattctcgtctgggcgatgactataatatccctcactggataaaccacagtttctacacatccaaaagccagctcttttgtaatagtttcaccccacgaataaaactggcaggaaagaagcccgcctctgagaaagcaaaaaatggccgtgatacatctctcgggagtccaaaagaatctgagaacgcccttcccatccaagtagattatgacgcctatgacgctcaagtgttcaggctgcccggcccatcccgggcccagtgcctcaccacctgcagatctgtgcgagagcgagagagtcacagtcgaaagagtgccagctcctgtgatgtttcatccagcccttccctaccaagccgcacactgcccactgaggaagtgaggagccaggcttctgacgacagctccctaggcaagagtgccaacatcctgatgatcccacacccccacctgcaccagtatgaagtcagcagctccttgggatacaccagcactcgagatgtcctggagaacatgatggagccaccacagcgagactccagtgcaccagggaggtttcacgttggcagtgcagaatccatgctgcatgttcgacctggtggatacacgccccagagagcactgattaaccccttcgctccctctcggatgcccatgaagcttacgtccaacagaaggcgctggatgcacacttttcctgtggggccatccggagaagccatccagatccaccaccagacccgacagaatatggcggagctacaaggcagcgggcagagggatccaactcactcctctgcagagctgctggagttagcatatcatgaagctgctggaaggcacagcaattcccgccagcctggtgacggcatgtccttcttgaacttcagtggaacagaggagctttctgtcggcctgcttagcaacagtggtgcaggtatgaatcctaggacccagaataaggattctctagaggacagtgtttctacctctccagacccaatgccaggcttctgttgcacagttggagtggactggaagtctctcactactccggcgtgcctcccccttaccaccgactacttccctgaccgccagggcctgcagaatgactacacagagggctgttatgatctccttccagaagcagacatcgacaggagggacgaagatggtgtgcagatgacagcccagcaggtatttgaagagtttatttgccaacgtctcatgcagggctaccaaatcatagtgcagcccaagacacagaaacccaatcctgctgtcccgcccccgctgagcagtagcccactctatagccgaggccttgtgtcccgaaaccgccctgaggaggaggaccagtattggctgagtatgggcagaacgttccacaaagtgacgctgaaggataagatgatcacagtgacgcgataccttcccaagtatccttatgaatctgcccagatccactacacctacagcctctgtccttcccactcagactcagagttcgtctcctgctgggtggaattctcccacgaacggctggaggagtacaagtggaattacttagatcagtatatctgttctgccggctctgaagacttcagcttaattgagtccctgaagttctggaggacccgcttcctgctgctgccagcctgtgtcaccgccaccaagcgcatcacggagggggaggcccactgcgacatctatggggacaggccccgtgcagacgaggacgagtggcaactcctggatggttttgtccgctttgtggagggcttgaatcgcattcgcaggcggcatcgctcggatcgcatgatgcggaaagggaccgccatgaaaggcttgcagatgactgggcccatttccacgcattctctggagtcaactgcacccccagtggggaagaagggaacctcagctctctctgccctgttggagatggaggccagtcagaagtgcctgggagaacagcaggcagctgtgcatggtgggaagagctccgcccagtcagccgagagcagcagcgttgccatgactcccacctacatggacagcccacgaaaggtatctgtggaccaaacagccactcctatgttggacggcaccagtttgggcatatgcacaggccaatccatggacagaggcaacagccagacctttgggaactcccagaacataggagaacagggctactcctccacaaactccagtgacagcagctctcagcagctggtggcaagctccttgacctcatcctctaccctgacagagatcctggaagccatgaagcacccctcgacaggagtccagctgctctctgaacagaagggcctctcaccgtactgcttcatcagcgcggaggtggtacactggttggtgaaccacgtggaggggatccagacacaggcgatggccattgacatcatgcagaaaatgctggaagagcagctcatcacacatgcatctggcgaagcctggcggaccttcatctacggcttctatttctacaagatagtaacggacaaagagcccgaccgagtggccatgcagcagcccgccaccacctggcacacagcaggagtggacgacttcgccagcttccagcgcaagtggtttgaggtggcctttgtggcagaagagctcgtgcactctgagattcctgcctttctcctgccctggctgcctagccggccagcctcctatgcaagtaggcacagctcctttagccgaagttttggaggacggagccaggcggcagcacttttagctgccactgtcccagagcagaggactgtgaccctggatgttgacgtgaacaaccgcacagaccggctggagtggtgcagctgttattaccatggcaacttttctctgaatgcagcctttgagatcaagctgcactggatggcggtgaccgcagcagtactcttcgagatggtccaaggttggcatcggaaagccacctcctgtggcttcttgttagtcccagttttggaggggccttttgcactgcccagttacctgtatggcgacccccttcgtgcccagctcttcatcccactcaacatcagctgcttgctcaaggagggcagcgagcacctgtttgatagctttgaacccgaaacgtactgggatcgaatgcacctcttccaggaagccattgcacacaggtttgggtttgtacaagataaatattctgcctctgcttttaacttccctgctgagaacaagcctcagtatatccacgttacaggaacagtgtttctgcagctgccctactccaagcgcaagttctcagggcagcagcggcggcggcggaactccaccagctccaccaaccagaacatgttctgcgaggagcgggtcggctacaactgggcctacaacaccatgctcaccaaaacatggcgctccagcgccacaggggatgaaaagtttgctgatcggctgctgaaggacttcacggacttctgcatcaaccgtgacaaccggctggtcacgttctggacaagttgcctggagaagatgcatgccagtgccccgtgaggccaggctgcacctgtgctgggggaaggtgggtgagccactgccctcaaacccggggcggaggattccaggcaggctctaggagtcaggtgtccgtttgctgctatcagtgagtgggggccattgttttttgtttgtttgtttgtttgtttgtttgtttttggcccccacgacaagtcttctactctagaagaaagactttggaagcagctgctgctgctgccaccactcctgtcagcaagtgctcagagcaggtgggaggcacagattgtccgtgggagggctccagtgtctgggaagagggcaggcggcccccatgaatgtcctcggaagggggtggctcctggtagcatccttttccttcaccatctatgggatattaggggcagaatctgccacttcttgcccaggagtgtgcacagatgtaagataattttgtgaaataatgtaccatagactctcaccaactgtatatacctgtacatatcagaagcaaataaagagctccacgtgcatc

SEQ ID NO: 8190 - DNA, 236 bp, Homo sapiens
  source 1..236: mol_type = unassigned DNA
gccccggggcggagccaccggagcggcgcgggttctcagggaggcaagatgacttctctgccccaagcttggaacagctaaagggaaaaacagtgcaagatgagaacaacaaaggtctacaaactcgtcatccacaagaagggctttgggggcagtgatgatgagctagttgtgaaccccaaagtgttccctcacatcaagcttggagacattgtagagattgcacaccccaacga

SEQ ID NO: 8191 - DNA, 4843 bp, Homo sapiens
  source 1..4843: mol_type = unassigned DNA
agcggcgcgggttctcagggaggcaagatgacttctctgccccaagcttggaacagctaaagggaaaaacagtgcaagatgagaacaacaaaggtctacaaactcgtcatccacaagaagggctttgggggcagtgatgatgagctagttgtgaaccccaaagtgttccctcacatcaagcttggagacattgtagagattgcacaccccaacgatgaatacagccctctgcttttgcaggtcaagtctcttaaggaagatttacagaaggaaactatcagtgtggaccagactgtgactcaagtgttccggctgagaccttatcaggatgtctatgttaatgtcgtagaccctaaggatgtgacccttgacctagtggaattaacttttaaggatcagtatattggccgtggggatatgtggcgactaaagaaaagtttggtcagcacatgtgcctatatcacccagaaggtggagtttgctggcatcagagcacaggctggtgaactgtgggttaagaatgagaaggtcatgtgtggctacatcagtgaagataccagggtggtgtttcgttctacgtcggctatggtttacatatttattcagatgagctgtgaaatgtgggattttgatatttatggggatttgtattttgagaaagctgtgaatggtttccttgctgatctatttaccaagtggaaggagaagaactgtagtcatgaagtgacagtggtcctgttttctagaactttctatgatgcaaaatctgttgatgaatttcctgaaataaaccgagcctcaattcgacaggatcacaaggggagattctatgaagacttttacaaagtggtggtgcagaatgagagaagagaagaatggacttcacttctcgtaaccattaaaaaactcttcatccagtatccagtgttggtgcgactggaacaggcagagggctttcctcaaggagataattctacctcagcacaaggaaactacctggaggccatcaatctgtcattcaatgtgtttgataagcactacatcaaccgcaactttgaccgaactgggcagatgtcagtggtgatcacgcccggggtgggtgtctttgaagtggaccgcctactcatgatcctgaccaagcagcggatgatagataatggaattggtgtggatttggtgtgcatgggagagcaaccgttacatgctgtcccattgttcaagctccataatcggagtgctccccgtgattctcgtctgggcgatgactataatatccctcactggataaaccacagtttctacacatccaaaagccagctcttttgtaatagtttcaccccacgaataaaactggcaggaaagaagcccgcctctgagaaagcaaaaaatggccgtgatacatctctcgggagtccaaaagaatctgagaacgcccttcccatccaagtagattatgacgcctatgacgctcaagtgttcaggctgcccggcccatcccgggcccagtgcctcaccacctgcagatctgtgcgagagcgagagagtcacagtcgaaagagtgccagctcctgtgatgtttcatccagcccttccctaccaagccgcacactgcccactgaggaagtgaggagccaggcttctgacgacagctccctaggcaagagtgccaacatcctgatgatcccacacccccacctgcaccagtatgaagtcagcagctccttgggatacaccagcactcgagatgtcctggagaacatgatggagccaccacagcgagactccagtgcaccagggaggtttcacgttggcagtgcagaatccatgctgcatgttcgacctggtggatacacgccccagagagcactgattaaccccttcgctccctctcggatgcccatgaagcttacgtccaacagaaggcgctggatgcacacttttcctgtgggtatgaatcctaggacccagaataaggattctctagaggacagtgtttctacctctccagacccaattctgacactgtctgctccccctgtagtgccaggcttctgttgcacagttggagtggactggaagtctctcactactccggcgtgcctcccccttaccaccgactacttccctgaccgccagggcctgcagaatgactacacagagggctgttatgatctccttccagaagcagacatcgacaggagggacgaagatggtgtgcagatgacagcccagcaggtatttgaagagtttatttgccaacgtctcatgcagggctaccaaatcatagtgcagcccaagacacagaaacccaatcctgctgtcccgcccccgctgagcagtagcccactctatagccgaggccttgtgtcccgaaaccgccctgaggaggaggaccagtattggctgagtatgggcagaacgttccacaaagtgacgctgaaggataagatgatcacagtgacgcgataccttcccaagtatccttatgaatctgcccagatccactacacctacagcctctgtccttcccactcagactcagagttcgtctcctgctgggtggaattctcccacgaacggctggaggagtacaagtggaattacttagatcagtatatctgttctgccggctctgaagacttcagcttaattgagtccctgaagttctggaggacccgcttcctgctgctgccagcctgtgtcaccgccaccaagcgcatcacggagggggaggcccactgcgacatctatggggacaggccccgtgcagacgaggacgagtggcaactcctggatggttttgtccgctttgtggagggcttgaatcgcattcgcaggcggcatcgctcggatcgcatgatgcggaaagggaccgccatgaaaggcttgcagatgactgggcccatttccacgcattctctggagtcaactgcacccccagtggggaagaagggaacctcagctctctctgccctgttggagatggaggccagtcagaagtgcctgggagaacagcaggcagctgtgcatggtgggaagagctccgcccagtcagccgagagcagcagcgttgccatgactcccacctacatggacagcccacgaaaggtatctgtggaccaaacagccactcctatgttggacggcaccagtttgggcatatgcacaggccaatccatggacagaggcaacagccagacctttgggaactcccagaacataggagaacagggctactcctccacaaactccagtgacagcagctctcagcagctggtggcaagctccttgacctcatcctctaccctgacagagatcctggaagccatgaagcacccctcgacaggagtccagctgctctctgaacagaagggcctctcaccgtactgcttcatcagcgcggaggtggtacactggttggtgaaccacgtggaggggatccagacacaggcgatggccattgacatcatgcagaaaatgctggaagagcagctcatcacacatgcatctggcgaagcctggcggaccttcatctacggcttctatttctacaagatagtaacggacaaagagcccgaccgagtggccatgcagcagcccgccaccacctggcacacagcaggagtggacgacttcgccagcttccagcgcaagtggtttgaggtggcctttgtggcagaagagctcgtgcactctgagattcctgcctttctcctgccctggctgcctagccggccagcctcctatgcaagtaggcacagctcctttagccgaagttttggaggacggagccaggcggcagcacttttagctgccactgtcccagagcagaggactgtgaccctggatgttgacgtgaacaaccgcacagaccggctggagtggtgcagctgttattaccatggcaacttttctctgaatgcagcctttgagatcaagctgcactggatggcggtgaccgcagcagtactcttcgagatggtccaaggttggcatcggaaagccacctcctgtggcttcttgttagtcccagttttggaggggccttttgcactgcccagttacctgtatggcgacccccttcgtgcccagctcttcatcccactcaacatcagctgcttgctcaaggagggcagcgagcacctgtttgatagctttgaacccgaaacgtactgggatcgaatgcacctcttccaggaagccattgcacacaggtttgggtttgtacaagataaatattctgcctctgcttttaacttccctgctgagaacaagcctcagtatatccacgttacaggaacagtgtttctgcagctgccctactccaagcgcaagttctcagggcagcagcggcggcggcggaactccaccagctccaccaaccagaacatgttctgcgaggagcgggtcggctacaactgggcctacaacaccatgctcaccaaaacatggcgctccagcgccacaggggatgaaaagtttgctgatcggctgctgaaggacttcacggacttctgcatcaaccgtgacaaccggctggtcacgttctggacaagttgcctggagaagatgcatgccagtgccccgtgaggccaggctgcacctgtgctgggggaaggtgggtgagccactgccctcaaacccggggcggaggattccaggcaggctctaggagtcaggtgtccgtttgctgctatcagtgagtgggggccattgttttttgtttgtttgtttgtttgtttgtttgtttttggcccccacgacaagtcttctactctagaagaaagactttggaagcagctgctgctgctgccaccactcctgtcagcaagtgctcagagca

SEQ ID NO: 8192 - DNA, 2300 bp, Homo sapiens
  source 1..2300: mol_type = unassigned DNA
agcgcgggccgcgcgggcgtaggcggggtatctggaggaggcgcagggaacctggagagggtccagccctcagtgccccggccagaggcgggaaggggctctagagcttcgggaggcaagatgacttctctgccccaagcttggaacagctaaagggaaaaacagtgcaagatgagaacaacaaaggtctacaaactcgtcatccacaagaagggctttgggggcagtgatgatgagctagttgtgaaccccaaagtgttccctcacatcaagcttggagacattgtagagattgcacaccccaacgatgaatacagccctctgcttttgcaggtcaagtctcttaaggaagatttacagaaggaaactatcagtgtggaccagactgtgactcaagtgttccggctgagaccttatcaggatgtctatgttaatgtcgtagaccctaaggtcagcacatgtgcctatatcacccagaaggtggagtttgctggcatcagagcacaggctggtgaactgtgggttaagaatgagaaggtcatgtgtggctacatcagtgaagataccagggtggtgtttcgttctacgtcggctatggtttacatatttattcagatgagctgtgaaatgtgggattttgatatttatggggatttgtattttgagaaagctgtgaatggtttccttgctgatctatttaccaagtggaaggagaagaactgtagtcatgaagtgacagtggtcctgttttctagaactttctatgatgcaaaatctgttgatgaatttcctgaaataaaccgagcctcaattcgacaggatcacaaggggagattctatgaagacttttacaaagtggtggtgcagaatgagagaagagaagaatggacttcacttctcgtaaccattaaaaaactcttcatccagtatccagtgttggtgcgactggaacaggcagagggctttcctcaaggagataattctacctcagcacaaggaaactacctggaggccatcaatctgtcattcaatgtgtttgataagcactacatcaaccgcaactttgaccgaactgggcagatgtcagtggtgatcacgcccggggtgggtgtctttgaagtggaccgcctactcatgatcctgaccaagcagcggatgatagataatggaattggtgtggatttggtgtgcatgggagagcaaccgttacatgctgtcccattgttcaagctccataatcggagtgctccccgtgattctcgtctgggcgatgactataatatccctcactggataaaccacagtttctacacatccaaaagccagctcttttgtaatagtttcaccccacgaataaaactggcaggaaagaagcccgcctctgagaaagcaaaaaatggccgtgatacatctctcgggagtccaaaagaatctgagaacgcccttcccatccaagtagattatgacgcctatgacgctcaagtgttcaggctgcccggcccatcccgggcccagtgcctcaccacctgcagatctgtgcgagagcgagagagtcacagtcgaaagagtgccagctcctgtgatgtttcatccagcccttccctaccaagccgcacactgcccactgaggaagtgaggagccaggcttctgacgacagctccctaggcaagagtgccaacatcctgatgatcccacacccccacctgcaccagtatgaagtcagcagctccttgggatacaccagcactcgagatgtcctggagaacatgatggagccaccacagcgagactccagtgcaccagggaggtttcacgttggcagtgcagaatccatgctgcatgttcgacctggtggatacacgccccagagagcactgattaaccccttcgctccctctcggatgcccatgaagcttacgtccaacagaaggcgctggatgcacacttttcctgtgggtatgaatcctaggacccagaataaggattctctagaggacagtgtttctacctctccagacccaagtaagagggggcagctgactggggaaaggggtagacagggagtgtggggtggtcagagcatgaggaaacaagaggaagccctgtgggaagtgagtggtcctgaggtacacatacctctggggtatgggaaggcgatgtggtgagggaggactctctggactctgtgatggaaagtgagggggtgtgtgactgaatgacctgttttggaaggtgattcaggggcacctgggaaaggtagcagattccctataaggcccccatgctggtccagagctgg

SEQ ID NO: 8193 - DNA, 2052 bp, Homo sapiens
  source 1..2052: mol_type = unassigned DNA
aagaggcagctgaagctggatggagggtgatgatgagatgaaaaggaagggatgaagaacacggcagggtgcctacggtgcctgggagaacagcaggcagctgtgcatggtgggaagagctccgcccagtcagccgagagcagcagcgttgccatgactcccacctacatggacagcccacgaaaggtatctgtggaccaaacagccactcctatgttggacggcaccagtttgggcatatgcacaggccaatccatggacagaggcaacagccagacctttgggaactcccagaacataggagaacagggctactcctccacaaactccagtgacagcaggaagtggagactgttcctaatattcgtgctcttgactgcatacgtgccatcttgctttgctgacctgacaccctgtgttacagctctcagcagctggtggcaagctccttgacctcatcctctaccctgacagagatcctggaagccatgaagcacccctcgacaggagtccagctgctctctgaacagaagggcctctcaccgtactgcttcatcagcgcggaggtggtacactggttggtgaaccacgtggaggggatccagacacaggcgatggccattgacatcatgcagaaaatgctggaagagcagctcatcacacatgcatctggcgaagcctggcggaccttcatctacggcttctatttctacaagatagtaacggacaaagagcccgaccgagtggccatgcagcagcccgccaccacctggcacacagcaggagtggacgacttcgccagcttccagcgcaagtggtttgaggtggcctttgtggcagaagagctcgtgcactctgagattcctgcctttctcctgccctggctgcctagccggccagcctcctatgcaagtaggcacagctcctttagccgaagttttggaggacggagccaggcggcagcacttttagctgccactgtcccagagcagaggactgtgaccctggatgttgacgtgaacaaccgcacagaccggctggagtggtgcagctgttattaccatggcaacttttctctgaatgcagcctttgagatcaagctgcactggatggcggtgaccgcagcagtactcttcgagatggtccaaggttggcatcggaaagccacctcctgtggcttcttgttagtcccagttttggaggggccttttgcactgcccagttacctgtatggcgacccccttcgtgcccagctcttcatcccactcaacatcagctgcttgctcaaggagggcagcgagcacctgtttgatagctttgaacccgaaacgtactgggatcgaatgcacctcttccaggaagccattgcacacaggtttgggtttgtacaagataaatattctgcctctgcttttaacttccctgctgagaacaagcctcagtatatccacgttacaggaacagtgtttctgcagctgccctactccaagcgcaagttctcagggcagcagcggcggcggcggaactccaccagctccaccaaccagaacatgttctgcgaggagcgggtcggctacaactgggcctacaacaccatgctcaccaaaacatggcgctccagcgccacaggggatgaaaagtttgctgatcggctgctgaaggacttcacggacttctgcatcaaccgtgacaaccggctggtcacgttctggacaagttgcctggagaagatgcatgccagtgccccgtgaggccaggctgcacctgtgctgggggaaggtgggtgagccactgccctcaaacccggggcggaggattccaggcaggctctaggagtcaggtgtccgtttgctgctatcagtgagtgggggccattgttttttgtttgtttgtttgtttgtttgtttgtttttggcccccacgacaagtcttctactctagaagaaagactttggaagcagctgctgctgctgccaccactcctgtcagcaagtgctcagagcaggtgggaggcacagattgtccgtgggagggctccagtgtctgggaaga

SEQ ID NO: 8194 - DNA, 5363 bp, Homo sapiens
  source 1..5363: mol_type = unassigned DNA
tctgtggcagggaggcaagatgacttctctgccccaagcttggaacagctaaagggaaaaacagtgcaagatgagaacaacaaaggtctacaaactcgtcatccacaagaagggctttgggggcagtgatgatgagctagttgtgaaccccaaagtgttccctcacatcaagcttggagacattgtagagattgcacaccccaacgatgaatacagccctctgcttttgcaggtcaagtctcttaaggaagatttacagaaggaaactatcagtgtggaccagactgtgactcaagtgttccggctgagaccttatcaggatgtctatgttaatgtcgtagaccctaaggatgtgacccttgacctagtggaattaacttttaaggatcagtatattggccgtggggatatgtggcgactaaagaaaagtttggtcagcacatgtgcctatatcacccagaaggtggagtttgctggcatcagagcacaggctggtgaactgtgggttaagaatgagaaggtcatgtgtggctacatcagtgaagataccagggtggtgtttcgttctacgtcggctatggtttacatatttattcagatgagctgtgaaatgtgggattttgatatttatggggatttgtattttgagaaagctgtgaatggtttccttgctgatctatttaccaagtggaaggagaagaactgtagtcatgaagtgacagtggtcctgttttctagaactttctatgatgcaaaatctgttgatgaatttcctgaaataaaccgagcctcaattcgacaggatcacaaggggagattctatgaagacttttacaaagtggtggtgcagaatgagagaagagaagaatggacttcacttctcgtaaccattaaaaaactcttcatccagtatccagtgttggtgcgactggaacaggcagagggctttcctcaaggagataattctacctcagcacaaggaaactacctggaggccatcaatctgtcattcaatgtgtttgataagcactacatcaaccgcaactttgaccgaactgggcagatgtcagtggtgatcacgcccggggtgggtgtctttgaagtggaccgcctactcatgatcctgaccaagcagcggatgatagataatggaattggtgtggatttggtgtgcatgggagagcaaccgttacatgctgtcccattgttcaagctccataatcggagtgctccccgtgattctcgtctgggcgatgactataatatccctcactggataaaccacagtttctacacatccaaaagccagctcttttgtaatagtttcaccccacgaataaaactggcaggaaagaagcccgcctctgagaaagcaaaaaatggccgtgatacatctctcgggagtccaaaagaatctgagaacgcccttcccatccaagtagattatgacgcctatgacgctcaagtgttcaggctgcccggcccatcccgggcccagtgcctcaccacctgcagatctgtgcgagagcgagagagtcacagtcgaaagagtgccagctcctgtgatgtttcatccagcccttccctaccaagccgcacactgcccactgaggaagtgaggagccaggcttctgacgacagctccctaggcaagagtgccaacatcctgatgatcccacacccccacctgcaccagtatgaagtcagcagctccttgggatacaccagcactcgagatgtcctggagaacatgatggagccaccacagcgagactccagtgcaccagggaggtttcacgttggcagtgcagaatccatgctgcatgttcgacctggtggatacacgccccagagagcactgattaaccccttcgctccctctcggatgcccatgaagcttacgtccaacagaaggcgctggatgcacacttttcctgtggggccatccggagaagccatccagatccaccaccagacccgacagaatatggcggagctacaaggcagcgggcagagggatccaactcactcctctgcagagctgctggagttagcatatcatgaagctgctggaaggcacagcaattcccgccagcctggtgacggcatgtccttcttgaacttcagtggaacagaggagctttctgtcggcctgcttagcaacagtggtgcaggtatgaatcctaggacccagaataaggattctctagaggacagtgtttctacctctccagacccaatgccaggcttctgttgcacagttggagtggactggaagtctctcactactccggcgtgcctcccccttaccaccgactacttccctgaccgccagggcctgcagaatgactacacagagggctgttatgatctccttccagaagcagacatcgacaggagggacgaagatggtgtgcagatgacagcccagcaggtatttgaagagtttatttgccaacgtctcatgcagggctaccaaatcatagtgcagcccaagacacagaaacccaatcctgctgtcccgcccccgctgagcagtagcccactctatagccgaggccttgtgtcccgaaaccgccctgaggaggaggaccagtattggctgagtatgggcagaacgttccacaaagtgacgctgaaggataagatgatcacagtgacgcgataccttcccaagtatccttatgaatctgcccagatccactacacctacagcctctgtccttcccactcagactcagagttcgtctcctgctgggtggaattctcccacgaacggctggaggagtacaagtggaattacttagatcagtatatctgttctgccggctctgaagacttcagcttaattgagtccctgaagttctggaggacccgcttcctgctgctgccagcctgtgtcaccgccaccaagcgcatcacggagggggaggcccactgcgacatctatggggacaggccccgtgcagacgaggacgagtggcaactcctggatggttttgtccgctttgtggagggcttgaatcgcattcgcaggcggcatcgctcggatcgcatgatgcggaaagggaccgccatgaaaggcttgcagatgactgggcccatttccacgcattctctggagtcaactgcacccccagtggggaagaagggaacctcagctctctctgccctgttggagatggaggccagtcagaagtgcctgggagaacagcaggcagctgtgcatggtgggaagagctccgcccagtcagccgagagcagcagcgttgccatgactcccacctacatggacagcccacgaaaggacggggccttctttatggagtttgtccgcagcccacgcacagcatcgtccgccttctaccctcaggtatctgtggaccaaacagccactcctatgttggacggcaccagtttgggcatatgcacaggccaatccatggacagaggcaacagccagacctttgggaactcccagaacataggagaacagggctactcctccacaaactccagtgacagcagctctcagcagctggtggcaagctccttgacctcatcctctaccctgacagagatcctggaagccatgaagcacccctcgacaggagtccagctgctctctgaacagaagggcctctcaccgtactgcttcatcagcgcggaggtggtacactggttggtgaaccacgtggaggggatccagacacaggcgatggccattgacatcatgcagaaaatgctggaagagcagctcatcacacatgcatctggcgaagcctggcggaccttcatctacggcttctatttctacaagatagtaacggacaaagagcccgaccgagtggccatgcagcagcccgccaccacctggcacacagcaggagtggacgacttcgccagcttccagcgcaagtggtttgaggtggcctttgtggcagaagagctcgtgcactctgagattcctgcctttctcctgccctggctgcctagccggccagcctcctatgcaagtaggcacagctcctttagccgaagttttggaggacggagccaggcggcagcacttttagctgccactgtcccagagcagaggactgtgaccctggatgttgacgtgaacaaccgcacagaccggctggagtggtgcagctgttattaccatggcaacttttctctgaatgcagcctttgagatcaagctgcactggatggcggtgaccgcagcagtactcttcgagatggtccaaggttggcatcggaaagccacctcctgtggcttcttgttagtcccagttttggaggggccttttgcactgcccagttacctgtatggcgacccccttcgtgcccagctcttcatcccactcaacatcagctgcttgctcaaggagggcagcgagcacctgtttgatagctttgaacccgaaacgtactgggatcgaatgcacctcttccaggaagccattgcacacaggtttgggtttgtacaagataaatattctgcctctgcttttaacttccctgctgagaacaagcctcagtatatccacgttacaggaacagtgtttctgcagctgccctactccaagcgcaagttctcagggcagcagcggcggcggcggaactccaccagctccaccaaccagaacatgttctgcgaggagcgggtcggctacaactgggcctacaacaccatgctcaccaaaacatggcgctccagcgccacaggggatgaaaagtttgctgatcggctgctgaaggacttcacggacttctgcatcaaccgtgacaaccggctggtcacgttctggacaagttgcctggagaagatgcatgccagtgccccgtgaggccaggctgcacctgtgctgggggaaggtgggtgagccactgccctcaaacccggggcggaggattccaggcaggctctaggagtcaggtgtccgtttgctgctatcagtgagtgggggccattgttttttgtttgtttgtttgtttgtttgtttgtttttggcccccacgacaagtcttctactctagaagaaagactttggaagcagctgctgctgctgccaccactcctgtcagcaagtgctcagagcaggtgggaggcacagattgtccgtgggagggctccagtgtctgggaagagggcaggcggcccccatgaatgtcctcggaagggggtggctcctggtagcatccttttccttcaccatctatgggatattaggggcagaatctgccacttcttgcccaggagtgtgcacagatgtaagataattttgtgaaataatgtaccatagactctcaccaactgtatatacctgtacatatcagaagcaaataaagagctcc

SEQ ID NO: 8195 - DNA, 1755 bp, Homo sapiens
  source 1..1755: mol_type = unassigned DNA
gagccacgccccgcacagttaacagacgggcgctcagggagctagggagctgtgaagctgctggaggagttggcgtccggggagcaagggccatggccaccgtgcaggagaaggctgctgcgctgaacctctcggctctccacagccccgcgcacaggcctccgggtttcagtgtagctcagaagccatttggagccacgtatgtatggagcagcatcataaacactcttcaaacacaagtggaagtgaaaaaacgaaggcaccgtttaaaacgacataatgactgctttgttggttcagaagctgtggatgtcattttttctcacctaattcagaataagtattttggtgatgtagatattcctcgagccaaagtggtgagagtgtgtcaagcgcttatggactacaaagtatttgaagcagttccaaccaaagtctttggaaaagacaaaaaacctacatttgaagatagtagttgcagcctttatagattcaccacaatacctaaccaagacagtcagttaggcaaagagaacaaactatattcacctgccaggtatgcagatgcattatttaagtcatccgatatcagatcagccagtttagaggacctgtgggaaaatctgagtttaaagcctgccaactcccctcatgtaaatatctctgcaaccttgtctccacaagttattaatgaagtgtggcaagaagaaacaattgggcgtctactacaacttgtagaccttccacttcttgactccttactgaaacagcaagaggctgtacctaaaattcctcaacctaagaggcagtccaccatggtcaacagcagtaactatctggatcgagggattctcaaggcttatagtgactctcaggaagatgagtggctctcggcagcaattgactgtttagaataccttccagaccaaatggtggtggaaataagcagaagctttcctgagcaaccagaccgaacagacttagtgaaagaacttctgtttgatgccattggcagatattacagtagtagggaacctctgttaaatcacttatctgacgttcataatggaattgcagaactcttagtgaatgggaagacggaaatagctttagaagctacccagctccttctaaagcttttagatttccaaaatagagaagaatttagaagactactgtatttcatggctgttgcagcaaatccttctgagtttaaattacagaaagaaagtgacaaccgaatggttgtgaaaaggatattctcaaaagctattgttgacaataaaaatttatccaaaggcaaaacagatcttctggtactctttttaatggatcatcagaaagatgtttttaagattcctggaactctacataaaattgtaagtgttaagcttatggccatacagaacggaagagatccaaatagagatgcaggatatatttattgccagagaattgatcaacgtgactattccaacaatacagagaagacaaccaaagatgagctgttgaatttactaaaaactcttgatgaggattcaaaactttctgccaaagagaagaaaaaattgctaggtcaattctataagtgtcacccagacatctttattgagcattttggagactgagtttttaatatctgtatataagttgtgtattttaagaataaattatgtatcctaaatatccaatcacatttgtaagcgtggaagctctaaatttgaaactgtacttaataaaaatttttttgtataa

SEQ ID NO: 8196 - DNA, 2012 bp, Homo sapiens
  source 1..2012: mol_type = unassigned DNA
agctgcgaccacttggccaacgcccccgccgagcgggcggatcgagttcctctctggctggtgggctgcaagcggcagagcccgcccgcacagcccagcttttttctttctacccagactctcaacttgaccgcgcgttggtctgtgcgcccgctaacgtgccaggcacgcgccggggagctccgggatatgctccgcggtgctaccggtgacaagtgtggtatctggaatttgtgtagttctttgccccctgtctcaaccacaaaccttgacgacacagtatggccaggggccgagctcctcccttgcccactttgttctccagactgctaggagtcaagagtcagcttgtctccccagactcttcctgggagggatgagaggtttatgtgagttctactggcaggaatttggcataaaaggtttcagtgtagctcagaagccatttggagccacgtatgtatggagcagcatcataaacactcttcaaacacaagtggaagtgaaaaaacgaaggcaccgtttaaaacgacataatgactgctttgttggttcagaagctgtggatgtcattttttctcacctaattcagaataagtattttggtgatgtagatattcctcgagccaaagtggtgagagtgtgtcaagcgcttatggactacaaagtatttgaagcagttccaaccaaagtctttggaaaagacaaaaaacctacatttgaagatagtagttgcagcctttatagattcaccacaatacctaaccaagacagtcagttaggcaaagagaacaaactatattcacctgccaggtatgcagatgcattatttaagtcatccgatatcagatcagccagtttagaggacctgtgggaaaatctgagtttaaagcctgccaactcccctcatgtaaatatctctgcaaccttgtctccacaagttattaatgaagtgtggcaagaagaaacaattgggcgtctactacaacttgtagaccttccacttcttgactccttactgaaacagcaagaggctgtacctaaaattcctcaacctaagaggcagtccaccatggtcaacagcagtaactatctggatcgagggattctcaaggcttatagtgactctcaggaagatgagtggctctcggcagcaattgactgtttagaataccttccagaccaaatggtggtggaaataagcagaagctttcctgagcaaccagaccgaacagacttagtgaaagaacttctgtttgatgccattggcagatattacagtagtagggaacctctgttaaatcacttatctgacgttcataatggaattgcagaactcttagtgaatgggaagacggaaatagctttagaagctacccagctccttctaaagcttttagatttccaaaatagagaagaatttagaagactactgtatttcatggctgttgcagcaaatccttctgagtttaaattacagaaagaaagtgacaaccgaatggttgtgaaaaggatattctcaaaagctattgttgacaataaaaatttatccaaaggcaaaacagatcttctggtactctttttaatggatcatcagaaagatgtttttaagattcctggaactctacataaaattgtaagtgttaagcttatggccatacagaacggaagagatccaaatagagatgcaggatatatttattgccagagaattgatcaacgtgactattccaacaatacagagaagacaaccaaagatgagctgttgaatttactaaaaactcttgatgaggattcaaaactttctgccaaagagaagaaaaaattgctaggtcaattctataagtgtcacccagacatctttattgagcattttggagactgagtttttaatatctgtatataagttgtgtattttaagaataaattatgtatcctaaatatccaatcacatttgtaagcgtggaagctctaaatttgaaactgtacttaataaaaatttttttgtataa

SEQ ID NO: 8197 - DNA, 2569 bp, Homo sapiens
  source 1..2569: mol_type = unassigned DNA
aatccagtcagagcagcggagctgccccgaacaaagatggcgcgggaagcgtctgtgagggcagactgatccgagcacccaaaccctcggcggacagcggagccagtggtagccgcacggccctaaaaccatggaggagggcggcagcactggcagtgctggcagtgacagcagcaccagcgggagtggcggggcgcagcaaagggagctggagcgcatggctgaggtcttggtcaccggggaacagctacggctcaggctgcacgaagaaaaggttattaaagatagacgtcatcatctcaagacctacccaaactgttttgtcgcaaaagaactgattgactggctgattgaacacaaagaggcttctgacagagagacggcaattaaactcatgcagaaattagcagaccggggcattattcaccatgtgtgtgatgagcataaggaattcaaggatgtcaaactcttctaccgctttagaaaggatgacggcaccttcccattggataatgaagtgaaggcctttatgagaggacagaggctatatgaaaagctgatgagccctgaaaacacactcctgcagcccagggaggaggaaggggtcaagtatgagcgcaccttcatggcatctgaattcctggactggctggttcaggaaggtgaggccaccacgaggaaagaggcagagcagctttgccaccggcttatggagcatggcatcatccagcatgtgtccaacaagcacccatttgtggacagcaatcttctctaccagttcagaatgaacttccggcggaggcgaagactgatggagctgctcaatgaaaagtccccctcctcccaggaaactcatgacagtcccttctgcctgaggaagcagagccatgacaatcggaaatctaccagctttatgtcagtgagccccagcaaggagatcaagatcgtgtctgcagtgaggagaagcagcatgagcagctgtggcagcagcggctacttcagcagcagccccaccctcagcagcagcccccctgtgctctgcaaccccaagtccgtgctgaagagacctgtcacctctgaggaactccttactcccggggctccgtatgcaaggaagacattcacgattgttggtgacgcggttggctggggttttgtggtgcgaggaagtaagccatgccacatccaggctgtagaccccagtggccctgcagccgcagcaggaatgaaggtctgtcagtttgtcgtctctgtcaacgggctcaatgtcctgcatgtagactaccggaccgtgagcaatctgattctgacgggcccacggacgattgtcatggaagtcatggaggagttagagtgctgagctcctgggcctcccagccctccagtggcctgtgggtgagggaagccagaatgacacaaagcaatgcaaagacaagattgccatgcaaatggatggttttggacatacgagtcttctccgcacatacatgtctaaagttgagttttatacactgaatgtggaagaaccgggtatcatatcttttttaaaaaatgtcagtgtagaaaacatttgggaaaccattttcctacatgatagaactgccttactagatttctatttgtagctctcattcattgttttttatcttagtttgcagaaaggtgttgaaatgcttctctagcccaaacagcgacatgctaaagtccccttcttcagagtcaatagagtagttgttaaaggttttaaattgtactttctccaaaattagcatgcagctatttaatagggaatctagatttcaccaagattcaaatcaaagcaacatttaaaggaataagacctgttcactagcattttcaagggggttctaaagcattcaagtgcttaaaagccataaaaaatgacttcttaattcctgcctttagtgtcaacttttaagttaatacaggtttcaattgtggcattaggaaaaaaaaaaaccttgtgatgctatggttgggggtagttagggagagactacatgaaattgtgtgcccctattttctttctgatcctaaatcattttgttttataaatcagctatagcatctttctagaattaatcctgaatatgttgaatgttaaaatagagaagtttgtatatacacataattaaaaatcaacccttctggcaagatttcactttgaaggtgtctgtttttaagggaaggctaaaactttgctgatatgtgataaaacttgaactctaaattgcctccttagcctgaatttttactagctttctagtgtaacatattctaaggacatgacatgctgcttatttggggggattatttttcaccaaaatgatcatcttgtgttgtaacttttcagctcacttgtatatacgcacgttttcatttttggtctagaaaatagtgcattttggggctcagcgtgcagaggaaattcctcaaagtgccaaattaggcagtcaggaaatactaaattcttcattccaaataatggatctgaatgatgacgttaattttttatcatgcattaacaaaataaaatatgagaattgta

SEQ ID NO: 8198 - DNA, 4255 bp, Homo sapiens
  source 1..4255: mol_type = unassigned DNA
ctgcttctctataggtgacccccgccccaaagtcccccctcccactaacttctctttgagaagagagtaaaaccgaattcgagagaaaagaggcagtaactattcgggaggaggcagactggagtgggcaccagtcccgcggagcctcagcgcccgccgcgtccctccctccgcccctttcgcccacacctacccgcccccgccggcccggctctcagtagcgtcgcccgaggctgcagcagcgcatcccggggcatggcgcggcgggggcgcggagggctcggttcggagggggccgggagcccgggcgccctggagtgaggaggaccgggagctggctctggaggctgcggaggcgacgccggagagaacgaagcctcggctgggagcggatctttcgaagatggtttggctgccttggagatttggagatctgatgccacgatgaggactcacacacggggggctcccagtgtgtttttcatatatttgctttgctttgtgtcagcctacatcaccgacgagaacccagaagttatgattcccttcaccaatgccaactacgacagccatcccatgctgtacttctccagggcagaagtggcggagctgcagctcagggctgccagctcgcacgagcacattgcagcccgcctcacggaggctgtgcacacgatgctgtccagccccttggaatacctccctccctgggatcccaaggactacagtgcccgctggaatgaaatttttggaaacaacttgggtgccttggcaatgttctgtgtgctgtatcctgagaacattgaagcccgagacatggccaaagactacatggagaggatggcagcgcagcctagttggttggtgaaagatgctccttgggatgaggtcccgcttgctcactccctggttggttttgccactgcttatgacttcttgtacaactacctgagcaagacacaacaggagaagtttcttgaagtgattgccaatgcctcagggtatatgtatgaaacttcatacaggagaggatggggatttcaatacctgcacaatcatcagcccaccaactgtatggctttgctcacgggaagcctagtcctgatgaatcaaggatatcttcaagaagcctacttatggaccaaacaagttctgaccatcatggagaaatctctggtcttgctcagggaggtgacggatggctccctctatgaaggagttgcgtatggcagctacaccactagatcactcttccaatacatgtttctcgtccagaggcacttcaacatcaaccactttggccatccgtggcttaaacaacactttgcatttatgtatagaaccatcctgccagggtttcaaaggactgtggctattgcggactcaaattacaactggttttatggtccagaaagccaattagtgttccttgataaatttgtcatgcgtaatggcagtggtaactggctagctgaccaaatcagaaggaaccgtgtggtggaaggtccaggaacaccatccaaagggcagcgctggtgcactctgcacacagaatttctctggtatgatggcagcttgaaatcggttcctcctccagactttggcacccctacactgcattattttgaagactggggtgtcgtgacttatggaagtgcactacctgcagaaatcaatagatctttcctttccttcaagtctggaaaactggggggacgtgcaatatatgacattgtccacagaaacaaatacaaagattggatcaaaggatggagaaattttaatgcagggcatgaacatcctgatcaaaactcatttacttttgctcccaatggtgtgcctttcattactgaggctctgtacgggccaaagtacaccttcttcaacaatgttttgatgttttccccagctgtgtcaaagagctgcttttctccctgggtgggtcaggtcacagaagactgctcatcaaaatggtctaaatacaagcatgacctggcagctagttgtcaggggagggtggttgcagcagaggagaaaaatggggtggttttcatccgaggagaaggtgtgggagcttataacccccagctcaacctgaagaatgttcagaggaatctcatcctcctacatccacagctgcttctccttgtagaccaaatacacctgggagaggagagtcccttggagacagcagcgagcttcttccataatgtggatgttccttttgaggagactgtggtagatggtgtccatggggctttcatcaggcagagagatggtctctataaaatgtactggatggacgatactggctacagcgagaaagcaacctttgcctcagtgacatatcctcggggctatccctacaatgggacaaactatgtgaatgtcaccatgcacctccgaagtcccatcaccagggcagcttacctcttcatagggccatctatagatgttcagagcttcactgtccacggagactctcagcaactggatgtgttcatagccaccagcaaacatgcctacgccacatacctgtggacaggtgaggccacaggacagtctgcctttgcacaggtcattgctgatcgtcacaaaattctgtttgaccggaattcagccatcaagagcagcattgtccctgaggtgaaggactatgctgctattgtggaacagaacttgcagcattttaaaccagtgtttcagctgctggagaagcagatactgtcccgagtccggaacacagctagctttaggaagactgctgaacgcctgctgagattttcagataagagacagactgaggaggccattgacaggatttttgccatatcacagcaacagcagcagcaaagcaagtcaaagaaaaaccgaagggcaggcaaacgctataaatttgtggatgctgtccctgatatttttgcacagattgaagtcaatgagaaaaagattagacagaaagctcagattttggcacagaaagaactacccatagatgaagatgaagaaatgaaagaccttttagattttgcagatgtaacatacgagaaacataaaaatgggggcttgattaaaggccggtttggacaggcacggatggtgacaactacacacagcagggccccatcactgtctgcttcctataccaggttgttcctgattctgaacattgctattttctttgtcatgttggcaatgcaactgacttatttccagagggcccagagcctacatggccaaagatgtctttatgcagttcttctcatagatagctgtattttattatggttgtactcttcttgttcccaatcacagtgttagcactgaagctataaattacctggtcattttgtgatcacaagagtctatgcaaaaaaaaaaatttctttaccccagattatcagatttttttccctcagattcattttaacaaattaagggaagatattttgacacaagaaagcaggaacgtggagaaattggagcaggaaaagaaattatcaaagcaatagaaatagcttggtggtcctatggtgtttttggaagtatttggcattgctaattgagcagtccatatagtactacttttagaagaaacaaaaagtctattttttaaagtaatgttttttcttatgagaaaaaggtttagatagaattgggttttattaatattaatttaatgctattagcaatttccatatactatattgtggaaaagactgaagaatacaattctgagaaatataaaaaaattttaatggtatactcatgttgaaagataaatgttgctaagtcctggtatgatggtgtgagcttccttggggaagtacttcttgagttatgtaactaacaggatgttttactacagatctggatggctattcagataacatggcaaaaaatgatagcagaagatcattaaaaacttaaaatatattttattagaaaacatttatctatgaatgaatatttccttgatgctggtctctgcacacatatgcttggttacttgcatgcattcattggttgttcaataagtgagatgattacagataatactgtattttccttatatggaaaaccgttatagacccaataacaactaaacctttcaaaagaaaatattttctattatgaatgttgattttcataccaaagaagatggagagtctaaaatttggatatgattcttatgtttttttaatagaaaaccttcttcaagtttattttcctaaataaacatcataattgtgaa

SEQ ID NO: 8199 - DNA, 4037 bp, Homo sapiens
  source 1..4037: mol_type = unassigned DNA
agtagcgtcgcccgaggctgcagcagcgcatcccggggcatggcgcggcgggggcgcggagggctcggttcggagggggccgggagcccgggcgccctggagtgaggaggaccgggagctggctctggaggctgcggaggcgacgccggagagaacgaagcctcggctgggagcggatctttcgaagatggtttggctgccttggagatttggagatctgatgccacgatgaggactcacacacggggggctcccagtgtgtttttcatatatttgctttgctttgtgtcagcctacatcaccgacgagaacccagaagttatgattcccttcaccaatgccaactacgacagccatcccatgctgtacttctccagggcagaagtggcggagctgcagctcagggctgccagctcgcacgagcacattgcagcccgcctcacggaggctgtgcacacgatgctgtccagccccttggaatacctccctccctgggatcccaaggactacagtgcccgctggaatgaaatttttggaaacaacttgggtgccttggcaatgttctgtgtgctgtatcctgagaacattgaagcccgagacatggccaaagactacatggagaggatggcagcgcagcctagttggttggtgaaagatgctccttgggatgaggtcccgcttgctcactccctggttggttttgccactgcttatgacttcttgtacaactacctgagcaagacacaacaggagaagtttcttgaagtgattgccaatgcctcagggtatatgtatgaaacttcatacaggagaggatggggatttcaatacctgcacaatcatcagcccaccaactgtatggctttgctcacgggaagcctagtcctgatgaatcaaggatatcttcaagaagcctacttatggaccaaacaagttctgaccatcatggagaaatctctggtcttgctcagggaggtgacggatggctccctctatgaaggagttgcgtatggcagctacaccactagatcactcttccaatacatgtttctcgtccagaggcacttcaacatcaaccactttggccatccgtggcttaaacaacactttgcatttatgtatagaaccatcctgccagggtttcaaaggactgtggctattgcggactcaaattacaactggttttatggtccagaaagccaattagtgttccttgataaatttgtcatgcgtaatggcagtggtaactggctagctgaccaaatcagaaggaaccgtgtggtggaaggtccaggaacaccatccaaagggcagcgctggtgcactctgcacacagaatttctctggtatgatggcagcttgaaatcggttcctcctccagactttggcacccctacactgcattattttgaagactggggtgtcgtgacttatggaagtgcactacctgcagaaatcaatagatctttcctttccttcaagtctggaaaactggggggacgtgcaatatatgacattgtccacagaaacaaatacaaagattggatcaaaggatggagaaattttaatgcagggcatgaacatcctgatcaaaactcatttacttttgctcccaatggtgtgcctttcattactgaggctctgtacgggccaaagtacaccttcttcaacaatgttttgatgttttccccagctgtgtcaaagagctgcttttctccctgggtgggtcaggtcacagaagactgctcatcaaaatggtctaaatacaagcatgacctggcagctagttgtcaggggagggtggttgcagcagaggagaaaaatggggtggttttcatccgaggagaaggtgtgggagcttataacccccagctcaacctgaagaatgttcagaggaatctcatcctcctacatccacagctgcttctccttgtagaccaaatacacctgggagaggagagtcccttggagacagcagcgagcttcttccataatgtggatgttccttttgaggagactgtggtagatggtgtccatggggctttcatcaggcagagagatggtctctataaaatgtactggatggacgatactggctacagcgagaaagcaacctttgcctcagtgacatatcctcggggctatccctacaatgggacaaactatgtgaatgtcaccatgcacctccgaagtcccatcaccagggcagcttacctcttcatagggccatctatagatgttcagagcttcactgtccacggagactctcagcaactggatgtgttcatagccaccagcaaacatgcctacgccacatacctgtggacaggtgaggccacaggacagtctgcctttgcacaggtcattgctgatcgtcacaaaattctgtttgaccggaattcagccatcaagagcagcattgtccctgaggtgaaggactatgctgctattgtggaacagaacttgcagcattttaaaccagtgtttcagctgctggagaagcagatactgtcccgagtccggaacacagctagctttaggaagactgctgaacgcctgctgagattttcagataagagacagactgaggaggccattgacaggatttttgccatatcacagcaacagcagcagcaaagcaagtcaaagaaaaaccgaagggcaggcaaacgctataaatttgtggatgctgtccctgatatttttgcacagattgaagtcaatgagaaaaagattagacagaaagctcagattttggcacagaaagaactacccatagatgaagatgaagaaatgaaagaccttttagattttgcagatgtaacatacgagaaacataaaaatgggggcttgattaaaggccggtttggacaggcacggatggtgacaactacacacagcagggccccatcactgtctgcttcctataccaggttgttcctgattctgaacattgctattttctttgtcatgttggcaatgcaactgacttatttccagagggcccagagcctacatggccaaagatgtctttatgcagttcttctcatagatagctgtattttattatggttgtactcttcttgttcccaatcacagtgttagcactgaagctataaattacctggtcattttgtgatcacaagagtctatgcaaaaaaaaaaatttctttaccccagattatcagatttttttccctcagattcattttaacaaattaagggaagatattttgacacaagaaagcaggaacgtggagaaattggagcaggaaaagaaattatcaaagcaatagaaatagcttggtggtcctatggtgtttttggaagtatttggcattgctaattgagcagtccatatagtactacttttagaagaaacaaaaagtctattttttaaagtaatgttttttcttatgagaaaaaggtttagatagaattgggttttattaatattaatttaatgctattagcaatttccatatactatattgtggaaaagactgaagaatacaattctgagaaatataaaaaaattttaatggtatactcatgttgaaagataaatgttgctaagtcctggtatgatggtgtgagcttccttggggaagtacttcttgagttatgtaactaacaggatgttttactacagatctggatggctattcagataacatggcaaaaaatgatagcagaagatcattaaaaacttaaaatatattttattagaaaacatttatctatgaatgaatatttccttgatgctggtctctgcacacatatgcttggttacttgcatgcattcattggttgttcaataagtgagatgattacagataatactgtattttccttatatggaaaaccgttatagacccaataacaactaaacctttcaaaagaaaatattttctattatgaatgttgattttcataccaaagaagatggagagtctaaaatttggatatgattcttatgtttttttaatagaaaaccttcttcaagtttattttcctaaataaacatcataattgtg

SEQ ID NO: 8200 - DNA, 694 bp, Homo sapiens
  source 1..694: mol_type = unassigned DNA
gcggacgacccaccttgagatgcatctagcgactgctcccagcatgtaggagcagttgtaaaatcacagccgtaacagtgcctgctctccagtgtctgaaaacaaatgtttttctggtcttcacttttttgaggcaggaaggatctttcgaagatggtttggctgccttggagatttggagatctgatgccacgatgaggactcacacacggggggctcccagtgtgtttttcatatatttgctttgctttgtgtcagcctacatcaccgacgagaacccagaagttatgattcccttcaccaatgccaactacgacagccatcccatgctgtacttctccagggcagaagtggcggagctgcagctcagggctgccagctcgcacgagcacattgcagcccgcctcacggaggctgtgcacacgatgctgtccagccccttggaatacctccctccctgggatcccaaggactacagtgcccgctggaatgaaatttttggaaacaacttgggtgccttggcaatgttctgtgtgctgtatcctgagaacattgaagcccgagacatggccaaagactacatggagaggatggcagcgcagcctagttggttggtgaaagatgctccttgggatgaggtcccgcttgctcactccctggttggttttgccactgcttatgacttcttgtacaa

SEQ ID NO: 8201 - DNA, 4003 bp, Homo sapiens
  source 1..4003: mol_type = unassigned DNA
gcggacgacccaccttgagatgcatctagcgactgctcccagcatgtaggagcagttgtaaaatcacagccgtaacagtgcctgctctccagtgtctgaaaacaaatgtttttctggtcttcacttttttgaggcaggaaggatctttcgaagatggtttggctgccttggagatttggagatctgatgccacgatgaggactcacacacggggggctcccagtgtgtttttcatatatttgctttgctttgtgtcagcctacatcaccgacgagaacccagaagttatgattcccttcaccaatgccaactacgacagccatcccatgctgtacttctccagggcagaagtggcggagctgcagctcagggctgccagctcgcacgagcacattgcagcccgcctcacggaggctgtgcacacgatgctgtccagccccttggaatacctccctccctgggatcccaaggactacagtgcccgctggaatgaaatttttggaaacaacttgggtgccttggcaatgttctgtgtgctgtatcctgagaacattgaagcccgagacatggccaaagactacatggagaggatggcagcgcagcctagttggttggtgaaagatgctccttgggatgaggtcccgcttgctcactccctggttggttttgccactgcttatgacttcttgtacaactacctgagcaagacacaacaggagaagtttcttgaagtgattgccaatgcctcagggtatatgtatgaaacttcatacaggagaggatggggatttcaatacctgcacaatcatcagcccaccaactgtatggctttgctcacgggaagcctagtcctgatgaatcaaggatatcttcaagaagcctacttatggaccaaacaagttctgaccatcatggagaaatctctggtcttgctcagggaggtgacggatggctccctctatgaaggagttgcgtatggcagctacaccactagatcactcttccaatacatgtttctcgtccagaggcacttcaacatcaaccactttggccatccgtggcttaaacaacactttgcatttatgtatagaaccatcctgccagggtttcaaaggactgtggctattgcggactcaaattacaactggttttatggtccagaaagccaattagtgttccttgataaatttgtcatgcgtaatggcagtggtaactggctagctgaccaaatcagaaggaaccgtgtggtggaaggtccaggaacaccatccaaagggcagcgctggtgcactctgcacacagaatttctctggtatgatggcagcttgaaatcggttcctcctccagactttggcacccctacactgcattattttgaagactggggtgtcgtgacttatggaagtgcactacctgcagaaatcaatagatctttcctttccttcaagtctggaaaactggggggacgtgcaatatatgacattgtccacagaaacaaatacaaagattggatcaaaggatggagaaattttaatgcagggcatgaacatcctgatcaaaactcatttacttttgctcccaatggtgtgcctttcattactgaggctctgtacgggccaaagtacaccttcttcaacaatgttttgatgttttccccagctgtgtcaaagagctgcttttctccctgggtgggtcaggtcacagaagactgctcatcaaaatggtctaaatacaagcatgacctggcagctagttgtcaggggagggtggttgcagcagaggagaaaaatggggtggttttcatccgaggagaaggtgtgggagcttataacccccagctcaacctgaagaatgttcagaggaatctcatcctcctacatccacagctgcttctccttgtagaccaaatacacctgggagaggagagtcccttggagacagcagcgagcttcttccataatgtggatgttccttttgaggagactgtggtagatggtgtccatggggctttcatcaggcagagagatggtctctataaaatgtactggatggacgatactggctacagcgagaaagcaacctttgcctcagtgacatatcctcggggctatccctacaatgggacaaactatgtgaatgtcaccatgcacctccgaagtcccatcaccagggcagcttacctcttcatagggccatctatagatgttcagagcttcactgtccacggagactctcagcaactggatgtgttcatagccaccagcaaacatgcctacgccacatacctgtggacaggtgaggccacaggacagtctgcctttgcacaggtcattgctgatcgtcacaaaattctgtttgaccggaattcagccatcaagagcagcattgtccctgaggtgaaggactatgctgctattgtggaacagaacttgcagcattttaaaccagtgtttcagctgctggagaagcagatactgtcccgagtccggaacacagctagctttaggaagactgctgaacgcctgctgagattttcagataagagacagactgaggaggccattgacaggatttttgccatatcacagcaacagcagcagcaaagcaagtcaaagaaaaaccgaagggcaggcaaacgctataaatttgtggatgctgtccctgatatttttgcacagattgaagtcaatgagaaaaagattagacagaaagctcagattttggcacagaaagaactacccatagatgaagatgaagaaatgaaagaccttttagattttgcagatgtaacatacgagaaacataaaaatgggggcttgattaaaggccggtttggacaggcacggatggtgacaactacacacagcagggccccatcactgtctgcttcctataccaggttgttcctgattctgaacattgctattttctttgtcatgttggcaatgcaactgacttatttccagagggcccagagcctacatggccaaagatgtctttatgcagttcttctcatagatagctgtattttattatggttgtactcttcttgttcccaatcacagtgttagcactgaagctataaattacctggtcattttgtgatcacaagagtctatgcaaaaaaaaaaatttctttaccccagattatcagatttttttccctcagattcattttaacaaattaagggaagatattttgacacaagaaagcaggaacgtggagaaattggagcaggaaaagaaattatcaaagcaatagaaatagcttggtggtcctatggtgtttttggaagtatttggcattgctaattgagcagtccatatagtactacttttagaagaaacaaaaagtctattttttaaagtaatgttttttcttatgagaaaaaggtttagatagaattgggttttattaatattaatttaatgctattagcaatttccatatactatattgtggaaaagactgaagaatacaattctgagaaatataaaaaaattttaatggtatactcatgttgaaagataaatgttgctaagtcctggtatgatggtgtgagcttccttggggaagtacttcttgagttatgtaactaacaggatgttttactacagatctggatggctattcagataacatggcaaaaaatgatagcagaagatcattaaaaacttaaaatatattttattagaaaacatttatctatgaatgaatatttccttgatgctggtctctgcacacatatgcttggttacttgcatgcattcattggttgttcaataagtgagatgattacagataatactgtattttccttatatggaaaaccgttatagacccaataacaactaaacctttcaaaagaaaatattttctattatgaatgttgattttcataccaaagaagatggagagtctaaaatttggatatgattcttatgtttttttaatagaaaaccttcttcaagtttattttcctaaataaacatcataattgtg

SEQ ID NO: 8202 - DNA, 3487 bp, Homo sapiens
  source 1..3487: mol_type = unassigned DNA
aggaattggatggaggtgcccttcagaactcatggagaaaagcactgctcccagtaaaatatctctcattctaatgaatgggatctttcgaagatggtttggctgccttggagatttggagatctgatgccacgatgaggactcacacacggggggctcccagtgtgtttttcatatatttgctttgctttgtgtcagcctacatcaccgacgagaacccagaagttatgattcccttcaccaatgccaactacgacagccatcccatgctgtacttctccagggcagaagtggcggagctgcagctcagggctgccagctcgcacgagcacattgcagcccgcctcacggaggctgtgcacacgatgctgtccagccccttggaatacctccctccctgggatcccaaggactacagtgcccgctggaatgaaatttttggaaacaacttgggtgccttggcaatgttctgtgtgctgtatcctgagaacattgaagcccgagacatggccaaagactacatggagaggatggcagcgcagcctagttggttggtgaaagatgctccttgggatgaggtcccgcttgctcactccctggttggttttgccactgcttatgacttcttgtacaactacctgagcaagacacaacaggagaagtttcttgaagtgattgccaatgcctcagggtatatgtatgaaacttcatacaggagaggatggggatttcaatacctgcacaatcatcagcccaccaactgtatggctttgctcacgggaagcctagtcctgatgaatcaaggatatcttcaagaagcctacttatggaccaaacaagttctgaccatcatggagaaatctctggtcttgctcagggaggtgacggatggctccctctatgaaggagttgcgtatggcagctacaccactagatcactcttccaatacatgtttctcgtccagaggcacttcaacatcaaccactttggccatccgtggcttaaacaacactttgcatttatgtatagaaccatcctgccagggtttcaaaggactgtggctattgcggactcaaattacaactggttttatggtccagaaagccaattagtgttccttgataaatttgtcatgcgtaatggcagtggtaactggctagctgaccaaatcagaaggaaccgtgtggtggaaggtccaggaacaccatccaaagggcagcgctggtgcactctgcacacagaatttctctggtatgatggcagcttgaaatcggttcctcctccagactttggcacccctacactgcattattttgaagactggggtgtcgtgacttatggaagtgcactacctgcagaaatcaatagatctttcctttccttcaagtctggaaaactggggggacgtgcaatatatgacattgtccacagaaacaaatacaaagattggatcaaaggatggagaaattttaatgcagggcatgaacatcctgatcaaaactcatttacttttgctcccaatggtgtgcctttcattactgaggctctgtacgggccaaagtacaccttcttcaacaatgttttgatgttttccccagctgtgtcaaagagctgcttttctccctgggtgggtcaggtcacagaagactgctcatcaaaatggtctaaatacaagcatgacctggcagctagttgtcaggggagggtggttgcagcagaggagaaaaatggggtggttttcatccgaggagaaggtgtgggagcttataacccccagctcaacctgaagaatgttcagaggaatctcatcctcctacatccacagctgcttctccttgtagaccaaatacacctgggagaggagagtcccttggagacagcagcgagcttcttccataatgtggatgttccttttgaggagactgtggtagatggtgtccatggggctttcatcaggcagagagatggtctctataaaatgtactggatggacgatactggctacagcgagaaagcaacctttgcctcagtgacatatcctcggggctatccctacaatgggacaaactatgtgaatgtcaccatgcacctccgaagtcccatcaccagggcagcttacctcttcatagggccatctatagatgttcagagcttcactgtccacggagactctcagcaactggatgtgttcatagccaccagcaaacatgcctacgccacatacctgtggacaggtgaggccacaggacagtctgcctttgcacaggtcattgctgatcgtcacaaaattctgtttgaccggaattcagccatcaagagcagcattgtccctgaggtgaaggactatgctgctattgtggaacagaacttgcagcattttaaaccagtgtttcagctgctggagaagcagatactgtcccgagtccggaacacagctagctttaggaagactgctgaacgcctgctgagattttcagataagagacagactgaggaggccattgacaggatttttgccatatcacagcaacagcagcagcaaagcaagtcaaagaaaaaccgaagggcaggcaaacgctataaatttgtggatgctgtccctgatatttttgcacagattgaagtcaatgagaaaaagattagacagaaagctcagattttggcacagaaagaactacccatagatgaagatgaagaaatgaaagaccttttagattttgcagatgtaacatacgagaaacataaaaatgggggcttgattaaaggccggtttggacaggcacggatggtgacaactacacacagcagggccccatcactgtctgcttcctataccaggttgttcctgattctgaacattgctattttctttgtcatgttggcaatgcaactgacttatttccagagggcccagagcctacatggccaaagatgtctttatgcagttcttctcatagatagctgtattttattatggttgtactcttcttgttcccaatcacagtgttagcactgaagctataaattacctggtcattttgtgatcacaagagtctatgcaaaaaaaaaaatttctttaccccagattatcagatttttttccctcagattcattttaacaaattaagggaagatattttgacacaagaaagcaggaacgtggagaaattggagcaggaaaagaaattatcaaagcaatagaaatagcttggtggtcctatggtgtttttggaagtatttggcattgctaattgagcagtccatatagtactacttttagaagaaacaaaaagtctattttttaaagtaatgttttttcttatgagaaaaaggtttagatagaattgggttttattaatattaatttaatgctattagcaatttccatatactatattgtggaaaagactgaagaatacaattctgagaaatataaaaaaattttaatggtatactcatgttgaaagataaatgttgctaagtcct

SEQ ID NO: 8203 - DNA, 1130 bp, Homo sapiens
  source 1..1130: mol_type = unassigned DNA
ctgcgcggttgactacgcttatcaatccatcgtattcctttgtcttcttgtcacaaaaagaatttcgtcagtctggaaggggagttttacttacgtaaatggatgtagaccagactcaagcatggctgccctgaagggcagacaggtttattgggcaacagctgggaaaatcagcggttggacttggccacatgctccaagaaggccacacgtccttcttcttaatggcataggagttggaggagcccttggcagcattgatgagctcctctgccaggcactcagcaatggtcttaatgttccggaaggcagcctcacgagcacctgtgcacagcagccagatggcctgattcacacggcgaagtggggacacgtccacagcctgtcgtctcacagtcccggcgcacccaatgcgtgtggagtcctcccggggaccactgttgatgatggcgttcaccaggacctgcagagggttctcgcctgtgagcaggtgtatgacctcgaaggcatgcttgacgatgcacacagtcatgagcttcttgccgttgttgcagccgtgcatcatcatggagttagtaaggcgctccacaatgggacactgagctttgtggaagcatttggcggcataccaccctgcactgtgaggatctttcgaagatggtttggctgccttggagatttggagatctgatgccacgatgaggactcacacacggggggctcccagtgtgtttttcatatatttgctttgctttgtgtcagcctacatcaccgacgagaacccagaagttatgattcccttcaccaatgccaactacgacagccatcccatgctgtacttctccagggcagaagtggcggagctgcagctcagggctgccagctcgcacgagcacattgcagcccgcctcacggaggctgtgcacacgatgctgtccagccccttggaatacctccctccctgggatcccaaggactacagtgcccgctggaatgaaatttttggaaacaacttgggtgccttggcaatgttctgtgtgctgtatcctgagaacattgaagcccgagacatggccaaagactacatggagaggatggcagcgcagcctagttggttggtgaaagatgct

SEQ ID NO: 8204 - DNA, 9531 bp, Homo sapiens
  source 1..9531: mol_type = unassigned DNA
acctgctttcggccccgccccgcccgccgccggcctgctcacggctcctcccgtcctccccgaagccccgcctctgaccccgccctgtcctgtctccgtcccgccccacgcccgccagccagcgtcgctgtctctcgccttccctgaggccccgccttcagccccgccttcaaccccgccccgtcctgcctccgccccgcccccgcttgccggcccgcgtcgccgtctcaccctccccgggctgcgcggccggagctggcacagaggatcctcggccgcggcgacatcaccgcctgggcacgcgggcgctgctctggatacggcgccaccgagagaacccgccgcccgcgggtctctgtcctgcggtccgtggttgcccccacaagcgtccggcgtttcctgagggcgggcgtgtccgggccgtgcgggtcgcggggaccgagcgcggctgaggagaccgagctggggcagcgcctgccgtagcgcgggagacgacgcgggggtcttgcggagccccgcgggagcctggcccgccgtgcagagcagttttctggaactctccacctccgtctcccttggggcccagtgcggcgccgagcccccgtcgggatctgcctgagaaaagtgtcatgaaaaaagagcagaagagagacctcactgttgctgaaaggggaattttctttccccgttggcggttacttcatgatcggacgagaagtatctaggtgactgaagatattccatttttatgtttgtacacatgaagctgataaaagaagatgtgaacatgatttctctttgtcataataggctgatgagtaagtaagcctgaaaaatatttgaaatgaaggcaagaattttgaatttttaaaaaccaactaagactttgatcacttgttgaggatgtttctctctcataaatgaaagaaaaacgtattcacaagacaagaagtataaaaagttgagaggaatgacaactgagtccactcactcgaagaatgtcagtacttcatcatcttctttgggcaaacatacacaaatgcatcatacatgtgtggtgagcttatcaccagtgatggttttctgtgctagaaatgactcttaatttgaattttggagtgctttttctctttttttacaatgtgtgttccaactctttgtgttaaatagatttaagtaaaggaggtaaatgctaaattcatagtgttttttacctgtatcacttccctgtgtattatggaaaaattagagattttaacgttattcaaagttttactggaagcaaaactgtgccagggacagagatatacaatttaagttttctctttttggcaactgcacttgcttaaaatgtactgaatgtcagctggatttcacagcatatcagatttacagtctttgtcttatcaaggcctttactgtatgttttatactaaccagatgggaaacacattgagcatcatatctgacatgtatgcctaagggaggagctcccccatggatcatggcgttaatgtttacaggacatttactattcttagcattattgatgtttgctttctctacttttgaggaatctgtgagcaattattccgaatgggcagttttcacagatgatatagatcagtttaaaacacagaaagtgcaagatttcagacccaaccaaaagctgaagaaaagtatgcttcatccaagtttatattttgatgctggagaaatccaagcaatgagacaaaagtctcgtgcaagccatttgcatctttttagagctatcagaagtgcagtgacagttatgctgtccaacccaacatactacctacctccaccaaagcatgctgattttgctgccaagtggaatgaaatttatggtaacaatctgcctcctttagcattgtactgtttgttatgcccagaagacaaagttgcctttgaatttgtcttggaatatatggacaggatggttggctacaaagactggctagtagagaatgcaccaggagatgaggttccaattggccattccttaacaggttttgccactgcctttgactttttatataacttattagataatcatcgaagacaaaaatacctggaaaaaatatgggttattactgaggaaatgtacgagtattccaaggtccgctcatggggcaaacagcttctccataaccaccaagccactaatatgatagcattactcacaggggccttggtgactggagtagataaaggatctaaagcaaatatatggaaacaggctgtagtggatgtcatggaaaagacaatgtttctattgaatcatattgttgatggttctttggatgaaggtgtggcctatggaagctacacagctaaatccgtcacacagtatgtttttctggcccagcgccattttaatatcaacaacttggataataactggttaaagatgcacttttggttctattatgccacccttttacctggcttccaaagaactgtgggtatagcagattccaattataattggttttatggtccagaaagccagctagttttcttggataagttcatcttaaagaatggagctggaaattggttagctcagcaaattagaaagcaccgacctaaagatggaccgatggttccttcaactgcccaaaggtggagtactcttcacactgaatacatctggtatgatccccagctcacaccacagccacctgctgattatggtactgcaaaaatacacacattccctaactggggtgtggttacttatggggctgggttgccaaacacacagaccaacacctttgtgtcttttaaatctgggaagctggggggacgagctgtgtatgacatagttcattttcagccatattcctggattgatgggtggagaagttttaacccaggacatgagcatccagatcagaactcatttacttttgcccccaatggacaagtatttgtttctgaagctctctatggacccaagttgagccaccttaacaatgtattggtgtttgctccatcaccctcaagccagtgtaataagccctgggaaggtcaactgggagaatgtgcgcagtggcttaagtggactggcgaggaggttggtgatgcagctggggaaataatcactgcctctcaacatggggaaatggtatttgtgagtggggaagccgtgtctgcttattcttcagcaatgagactgaaaagtgtatatcgtgctttgcttctcttaaattcccaaactctgctagttgttgatcatattgagaggcaagaagattccccaataaattctgtcagtgccttctttcataatttggatattgattttaaatatatcccatataagtttatgaataggtataatggtgccatgatggatgtgtgggatgcacattacaaaatgttttggtttgatcatcatggcaatagtcccatggccagtatacaggaagcagagcaagctgctgaatttaaaaaacgatggactcaatttgttaatgttacttttcagatggaacccacaatcacaagaattgcatatgtcttttatgggccatatatcaatgtctccagctgcagatttattgatagttccaatcctggacttcagatttctctcaatgtcaataatactgaacatgttgtttctattgtaactgattaccataacctgaagacaagattcaattatctgggattcggtggctttgccagtgtggctgatcaaggccaaataacccgatttggtttgggcactcaagcaatagtaaagcctgtaagacatgataggattattttcccctttggatttaaatttaatatagcagttggattaattttgtgcattagcttggtgattttaactttccaatggcgtttttacctttcttttagaaaactaatgcgatggatattaatacttgttattgccttgtggtttattgagcttttggatgtgtggagcacttgtagtcagcccatttgtgcaaaatggacaaggacagaggctgagggaagcaagaagtctttgtcttctgaagggcaccacatggatcttcctgatgttgtcattacctcacttcctggttcaggagctgaaattctcaaacaactttttttcaacagtagtgattttctctacatcagggttcctacagcctacattgatattcctgaaactgagttggaaatcgactcatttgtagatgcttgtgaatggaaggtgtcagatatccgcagtgggcattttcgtttactccgaggctggttgcagtctttagtccaggacacaaaattacatttgcaaaacatccatctgcatgaacccaataggggtaaactggcccaatattttgcaatgaataaggacaaaaaaagaaaatttaaaaggagagagtctttgccagaacaaagaagtcaaatgaaaggcgcctttgatagagatgctgaatatattagggctttgaggagacacctggtttactatccaagtgcacgtcctgtgctcagtttaagcagtggaagctggacgttaaagcttcatttttttcaggaagttttaggagcttcgatgagggcattgtacatagtaagagaccctcgggcatggatttattcaatgttgtacaatagtaaaccaagtctttattctttgaagaatgtaccagagcatttagcaaaattgtttaaaatagagggaggtaaaggcaaatgtaacttaaattcgggttatgctttcgagtatgaaccattgaggaaagaattatcaaaatccaaatcaaatgcagtgtccctcttgtctcacttgtggctagcaaatacagcagcagccttgagaataaatacagatttgctgcctactagctaccagctggtcaagtttgaagatattgtgcattttcctcagaaaactactgaaaggatttttgcctttcttggaattcctttgtctcctgctagtttaaaccaaatattgtttgccacctctacaaaccttttttaccttccctatgaaggggaaatatcaccaactaatactaatgtttggaaacagaacttgcctagagatgaaattaaactaattgaaaacatctgctggactctgatggatcgcctaggatatccaaagtttatggactaaatgctgcaggtcagcagaaatttgcactaataatacttaccaacccactttgtggatatgaatcagaagagtttgtttattctttagtgtgtgtgtgtgtgtgcacgcgtgtatgtgttcagtgttgtttgcacagagagattgttttaaaaaatggcaccatatttggcctagcaggatttatttttatgtcatcacctcccttgcctttgtttctgaaaattttgtctgctaaaaagtttctgctacagagtggtagatgaagttatatcatggggtcaggggagatgggaaaattttaagtttttgtctaactccccttcatctgtaactgtgctaatctatctagagacctcaaacactgctaaaggccttgcaattgctgctttacccacgcatctcttgctttcaagatggactacaaaagttccttatccttttgaaaaggtcttctgacacacttatcttgcacaaagaaaaagaaaatttcttttactgtgtttaatgttcagtgatatcactgaggaaatggtgaaagctcctatcagaactataggatttcttctgggaaatacagatggaaatacagaatgaatatgtttttttgaggtcggaaactgactttaaaagcctccttgaagttttttacttagaaatataaggaataagtctttgaacaatctgggtggcaagggctggtagattattttagacatgattgtctgtttaaaactctcctttcactttttatcctccctggagctacagctgttcgccatcacatcactcccatcctatcctttctgtcactgtcaagcaaaacaatcagtagttactaatcgctgaactctcaatattgtggggcattttccccccagttgattaattttgcgttaaagactgacacagacttagaatcaaatttatttttctggaattaacactctgtgactcaaagtagtgccactgcagtgtctttttaaactggaaacagaattggaaaactgcctgacttatcttgcatccctttgaatgagtttacagactgccagtgtctgcaaaagttgaaagcaaatgggagatgatgtcagaggcatctgtttcctttaccatctgcatcttattataaatgtagtcgtcataaagtgtggtttattttattttggtaggctctgaaatcaaaatgctacgccattataagccagtggagtaattacaatgtattggatgaaaacataaggcagtgtggagacttgatgaaaatctctgtacagattgcagtcttcttcctgatgtttcaaactgtggttcccccaagctctctaacacttggaagtctgtcattctgacctagataaaagtggttctttctcagtagttattattatgtcaaaatgtgcctccagagtgataaagctctgtatatgttagattccagctaaacctaacttggctgtcatttttcttccattatagtgtgagtggagactgccccccctccccaacatattccttcccatatctctcatgattgtccctctgtaatttcaaaatgaatgaaattcatgtgaatgtaggttgagagggcactgaagacctgaatctacactagtaatctcaagaaagattattcattctatctcagagttaccggcaagcatataaaatgctacttggataatatctacatgaatattgcatgctacatggttgataacactatttccattattgggcagaatctcagtgtttactttcaattcctaggatatgtgatcgtgaatcagatcacatataaaaagtctggattgtcagtagtattagatctgatcaaggtaggaattacaattgcatgcaggtagcaagcaagaaagcagaaactactgttccctttattttaacattgtacagacaatacagaaatgtacctgttggcggccgggtgcagtggctcacgcctgtaatcccagcacttcgggaggccgaggcgggtggatcacgaggtcaggagatcaagaccatcctggctaacacggtgaaaccccgtctctactaaaaaaaaaagtacaaaaaattagccgggcgtggtggcgggcacctgtagtcccagctacacgggaggctgaggcaggagaatggcatgaacctgggaggcagagcttgcagtgagtggagatgcgccactgcactccagcctgggcgacagagcgagactccgcctcaaaaaaaaaaaaaaaagaaaaaaagaaatgtacctgttggcaggagaaggccagatggagtatgtggagtaatagggaaagaagagttacagaaaatgaaaaagaaaatgagttacactgagaatgaatatgggaacacgtcattgatagcaaaagaaaggtacaggcttacgaaaatgatctttacaatgtatcccagctttcacccccacatggcaatgcagagttgtatttacttgtttctgtactcacctactcccaccccaagggaaaattttagacatgaaccctactatttagttattctaaaatagaaagtttgctggagaaagcgtccactcacagattgttctgtaaggaatgttatgtatgggtgagcgggtgacacatccattgggtatgtatgcatgtgatggtgcctgagacccctgccttagaaacagaattcctaaggggattgactctcccagcatgttcccaggtcctgcacccttagggtgatctaggaaaattttaaatagcttctactcttatttttgttctttgaaataattaaaagagggattatcactatctgatacttctgaaagaaacacttacaaaatttcttatctgtaaaatccgtctttttctacattaacttccccaaacataggcctaattgagataattgcttttattataataataggattgaaattttaaaattttgaaaggacttattaattttgctgacaaaagtgaagtaacaaatataatgataattggctttttaaattttcaaacaacatagatttactcaagatgaaataaaaaggccatattcagagttgaatttaatgaaaactcagaggaaataggaaaatctgctcaggagaaagaagctaaatctgcatagatttagtttgtagaatttaatttaaaatttaaattttaacaaagtgatgacacaacaatatgtacgtttaggtgtggacaccaaaatattagacatttgattgtccttttacatagagaataactaataaatgcctgacaagaatgggacaatccttccttgtatcaaaattcccaggtcttgctacattgccctctgcaaatgtattcaaagaagaacctcctccaccacttacttttggttggcataattgttcagcaacgatttctgtacatcaccaagtatctttggcattcttggtatacaaagtatatcacaattttaagtgagtaaatattaatgataatttttgaattgctttgtttggcttgattaactttgatcagaaatagaaacgttttcatttgttgatttaggaaaaagcataaatagaatgcagtataacaccacttccaaaggtaaggatacctaacattcttttttttttttttttttttttttttgggatggagtctcactttgttgcccaggctggagtgcagtggtctgatctcggctcactgcaacctccgcctaccgggttcaagtgattctcctacgtcagcctcctgaatagctgggattacaggtgcacgccaccatgcttggctcatttttgtatttttagtagtgacagcgtttcaccacattggtcaggctggtctcaatctcttgacctggtgatctgcccacctgggcctcccaaaatgctgggattacaggcatgagccaccacacctggcaagggtacctgacattctaagatatcaagacacttaatatgtgggctattagctgcttatttaaatgttgaccaaattgtctgatatatctgattaatcatgatttcacttcatttcggaagaaaaattatccatatcatttttaaagacgcaaatgactttggatttttgcatagagtacaatagacacttcaaacaatagattctaacattctctgaaacacttgagatgtttgagctaccatttatatgggttatttatatttagtctaagtaacacatacatgtttaattgattctgttttcatggatagattcaactaagtcttccaagcaattaattttttgttcgtcgtcgtttttccttcatacgttatctagttatgcagcactggaaacagactgaagatcataaaccagttttatcagacctatgtgtaataagactcctgttaatacaaaaataaaaagctaaaagcaacttgt

SEQ ID NO: 8205 - DNA, 9525 bp, Homo sapiens
  source 1..9525: mol_type = unassigned DNA
acctgctttcggccccgccccgcccgccgccggcctgctcacggctcctcccgtcctccccgaagccccgcctctgaccccgccctgtcctgtctccgtcccgccccacgcccgccagccagcgtcgctgtctctcgccttccctgaggccccgccttcagccccgccttcaaccccgccccgtcctgcctccgccccgcccccgcttgccggcccgcgtcgccgtctcaccctccccgggctgcgcggccggagctggcacagaggatcctcggccgcggcgacatcaccgcctgggcacgcgggcgctgctctggatacggcgccaccgagagaacccgccgcccgcgggtctctgtcctgcggtccgtggttgcccccacaagcgtccggcgtttcctgagggcgggcgtgtccgggccgtgcgggtcgcggggaccgagcgcggctgaggagaccgagctggggcagcgcctgccgtagcgcgggagacgacgcgggggtcttgcggagccccgcgggagcctggcccgccgtgcagagcagttttctggaactctccacctccgtctcccttggggcccagtgcggcgccgagcccccgtcgggatctgcctgagaaagtgtcatgaaaaaagagcagaagagagacctcactgttgctgaaaggggaattttctttccccgttggcggttacttcatgatcggacgagaagtatctaggtgactgaagatattccatttttatgtttgtacacatgaagctgataaaagaagatgtgaacatgatttctctttgtcataataggctgatgagtaagtaagcctgaaaaatatttgaaatgaaggcaagaattttgaatttttaaaaaccaactaagactttgatcacttgttgaggatgtttctctctcataaatgaaagaaaaacgtattcacaagacaagaagtataaaaagttgagaggaatgacaactgagtccactcactcgaagaatgtcagtacttcatcatcttctttgggcaaacatacacaaatgcatcatacatgtgtggtgagcttatcaccagtgatggttttctgtgctagaaatgactcttaatttgaattttggagtgctttttctctttttttacaatgtgtgttccaactctttgtgttaaatagatttaagtaaaggaggtaaatgctaaattcatagtgttttttacctgtatcacttccctgtgtattatggaaaaattagagattttaacgttattcaaagttttactggaagcaaaactgtgccagggacagagatatacaatttaagttttctctttttggcaactgcacttgcttaaaatgtactgaatgtcagctggatttcacagcatatcagatttacagtctttgtcttatcaaggcctttactgtatgttttatactaaccagatgggaaacacattgagcatcatatctgacatgtatgcctaagggaggagctcccccatggatcatggcgttaatgtttacaggacatttactattcttagcattattgatgtttgctttctctacttttgaggaatctgtgagcaattattccgaatgggcagttttcacagatgatatagatcagtttaaaacacagaaagtgcaagatttcagacccaaccaaaagctgaagaaaagtatgcttcatccaagtttatattttgatgctggagaaatccaagcaatgagacaaaagtctcgtgcaagccatttgcatctttttagagctatcagaagtgcagtgacagttatgctgtccaacccaacatactacctacctccaccaaagcatgctgattttgctgccaagtggaatgaaatttatggtaacaatctgcctcctttagcattgtactgtttgttatgcccagaagacaaagttgcctttgaatttgtcttggaatatatggacaggatggttggctacaaagactggctagtagagaatgcaccaggagatgaggttccaattggccattccttaacaggttttgccactgcctttgactttttatataacttattagataatcatcgaagacaaaaatacctggaaaaaatatgggttattactgaggaaatgtacgagtattccaaggtccgctcatggggcaaacagcttctccataaccaccaagccactaatatgatagcattactcacaggggccttggtgactggagtagataaaggatctaaagcaaatatatggaaacaggctgtagtggatgtcatggaaaagacaatgtttctattgaatcatattgttgatggttctttggatgaaggtgtggcctatggaagctacacagctaaatccgtcacacagtatgtttttctggcccagcgccattttaatatcaacaacttggataataactggttaaagatgcacttttggttctattatgccacccttttacctggcttccaaagaactgtgggtatagcagattccaattataattggttttatggtccagaaagccagctagttttcttggataagttcatcttaaagaatggagctggaaattggttagctcagcaaattagaaagcaccgacctaaagatggaccgatggttccttcaactgcccaaaggtggagtactcttcacactgaatacatctggtatgatccccagctcacaccacagccacctgctgattatggtactgcaaaaatacacacattccctaactggggtgtggttacttatggggctgggttgccaaacacacagaccaacacctttgtgtcttttaaatctgggaagctggggggacgagctgtgtatgacatagttcattttcagccatattcctggattgatgggtggagaagttttaacccaggacatgagcatccagatcagaactcatttacttttgcccccaatggacaagtatttgtttctgaagctctctatggacccaagttgagccaccttaacaatgtattggtgtttgctccatcaccctcaagccagtgtaataagccctgggaaggtcaactgggagaatgtgcgcagtggcttaagtggactggcgaggaggttggtgatgcagctggggaaataatcactgcctctcaacatggggaaatggtatttgtgagtggggaagccgtgtctgcttattcttcagcaatgagactgaaaagtgtatatcgtgctttgcttctcttaaattcccaaactctgctagttgttgatcatattgagaggcaagaagattccccaataaattctgtcagtgccttctttcataatttggatattgattttaaatatatcccatataagtttatgaataggtataatggtgccatgatggatgtgtgggatgcacattacaaaatgttttggtttgatcatcatggcaatagtcccatggccagtatacaggaagcagagcaagctgctgaatttaaaaaacgatggactcaatttgttaatgttacttttcagatggaacccacaatcacaagaattgcatatgtcttttatgggccatatatcaatgtctccagctgcagatttattgatagttccaatcctggacttcagatttctctcaatgtcaataatactgaacatgttgtttctattgtaactgattaccataacctgaagacaagattcaattatctgggattcggtggctttgccagtgtggctgatcaaggccaaataacccgatttggtttgggcactcaagcaatagtaaagcctgtaagacatgataggattattttcccctttggatttaaatttaatatagcagttggattaattttgtgcattagcttggtgattttaactttccaatggcgtttttacctttcttttagaaaactaatgcgatggatattaatacttgttattgccttgtggtttattgagcttttggatgtgtggagcacttgtagtcagcccatttgtgcaaaatggacaaggacagaggctgagggaagcaagaagtctttgtcttctgaagggcaccacatggatcttcctgatgttgtcattacctcacttcctggttcaggagctgaaattctcaaacaactttttttcaacagtagtgattttctctacatcagggttcctacagcctacattgatattcctgaaactgagttggaaatcgactcatttgtagatgcttgtgaatggaaggtgtcagatatccgcagtgggcattttcgtttactccgaggctggttgcagtctttagtccaggacacaaaattacatttgcaaaacatccatctgcatgaacccaataggggtaaactggcccaatattttgcaatgaataaggacaaaaaaagaaaatttaaaaggagagagtctttgccagaacaaagaagtcaaatgaaaggcgcctttgatagagatgctgaatatattagggctttgaggagacacctggtttactatccaagtgcacgtcctgtgctcagtttaagcagtggaagctggacgttaaagcttcatttttttcaggaagttttaggagcttcgatgagggcattgtacatagtaagagaccctcgggcatggatttattcaatgttgtacaatagtaaaccaagtctttattctttgaagaatgtaccagagcatttagcaaaattgtttaaaatagagggaggtaaaggcaaatgtaacttaaattcgggttatgctttcgagtatgaaccattgaggaaagaattatcaaaatccaaatcaaatgcagtgtccctcttgtctcacttgtggctagcaaatacagcagcagccttgagaataaatacagatttgctgcctactagctaccagctggtcaagtttgaagatattgtgcattttcctcagaaaactactgaaaggatttttgcctttcttggaattcctttgtctcctgctagtttaaaccaaatattgtttgccacctctacaaaccttttttaccttccctatgaaggggaaatatcaccaactaatactaatgtttggaaacagaacttgcctagagatgaaattaaactaattgaaaacatctgctggactctgatggatcgcctaggatatccaaagtttatggactaaatgctgcaggtcagcagaaatttgcactaataatacttaccaacccactttgtggatatgaatcagaagagtttgtttattctttagtgtgtgtgtgtgtgtgcacgcgtgtatgtgttcagtgttgtttgcacagagagattgttttaaaaaatggcaccatatttggcctagcaggatttatttttatgtcatcacctcccttgcctttgtttctgaaaattttgtctgctaaaaagtttctgctacagagtggtagatgaagttatatcatggggtcaggggagatgggaaaattttaagtttttgtctaactccccttcatctgtaactgtgctaatctatctagagacctcaaacactgctaaaggccttgcaattgctgctttacccacgcatctcttgctttcaagatggactacaaaagttccttatccttttgaaaaggtcttctgacacacttatcttgcacaaagaaaaagaaaatttcttttactgtgtttaatgttcagtgatatcactgaggaaatggtgaaagctcctatcagaactataggatttcttctgggaaatacagatggaaatacagaatgaatatgtttttttgaggtcggaaactgactttaaaagcctccttgaagttttttacttagaaatataaggaataagtctttgaacaatctgggtggcaagggctggtagattattttagacatgattgtctgtttaaaactctcctttcactttttatcctccctggagctacagctgttcgccatcacatcactcccatcctatcctttctgtcactgtcaagcaaaacaatcagtagttactaatcgctgaactctcaatattgtggggcattttccccccagttgattaattttgcgttaaagactgacacagacttagaatcaaatttatttttctggaattaacactctgtgactcaaagtagtgccactgcagtgtctttttaaactggaaacagaattggaaaactgcctgacttatcttgcatccctttgaatgagtttacagactgccagtgtctgcaaaagttgaaagcaaatgggagatgatgtcagaggcatctgtttcctttaccatctgcatcttattataaatgtagtcgtcataaagtgtggtttattttattttggtaggctctgaaatcaaaatgctacgccattataagccagtggagtaattacaatgtattggatgaaaacataaggcagtgtggagacttgatgaaaatctctgtacagattgcagtcttcttcctgatgtttcaaactgtggttcccccaagctctctaacacttggaagtctgtcattctgacctagataaaagtggttctttctcagtagttattattatgtcaaaatgtgcctccagagtgataaagctctgtatatgttagattccagctaaacctaacttggctgtcatttttcttccattatagtgtgagtggagactgccccccctccccaacatattccttcccatatctctcatgattgtccctctgtaatttcaaaatgaatgaaattcatgtgaatgtaggttgagagggcactgaagacctgaatctacactagtaatctcaagaaagattattcattctatctcagagttaccggcaagcatataaaatgctacttggataatatctacatgaatattgcatgctacatggttgataacactatttccattattgggcagaatctcagtgtttactttcaattcctaggatatgtgatcgtgaatcagatcacatataaaaagtctggattgtcagtagtattagatctgatcaaggtaggaattacaattgcatgcaggtagcaagcaagaaagcagaaactactgttccctttattttaacattgtacagacaatacagaaatgtacctgttggcggccgggtgcagtggctcacgcctgtaatcccagcacttcgggaggccgaggcgggtggatcacgaggtcaggagatcaagaccatcctggctaacacggtgaaaccccgtctctactaaaaaaaaaagtacaaaaaattagccgggcgtggtggcgggcacctgtagtcccagctacacgggaggctgaggcaggagaatggcatgaacctgggaggcagagcttgcagtgagtggagatgcgccactgcactccagcctgggcgacagagcgagactccgcctcaaaaaaaaaaaaaaaagaaaaaaagaaatgtacctgttggcaggagaaggccagatggagtatgtggagtaatagggaaagaagagttacagaaaatgaaaaagaaaatgagttacactgagaatgaatatgggaacacgtcattgatagcaaaagaaaggtacaggcttacgaaaatgatctttacaatgtatcccagctttcacccccacatggcaatgcagagttgtatttacttgtttctgtactcacctactcccaccccaagggaaaattttagacatgaaccctactatttagttattctaaaatagaaagtttgctggagaaagcgtccactcacagattgttctgtaaggaatgttatgtatgggtgagcgggtgacacatccattgggtatgtatgcatgtgatggtgcctgagacccctgccttagaaacagaattcctaaggggattgactctcccagcatgttcccaggtcctgcacccttagggtgatctaggaaaattttaaatagcttctactcttatttttgttctttgaaataattaaaagagggattatcactatctgatacttctgaaagaaacacttacaaaatttcttatctgtaaaatccgtctttttctacattaacttccccaaacataggcctaattgagataattgcttttattataataataggattgaaattttaaaattttgaaaggacttattaattttgctgacaaaagtgaagtaacaaatataatgataattggctttttaaattttcaaacaacatagatttactcaagatgaaataaaaaggccatattcagagttgaatttaatgaaaactcagaggaaataggaaaatctgctcaggagaaagaagctaaatctgcatagatttagtttgtagaatttaatttaaaatttaaattttaacaaagtgatgacacaacaatatgtacgtttaggtgtggacaccaaaatattagacatttgattgtccttttacatagagaataactaataaatgcctgacaagaatgggacaatccttccttgtatcaaaattcccaggtcttgctacattgccctctgcaaatgtattcaaagaagaacctcctccaccacttacttttggttggcataattgttcagcaacgatttctgtacatcaccaagtatctttggcattcttggtatacaaagtatatcacaattttaagtgagtaaatattaatgataatttttgaattgctttgtttggcttgattaactttgatcagaaatagaaacgttttcatttgttgatttaggaaaaagcataaatagaatgcagtataacaccacttccaaaggtaaggatacctaacattcttttttttttttttttttttttttttgggatggagtctcactttgttgcccaggctggagtgcagtggtctgatctcggctcactgcaacctccgcctaccgggttcaagtgattctcctacgtcagcctcctgaatagctgggattacaggtgcacgccaccatgcttggctcatttttgtatttttagtagtgacagcgtttcaccacattggtcaggctggtctcaatctcttgacctggtgatctgcccacctgggcctcccaaaatgctgggattacaggcatgagccaccacacctggcaagggtacctgacattctaagatatcaagacacttaatatgtgggctattagctgcttatttaaatgttgaccaaattgtctgatatatctgattaatcatgatttcacttcatttcggaagaaaaattatccatatcatttttaaagacgcaaatgactttggatttttgcatagagtacaatagacacttcaaacaatagattctaacattctctgaaacacttgagatgtttgagctaccatttatatgggttatttatatttagtctaagtaacacatacatgtttaattgattctgttttcatggatagattcaactaagtcttccaagcaattaattttttgttcgtcgtcgtttttccttcatacgttatctagttatgcagcactggaaacagactgaagatcataaaccagttttatcagacctatgtgtaataagactcctgttaatacaaaaataaaaagctaaaagcaa

SEQ ID NO: 8206 - DNA, 1786 bp, Homo sapiens
  source 1..1786: mol_type = unassigned DNA
acatctggaagccacatgtcagcggcagctatataaaacggtcagaccagcaatcttagagtgacattgtttgccaaaatcccaggcagcatggacctcagtcttctctgggtacttctgcccctagtcaccatggcctggggccagtatggcgattatggatacccataccagcagtatcatgactacagcgatgatgggtgggtgaatttgaaccggcaaggcttcagctaccagtgtccccaggggcaggtgatagtggccgtgaggagcatcttcagcaagaaggaaggttctgacagacaatggaactacgcctgcatgcccacgccacagagcctcggggaacccacggagtgctggtgggaggagatcaacagggctggcatggaatggtaccagacgtgctccaacaatgggctggtggcaggattccagagccgctacttcgagtcagtgctggatcgggagtggcagttttactgttgtcgctacagcaagaggtgcccatattcctgctggctaacaacagaatatccaggtcactatggtgaggaaatggacatgatttcctacaattatgattactatatccgaggagcaacaaccactttctctgcagtggaaagggatcgccagtggaagttcataatgtgccggatgactgaatacgactgtgaatttgcaaatgtttagatttgccacataccaaatctgggtgaaaggaaaggggccggggacaggagggtgtccacatatgttaacatcagttggatctcctatagaagtttctgctgctctctttccttctccctgagctggtaactgcaatgccaacttcctgggcctttctgactagtatcacacttctaataaaatccacaattaaaccatgtttctcacttttcacatgtttcatagcaactgctttatatgactgatgatggcttccttgcacaccacatatacagtgcgcatgcttacagccgggcttctggagcaccagctgcagcctggctactgctttttactgcagaatgaactgcaagttcagcatagtggaggggagaggcagaactggaggagaggtgcagtgaaggttctctacagctaagcctgtttgaatgatacgtaggttccccaccaaaagcaggctttctgccctgagggacatcttcccactcccctgctccacatgagccatgcatgcttagcaatccaagtgcagagctctttgctccaggagtgaggagactgggaggtgaaatggggaaatggaagggtttggaggcagagctgaaaacagggttggaaggatttcctgaattagaagacaaacgttagcatacccagtaaggaaaatgagtgcaggggccaggggaacccgtgaggatcactctcaaatgagattaaaaacaaggaagcagagaatggtcagagaatgggattcagattgggaacttgtggggatgagagtgaccaggttgaactgggaagtggaaaaaggagtttgagtcactggcacctagaagcctgcccacgattcctaggaaggctggcagacaccctggaaccctggggagctactggcaaactctcctggattgggcctgatttttttggtgggaaaggctgccctggggatcaactttccttctgtgtgtggctcaggagttcttctgcagagatggcgctatctttcctcctcctgtgatgtcctgctcccaaccatttgtactcttcattacaaaagaaataaaaatattaacgttcactatgctgaaaa

SEQ ID NO: 8207 - DNA, 645 bp, Homo sapiens
  source 1..645: mol_type = unassigned DNA
cagccagcctttgttgacttaacaggtggctctgaggtgggagaagaggaggaggagaacacaccactggaagactggttcccattggtccctgtcatgcttaaaaaaaggcccagagaggcagtcttgacaccctagatcccaagatctccaaggatttggtggcatacccactccagcacacagaagcatgaggttcatgactctcctcttcctgacagctctggcaggagccctggtctgtgcctatgatccagaggccgcctctgccccaggatcggggaacccttgccatgaagcatcagcagctcaaaaggaaaatgcaggtgaagacccagggttagccagacaggcaccaaagccaaggaagcagagatccagccttctggaaaaaggcctagacggagcaaaaaaagctgtggggggactcggaaaactaggaaaagatgcagtcgaagatctagaaagcgtgggtaaaggagccgtccatgacgttaaagacgtccttgactcagtactatagctgtaaggagaagctgagaaatgatacccaggagcagcaggctttacgtcttcagcctaaaacctaaaaaaaaaaaaaaaaaaaaaaatttaaaacagctattaaactgaaagcatctgtaa

SEQ ID NO: 8208 - DNA, 1936 bp, Homo sapiens
  source 1..1936: mol_type = unassigned DNA
gtccggagtccgggcgttctggcagcaccagagtcctgcagcagagacgggctgggctggcactcacccacgaccccccttccctgctatgatggtttgtcagtagcaggtcctagacaccccccgcccgctcccggggcacgtgggcagagctagcagcagccaggtgcacggagccacaagagctctagggcactctgggggcagctgtgcctgctgccctctctggtgcctgtggagatgcctaactgacaggagagttagtgaggacaagaacgctcccttttggccgaggtccgctgtatccatggctctcctgaccaatctactgcccctgtgctgcttggcacttctggcgctgccagcccagagctgcgggccgggccgggggccggttggccggcgccgctatgcgcgcaagcagctcgtgccgctactctacaagcaatttgtgcccggcgtgccagagcggaccctgggcgccagtgggccagcggaggggagggtggcaaggggctccgagcgcttccgggacctcgtgcccaactacaaccccgacatcatcttcaaggatgaggagaacagtggagccgaccgcctgatgaccgagcgttgtaaggagcgggtgaacgctttggccattgccgtgatgaacatgtggcccggagtgcgcctacgagtgactgagggctgggacgaggacggccaccacgctcaggattcactccactacgaaggccgtgctttggacatcactacgtctgaccgcgaccgcaacaagtatgggttgctggcgcgcctcgcagtggaagccggcttcgactgggtctactacgagtcccgcaaccacgtccacgtgtcggtcaaagctgataactcactggcggtccgggcgggcggctgctttccgggaaatgcaactgtgcgcctgtggagcggcgagcggaaagggctgcgggaactgcaccgcggagactgggttttggcggccgatgcgtcaggccgggtggtgcccacgccggtgctgctcttcctggaccgggacttgcagcgccgggcttcatttgtggctgtggagaccgagtggcctccacgcaaactgttgctcacgccctggcacctggtgtttgccgctcgagggccggcgcccgcgccaggcgactttgcaccggtgttcgcgcgccggctacgcgctggggactcggtgctggcgcccggcggggatgcgcttcggccagcgcgcgtggcccgtgtggcgcgggaggaagccgtgggcgtgttcgcgccgctcaccgcgcacgggacgctgctggtgaacgatgtcctggcctcttgctacgcggttctggagagtcaccagtgggcgcaccgcgcttttgcccccttgagactgctgcacgcgctaggggcgctgctccccggcggggccgtccagccgactggcatgcattggtactctcggctcctctaccgcttagcggaggagctactgggctgagcgtcccaggcatagaaacctcgaagcgcccgaggaaacgagggcctgctggctgagatatggggctgtgggcagcagacgatgccgactggaagggagggagagggagggggagggagaaaatggggctatgcctggcttaggggcaacctcgtactgagaggaggtgataccgggtcctaggtaggtagggctgatggtgcgcactccttaaagaggactatttagcctctcccccagtgcttcagccccacccgataattttattttatttcttatttataaattgtaatataatgattcccttgcccagcttgccaaggtgaggggctggggcatggcattaacactgtctgacacagccagccagtctgacatctgacgttttcctgcaaggtgggctaataaagggaaggctttcaggagcttactggaaaa

SEQ ID NO: 8209 - DNA, 2248 bp, Homo sapiens
  source 1..2248: mol_type = unassigned DNA
gtctcccctcgccgcatccactctccggccggccgcctgcccgccgcctcctccgtgcgcccgccagcctcgcccgcgccgtcaccatgagccaggcctactcgtccagccagcgcgtgtcctcctaccgccgcaccttcggcggggccccgggcttcccactcggctccccgctgagttcgcccgtgttcccgcgggcgggtttcggctctaagggctcctccagctcggtgacgtcccgcgtgtaccaggtgtcgcgcacgtcgggcggggccgggggcctggggtcgctgcgggccagccggctggggaccacccgcacgccctcctcctacggcgcaggcgagctgctggacttctcactggccgacgcggtgaaccaggagtttctgaccacgcgcaccaacgagaaggtggagctgcaggagctcaatgaccgcttcgccaactacatcgagaaggtgcgcttcctggagcagcagaacgcggcgctcgccgccgaagtgaaccggctcaagggccgcgagccgacgcgagtggccgagctctacgaggaggagctgcgggagctgcggcgccaggtggaggtgctcactaaccagcgcgcgcgcgtcgacgtcgagcgcgacaacctgctcgacgacctgcagcggctcaaggccaagctgcaggaggagattcagttgaaggaagaagcagagaacaatttggctgccttccgagcggacgtggatgcagctactctagctcgcattgacctggagcgcagaattgaatctctcaacgaggagatcgcgttccttaagaaagtgcatgaagaggagatccgtgagttgcaggctcagcttcaggaacagcaggtccaggtggagatggacatgtctaagccagacctcactgccgccctcagggacatccgggctcagtatgagaccatcgcggctaagaacatttctgaagctgaggagtggtacaagtcgaaggtgtcagacctgacccaggcagccaacaagaacaacgacgccctgcgccaggccaagcaggagatgatggaataccgacaccagatccagtcctacacctgcgagattgacgccctgaagggcactaacgattccctgatgaggcagatgcgggaattggaggaccgatttgccagtgaggccagtggctaccaggacaacattgcgcgcctggaggaggaaatccggcacctcaaggatgagatggcccgccatctgcgcgagtaccaggacctgctcaacgtgaagatggccctggatgtggagattgccacctaccggaagctgctggagggagaggagagccggatcaatctccccatccagacctactctgccctcaacttccgagaaaccagccctgagcaaaggggttctgaggtccataccaagaagacggtgatgatcaagaccatcgagacacgggatggggaggtcgtcagtgaggccacacagcagcagcatgaagtgctctaaagacagagaccctctgccaccagagaccgtcctcacccctgtcctcactgctccctgaagccagccttcttccatcccaggacaccacacccagcctcagtcctcccctcacagcctctgacccctcctcactggccatccctcgtggtccccaacagcgacatagcccatccctgcctggtcacagggcatgccccggccacctctgcggaccccagctgtgagccttggctgttggcagtgagtgagcctggctcttgtgctggatggagcccaggcgggagcggtggccctgtccctcccacctctgtgacctcaggcactagcctttggctctggagacagccccagagcagggtgttgggatactgcagggccaggactgagccccgcagacctccccagcccctagcccaggagagagaaagccaggcaggtagccagggggactagcccctgtggagactggggggcttgaaattgtccccgtggtctcttactttcctttccccagcccagggtggacttagaaagcaggggctacaagagggaatccccgaaggtgctggaggtgggagcaggagattgagaaggagagaaagtgggtgagatgctggagaagagaggagaggagagaggcagagagcggtctcaggctggtgggaggggcgcccacctccccacgccctcccctcccctgctgcaggggctctggagagaaacaataaagagattcacacacaagccaa

SEQ ID NO: 8210 - DNA, 4271 bp, Homo sapiens
  source 1..4271: mol_type = unassigned DNA
acttgtaggaaagcctctttgcatttagacgtaattgaactggaaggaaggagactggccagggaatagggggaaagaaattctcccgttgctcctcctactgtttatcacttgcctccggactgtcttccaaaccaagctcagctgcatcaaggtggcagcagaataccctgtgcaagtgccagcgtcttcttagccgctctgtgcatcccaggctgccctgttatctggccaccgtccctggccattgggactgcttctgatggctctggcctctgctgccccagggagcatcttctgtaagcagctccttttctctctcctggttttaacattactttgcgatgcttgtcagaaagtttatcttcgagttccttctcatcttcaggctgaaacacttgtaggcaaagtgaatctggaggagtgtctcaagtcggccagcctaatccggtccagtgaccctgccttcagaattctagaagatggctcaatttacacaacacatgacctcattttgtcttctgaaaggaaaagtttttccattttcctttcagatggtcagagacgggaacaacaagagataaaagttgtactgtcagcaagagaaaacaagtctcctaagaagagacataccaaagacacagccctcaagcgcagcaagagacgatgggctcctattccagcttcattgatggagaactcgttgggtccatttccacaacacgttcagcagatccaatctgatgctgcacagaattacaccatcttttattccataagtgggccaggcgtggacaaagaacccttcaatttgttttacatagagaaagacactggggatatcttttgtacaaggagcattgaccgtgagaaatatgaacagtttgcgttatatggctatgcaacaactgcagatggctatgcaccagaatatccactccctttgatcatcaaaattgaagatgataatgataacgccccatattttgaacacagagtgactatctttactgtgcctgaaaattgccgatccggaacttcagtgggaaaagtgaccgccacagaccttgacgaacctgacactctccatactcgtctgaaatataaaatcttacaacaaatcccagatcatccaaagcatttctccatacacccagataccggtgtcatcaccacaactacaccttttctggatagagaaaaatgtgatacttaccagttaataatggaagtgcgagacatgggtggtcagcctttcggtttatttaatacaggaacaattactatttcacttgaggatgaaaatgacaatccaccatctttcacagaaacttcttatgttacagaagtagaagaaaacagaattgacgtggagattttacgaatgaaggtacaggatcaggatttgccaaacactcctcactcaaaggctgtatacaaaatcctacaaggaaatgaaaatggaaacttcataattagcacagatccaaatacaaatgaaggagtgctgtgtgttgtcaagccattgaactatgaagtcaatcgccaagttattttgcaagttggtgtcattaacgaggcacaattctctaaagcagcgagctcacaaactcctacaatgtgcactacaactgtcaccgttaaaattatagacagtgatgagggccctgaatgccaccctccagtgaaagttattcagagtcaagatggcttcccagctggccaagaactccttggatacaaagcactggacccggaaatatccagtggtgaaggcttaaggtatcagaagttaggggatgaagataactggtttgaaattaatcaacacactggcgacttgagaactctaaaagtactagatagagaatccaaatttgtaaaaaacaaccaatacaatatttcagttgttgcagtggatgcagttggccgatcttgcactggaacattagtagttcatttggatgattacaacgatcacgcacctcaaattgacaaagaagtgaccatttgtcagaataatgaggattttgctgttctgaaacctgtagatccagatggacctgaaaatggaccaccttttcaattctttctggataattctgccagtaaaaactggaacatagaagaaaaggatggtaaaactgccattcttcgtcaacggcaaaatcttgattataactattattctgtgcctattcaaataaaagacaggcatggtttagttgcaacacatatgttaacagtgagagtatgtgactgttcaactccatctgagtgtagaatgaaggataaaagtacaagagacgttagaccaaatgtaatacttggaagatgggctattcttgctatggtgttgggttctgtattgttattatgtattctgtttacatgtttctgtgtcactgctaagagaacagtcaagaaatgttttccagaagacatagcccagcaaaatttaattgtatcaaatactgaaggacctggagaagaagtaacggaagcaaatattagactccccatgcagacatccaacatttgtgacacaagcatgtctgttggtactgttggtggccagggaatcaaaacacagcaaagttttgagatggtcaaaggaggctacactttggattccaacaaaggaggtggacatcagaccttggagtccgtcaagggagtggggcagggagatactggcagatatgcgtacacggactggcagagtttcacccaacctcggcttggcgaagaatccattagaggacacactctgattaaaaattaaacagtaaaagaaggtgtatttgtgtggacaagatgaggagcataaacattgtgaagactacgtttgttcgtataactatgaaggcaaaggttctctggccggctcagtaggttgctgcagcgatcggcaggaagaagagggactggagtttctagatcacctggaacccaaatttaggacattagcaaagacatgcatcaagaaataaatgtgccttttaatagtgtaatatccacagatgcataagtaggaatttattacttgcagaatgttagcagcatctgctaatgtttttgtttatggaggtaaactttgtcatgtataggtaagggtactataaatatgagattcccctacattctccttgtctggtataacttccatgttctctagaaatcaaggttttgtttgttaattctcttttatatgcatgtatatattgcccttttcacgactgtactgtacaccttcttgcaccttttatttgcaaactgatgttactttttgtgctgtggaagagcatttgggaaagctgggtattatagaggccaatgaaagatgaatttgcattgtagatgtacgaattaaatatgttcttcaaaatcttggggagaattatgttcttagaacatagttggtgccagataattgcattctctccacctgagtggtttaaaaaggacttttaagtattcttcagtgcaatcttcagttttgtgattaagttcatttctcttttacacttttgtactcctcagagcagtgctcccagcattgttttctttcaggatccttcagagctcagtccctggacctctgcccatgtggatttgttgttaggtcactccaacttctagggttcttggaaagataaggaccagaacaagctcatagcaaattgaggggcagagattttatgaagattacatgagaagatttccatgaaagaattgcagccctgaggtccatgggttgacttatgctcacaaatatgtttcgtttgctcaacatggtttactactaacattttaaaaatataaatactttagcaaaaacattcactcttgagtttgacataggcctgccttatctgtggttgccacctgccatctccaagcatttggacaactagccctgatgcattaggctgcaactctgatatacagagactagcaccttgaatatgccagaaattgaattaccatctgtattagaacttaagactcagcctaaatttacagttactttaagaaaatgggcagtcagaattagggactagaatgtatatgagaaacccccactctactaaaaatataagaaattagccggacatggtggcgaatgactgtaatcccagctactcaggaggctgaggcaggagaatcgcttgaatccaggaggcggaggttgcagtgagccgagattgccactgcactccagcctgggcaacaagagcgaaactccgtctcaaaaaaaaaaaaaaaaa

SEQ ID NO: 8211 - DNA, 4225 bp, Homo sapiens
  source 1..4225: mol_type = unassigned DNA
acttgtaggaaagcctctttgcatttagacgtaattgaactggaaggaaggagactggccagggaatagggggaaagaaattctcccgttgctcctcctactgtttatcacttgcctccggactgtcttccaaaccaagctcagctgcatcaaggtggcagcagaataccctgtgcaagtgccagcgtcttcttagccgctctgtgcatcccaggctgccctgttatctggccaccgtccctggccattgggactgcttctgatggctctggcctctgctgccccagggagcatcttctgtaagcagctccttttctctctcctggttttaacattactttgcgatgcttgtcagaaagtttatcttcgagttccttctcatcttcaggctgaaacacttgtaggcaaagtgaatctggaggagtgtctcaagtcggccagcctaatccggtccagtgaccctgccttcagaattctagaagatggctcaatttacacaacacatgacctcattttgtcttctgaaaggaaaagtttttccattttcctttcagatggtcagagacgggaacaacaagagataaaagttgtactgtcagcaagagaaaacaagtctcctaagaagagacataccaaagacacagccctcaagcgcagcaagagacgatgggctcctattccagcttcattgatggagaactcgttgggtccatttccacaacacgttcagcagatccaatctgatgctgcacagaattacaccatcttttattccataagtgggccaggcgtggacaaagaacccttcaatttgttttacatagagaaagacactggggatatcttttgtacaaggagcattgaccgtgagaaatatgaacagtttgcgttatatggctatgcaacaactgcagatggctatgcaccagaatatccactccctttgatcatcaaaattgaagatgataatgataacgccccatattttgaacacagagtgactatctttactgtgcctgaaaattgccgatccggaacttcagtgggaaaagtgaccgccacagaccttgacgaacctgacactctccatactcgtctgaaatataaaatcttacaacaaatcccagatcatccaaagcatttctccatacacccagataccggtgtcatcaccacaactacaccttttctggatagagaaaaatgtgatacttaccagttaataatggaagtgcgagacatgggtggtcagcctttcggtttatttaatacaggaacaattactatttcacttgaggatgaaaatgacaatccaccatctttcacagaaacttcttatgttacagaagtagaagaaaacagaattgacgtggagattttacgaatgaaggtacaggatcaggatttgccaaacactcctcactcaaaggctgtatacaaaatcctacaaggaaatgaaaatggaaacttcataattagcacagatccaaatacaaatgaaggagtgctgtgtgttgtcaagccattgaactatgaagtcaatcgccaagttattttgcaagttggtgtcattaacgaggcacaattctctaaagcagcgagctcacaaactcctacaatgtgcactacaactgtcaccgttaaaattatagacagtgatgagggccctgaatgccaccctccagtgaaagttattcagagtcaagatggcttcccagctggccaagaactccttggatacaaagcactggacccggaaatatccagtggtgaaggcttaaggtatcagaagttaggggatgaagataactggtttgaaattaatcaacacactggcgacttgagaactctaaaagtactagatagagaatccaaatttgtaaaaaacaaccaatacaatatttcagttgttgcagtggatgcagttggccgatcttgcactggaacattagtagttcatttggatgattacaacgatcacgcacctcaaattgacaaagaagtgaccatttgtcagaataatgaggattttgctgttctgaaacctgtagatccagatggacctgaaaatggaccaccttttcaattctttctggataattctgccagtaaaaactggaacatagaagaaaaggatggtaaaactgccattcttcgtcaacggcaaaatcttgattataactattattctgtgcctattcaaataaaagacaggcatggtttagttgcaacacatatgttaacagtgagagtatgtgactgttcaactccatctgagtgtagaatgaaggataaaagtacaagagacgttagaccaaatgtaatacttggaagatgggctattcttgctatggtgttgggttctgtattgttattatgtattctgtttacatgtttctgtgtcactgctaagagaacagtcaagaaatgttttccagaagacatagcccagcaaaatttaattgtatcaaatactgaaggacctggagaagaagtaacggaagcaaatattagactccccatgcagacatccaacatttgtgacacaagcatgtctgttggtactgttggtggccagggaatcaaaacacagcaaagttttgagatggtcaaaggaggctacactttggattccaacaaaggaggtggacatcagaccttggagtccgtcaagggagtggggcagggagatactggcagatatgcgtacacggactggcagagtttcacccaacctcggcttggcgaaaaggtgtatttgtgtggacaagatgaggagcataaacattgtgaagactacgtttgttcgtataactatgaaggcaaaggttctctggccggctcagtaggttgctgcagcgatcggcaggaagaagagggactggagtttctagatcacctggaacccaaatttaggacattagcaaagacatgcatcaagaaataaatgtgccttttaatagtgtaatatccacagatgcataagtaggaatttattacttgcagaatgttagcagcatctgctaatgtttttgtttatggaggtaaactttgtcatgtataggtaagggtactataaatatgagattcccctacattctccttgtctggtataacttccatgttctctagaaatcaaggttttgtttgttaattctcttttatatgcatgtatatattgcccttttcacgactgtactgtacaccttcttgcaccttttatttgcaaactgatgttactttttgtgctgtggaagagcatttgggaaagctgggtattatagaggccaatgaaagatgaatttgcattgtagatgtacgaattaaatatgttcttcaaaatcttggggagaattatgttcttagaacatagttggtgccagataattgcattctctccacctgagtggtttaaaaaggacttttaagtattcttcagtgcaatcttcagttttgtgattaagttcatttctcttttacacttttgtactcctcagagcagtgctcccagcattgttttctttcaggatccttcagagctcagtccctggacctctgcccatgtggatttgttgttaggtcactccaacttctagggttcttggaaagataaggaccagaacaagctcatagcaaattgaggggcagagattttatgaagattacatgagaagatttccatgaaagaattgcagccctgaggtccatgggttgacttatgctcacaaatatgtttcgtttgctcaacatggtttactactaacattttaaaaatataaatactttagcaaaaacattcactcttgagtttgacataggcctgccttatctgtggttgccacctgccatctccaagcatttggacaactagccctgatgcattaggctgcaactctgatatacagagactagcaccttgaatatgccagaaattgaattaccatctgtattagaacttaagactcagcctaaatttacagttactttaagaaaatgggcagtcagaattagggactagaatgtatatgagaaacccccactctactaaaaatataagaaattagccggacatggtggcgaatgactgtaatcccagctactcaggaggctgaggcaggagaatcgcttgaatccaggaggcggaggttgcagtgagccgagattgccactgcactccagcctgggcaacaagagcgaaactccgtctcaaaaaaaaaaaaaaaaa

SEQ ID NO: 8212 - DNA, 6935 bp, Homo sapiens
  source 1..6935: mol_type = unassigned DNA
gaagttgctcccgggcaggcaagcctgagagaggccaaatacacttaaaaacaagcagcggcgagaaaagcacctcccgcgccctgcacctcggcaggtctcgctctcggcaccctcccggcgcccgcgttctcctggccctgcccggcatcccgatggccgccgctgggccccggcgctccgtgcgcggagccgtctgcctgcatctgctgctgaccctcgtgatcttcagtcgtgctggtgaagcctgcaaaaaggtgatacttaatgtaccttctaaactagaggcagacaaaataattggcagagttaatttggaagagtgcttcaggtctgcagacctcatccggtcaagtgatcctgatttcagagttctaaatgatgggtcagtgtacacagccagggctgttgcgctgtctgataagaaaagatcatttaccatatggctttctgacaaaaggaaacagacacagaaagaggttactgtgctgctagaacatcagaagaaggtatcgaagacaagacacactagagaaactgttctcaggcgtgccaagaggagatgggcacctattccttgctctatgcaagagaattccttgggccctttcccattgtttcttcaacaagttgaatctgatgcagcacagaactatactgtcttctactcaataagtggacgtggagttgataaagaacctttaaatttgttttatatagaaagagacactggaaatctattttgcactcggcctgtggatcgtgaagaatatgatgtttttgatttgattgcttatgcgtcaactgcagatggatattcagcagatctgcccctcccactacccatcagggtagaggatgaaaatgacaaccaccctgttttcacagaagcaatttataattttgaagttttggaaagtagtagacctggtactacagtgggggtggtttgtgccacagacagagatgaaccggacacaatgcatacgcgcctgaaatacagcattttgcagcagacaccaaggtcacctgggctcttttctgtgcatcccagcacaggcgtaatcaccacagtctctcattatttggacagagaggttgtagacaagtactcattgataatgaaagtacaagacatggatggccagttttttggattgataggcacatcaacttgtatcataacagtaacagattcaaatgataatgcacccactttcagacaaaatgcttatgaagcatttgtagaggaaaatgcattcaatgtggaaatcttacgaatacctatagaagataaggatttaattaacactgccaattggagagtcaattttaccattttaaagggaaatgaaaatggacatttcaaaatcagcacagacaaagaaactaatgaaggtgttctttctgttgtaaagccactgaattatgaagaaaaccgtcaagtgaacctggaaattggagtaaacaatgaagcgccatttgctagagatattcccagagtgacagccttgaacagagccttggttacagttcatgtgagggatctggatgaggggcctgaatgcactcctgcagcccaatatgtgcggattaaagaaaacttagcagtggggtcaaagatcaacggctataaggcatatgaccccgaaaatagaaatggcaatggtttaaggtacaaaaaattgcatgatcctaaaggttggatcaccattgatgaaatttcagggtcaatcataacttccaaaatcctggatagggaggttgaaactcccaaaaatgagttgtataatattacagtcctggcaatagacaaagatgatagatcatgtactggaacacttgctgtgaacattgaagatgtaaatgataatccaccagaaatacttcaagaatatgtagtcatttgcaaaccaaaaatggggtataccgacattttagctgttgatcctgatgaacctgtccatggagctccattttatttcagtttgcccaatacttctccagaaatcagtagactgtggagcctcaccaaagttaatgatacagctgcccgtctttcatatcagaaaaatgctggatttcaagaatataccattcctattactgtaaaagacagggccggccaagctgcaacaaaattattgagagttaatctgtgtgaatgtactcatccaactcagtgtcgtgcgacttcaaggagtacaggagtaatacttggaaaatgggcaatccttgcaatattactgggtatagcactgctcttttctgtattgctaactttagtatgtggagtttttggtgcaactaaagggaaacgttttcctgaagatttagcacagcaaaacttaattatatcaaacacagaagcacctggagacgatagagtgtgctctgccaatggatttatgacccaaactaccaacaactctagccaaggtttttgtggtactatgggatcaggaatgaaaaatggagggcaggaaaccattgaaatgatgaaaggaggaaaccagaccttggaatcctgccggggggctgggcatcatcataccctggactcctgcaggggaggacacacggaggtggacaactgcagatacacttactcggagtggcacagttttactcaaccccgtctcggtgaaaaattgcatcgatgtaatcagaatgaagaccgcatgccatcccaagattatgtcctcacttataactatgagggaagaggatctccagctggttctgtgggctgctgcagtgaaaagcaggaagaagatggccttgactttttaaataatttggaacccaaatttattacattagcagaagcatgcacaaagagataatgtcacagtgctacaattaggtctttgtcagacattctggaggtttccaaaaataatattgtaaagttcaatttcaacatgtatgtatatgatgatttttttctcaattttgaattatgctactcaccaatttatatttttaaagcaagttgttgcttatcttttccaaaaagtgaaaaatgttaaaacagacaactggtaaatctcaaactccagcactggaattaaggtctctaaagcatctgctcttttttttttttacggatattttagtaataaatatgctggataaatattagtccaacaatagctaagttatgctaatatcacattattatgtattcactttaagtgatagtttaaaaaataaacaagaaatattgagtatcactatgtgaagaaagttttggaaaagaaacaatgaagactgaattaaattaaaaatgttgcagctcataaagaattgggactcacccctactgcactaccaaattcatttgactttggaggcaaaatgtgttgaagtgccctatgaagtagcaattttctataggaatatagttggaaataaatgtgtgtgtgtatattattattaatcaatgcaatatttaaaatgaaatgagaacaaagaggaaaatggtaaaaacttgaaatgaggctggggtatagtttgtcctacaatagaaaaaagagagagcttcctaggcctgggctcttaaatgctgcattataactgagtctatgaggaaatagttcctgtccaatttgtgtaatttgtttaaaattgtaaataaattaaacttttctggtttctgtgggaaggaaatagggaatccaatggaacagtagctttgctttgcagtctgtttcaagatttctgcatccacaagttagtagcaaactggggaatactcgctgcagctggggttccctgctttttggtagcaagggtccagagatgaggtgtttttttcggggagctaataacaaaaacattttaaaacttacctttactgaagttaaatcctctattgctgtttctattctctcttatagtgaccaacatctttttaatttagatccaaataaccatgtcctcctagagtttagaggctagagggagctgaggggaggatcttactgaaagcaccctggggagattgattgtccttaaacctaagccccacaaacttgacacctgatcaggtctgggagctacaaaatttcatttttctcctcactgcccttcttctgagtggcattggcctgaatcaaggaaagccaggccttgtgggcccccttctttcggctttctgctaaagcaacacctccagcagagattcccttaagtgactccaggttttccaccatccttcagcgtgaattaatttttaatcagtttgctttctccagagaaattttaaaataatagaagaaatagaaattttgaatgtataaaagaaaaagatcaagttgtcattttagaacagagggaactttgggagaaagcagcccaagtaggttatttgtacagtcagagggcaacaggaagatgcaggccttcaagggcaaggagaggccacaaggaatatgggtgggagtaaaagcaacatcgtctgcttcatactttttcctaggcttggcactgccttttcctttctcaggccaatggcaactgccatttgagtccggtgagggatcagccaacctcttctctatggctcaccttatttggagtgagaaatcaaggagacagagctgactgcatgatgagtctgaaggcatttgcaggatgagcctgaactggttgtgcagaacaaacaaggcattcatgggaattgttgtattccttctgcagccctccttctgggcactaagaaggtctatgaattaaatgcctatctaaaattctgatttattcctacattttctgttttctaatttgaccctaaaatctatgtgttttagacttagactttttattgccccccccccccccttttttttttgagacggagtctcgctctgacgcacaggctggagtgcagtggctccgatctctgctcactgaaagctccgcctcccgggttcacgccattctcctgcctcagcctcctgagtagctgggactacaggcgcccaccaccacgcccggctaattttttgtatttttaatagagacggggtttcactgtgttagccaggatggtctcgatctcctgacctcgtgatccgcctgcctcggcctcccaaagtgctgggattacaggcatgacccaccgctcccggccttgttttccgtttaaagtcgtcttcttttaatgtaatcattttgaacatgtgtgaaagttgatcatacgaattggatcaatcttgaaatactcaaccaaaagacagtcgagaagccagggggagaaagaactcagggcacaaaatattggtctgagaatggaattctctgtaagcctagttgctgaaatttcctgctgtatccagaagccagttttatctaacggctactgaaacacccactgtgttttgctcactccctcactcaccgatcaaaacctgctacctccccaagactttactagtgccgataaactttctcaaagagcaaccagtatcacttccctgtttataaaacctctaaccatctctttgttctttgaacatgctgaaaaccacctggtctgcatgtatgcccgaatttgtaattcttttctctcaaatgaaaatttaattttagggattcatttctatattttcacatatgtagtattattatttccttatatgtgtaaggtgaaatttatggtatttgagtgtgcaagaaaatatatttttaaagctttcatttttcccccagtgaatgatttagaattttttatgtaaatatacagaatgttttttcttacttttataaggaagcagctgtctaaaatgcagtggggtttgttttgcaatgttttaaacagagttttagtattgctattaaaagaagttactttgcttttaaagaaacttggctgcttaaaataagcaaaaattggatgcgtaaagtaatatttacagatgtggggagatgtaataaaacaatattaacttggtttcttgtttttgctgtatttagagattaaataattctaagatgatcactttgcaaaattatgcttatggctggcatggaaatagaaataattatgtctttgttgtattaatggggaatattttggacaatgtttcattatcaaattgtcgacatcattaatatatattgtaatgttgggaagagatcactattttgaagcacagctttacagatgagtatctatgatacatatgtataataaattttgattgggtattaaaagtattagaaggtggttataattgcagagtattccatgaatagtacactgacacaggggttttactttgaggaccagtgtagtcaagggaaaacatgagttaaaaagaaaagcaggcgatattgcagtcttgattctgccacttacaggatagataacgcctgaactttaatgacaagatgatccaaccataaaggtgctctgtgcttcacagtgaatcttttccccatgcaggagtgtgctcccctacaaacgttaagactgatcatttcaaaaatctattagctatatcaaaagccttacattttaatataggttgaaccaaaatttcaattccagtaacttctattgtaaccattatttttgtgtatgtcttcaagaatgttcattggatttttgtttgtaatagtaaaataccggatacatttcacgtgtccttcagtattgatttggttgaatattgggtcataatggttgagaagcatggacactagagccagaatgcttggatatgaatcctggatctgtcacttacttctgtgtgacctttgaaaggctacttatttcctctcttagctttctcattaaaatcaatgaacaatgccagcctcatggggttgttgaatgattaaatgagttactatacctaaagtacatagaacactgcctgcacatagtaaaagaattataagtgtgaggtagttggtaaaattatgta

SEQ ID NO: 8213 - DNA, 6978 bp, Homo sapiens
  source 1..6978: mol_type = unassigned DNA
gaagttgctcccgggcaggcaagcctgagagaggccaaatacacttaaaaacaagcagcggcgagaaaagcacctcccgcgccctgcacctcggcaggtctcgctctcggcaccctcccggcgcccgcgttctcctggccctgcccggcatcccgatggccgccgctgggccccggcgctccgtgcgcggagccgtctgcctgcatctgctgctgaccctcgtgatcttcagtcgtgctggtgaagcctgcaaaaaggtgatacttaatgtaccttctaaactagaggcagacaaaataattggcagagttaatttggaagagtgcttcaggtctgcagacctcatccggtcaagtgatcctgatttcagagttctaaatgatgggtcagtgtacacagccagggctgttgcgctgtctgataagaaaagatcatttaccatatggctttctgacaaaaggaaacagacacagaaagaggttactgtgctgctagaacatcagaagaaggtatcgaagacaagacacactagagaaactgttctcaggcgtgccaagaggagatgggcacctattccttgctctatgcaagagaattccttgggccctttcccattgtttcttcaacaagttgaatctgatgcagcacagaactatactgtcttctactcaataagtggacgtggagttgataaagaacctttaaatttgttttatatagaaagagacactggaaatctattttgcactcggcctgtggatcgtgaagaatatgatgtttttgatttgattgcttatgcgtcaactgcagatggatattcagcagatctgcccctcccactacccatcagggtagaggatgaaaatgacaaccaccctgttttcacagaagcaatttataattttgaagttttggaaagtagtagacctggtactacagtgggggtggtttgtgccacagacagagatgaaccggacacaatgcatacgcgcctgaaatacagcattttgcagcagacaccaaggtcacctgggctcttttctgtgcatcccagcacaggcgtaatcaccacagtctctcattatttggacagagaggttgtagacaagtactcattgataatgaaagtacaagacatggatggccagttttttggattgataggcacatcaacttgtatcataacagtaacagattcaaatgataatgcacccactttcagacaaaatgcttatgaagcatttgtagaggaaaatgcattcaatgtggaaatcttacgaatacctatagaagataaggatttaattaacactgccaattggagagtcaattttaccattttaaagggaaatgaaaatggacatttcaaaatcagcacagacaaagaaactaatgaaggtgttctttctgttgtaaagccactgaattatgaagaaaaccgtcaagtgaacctggaaattggagtaaacaatgaagcgccatttgctagagatattcccagagtgacagccttgaacagagccttggttacagttcatgtgagggatctggatgaggggcctgaatgcactcctgcagcccaatatgtgcggattaaagaaaacttagcagtggggtcaaagatcaacggctataaggcatatgaccccgaaaatagaaatggcaatggtttaaggtacaaaaaattgcatgatcctaaaggttggatcaccattgatgaaatttcagggtcaatcataacttccaaaatcctggatagggaggttgaaactcccaaaaatgagttgtataatattacagtcctggcaatagacaaagatgatagatcatgtactggaacacttgctgtgaacattgaagatgtaaatgataatccaccagaaatacttcaagaatatgtagtcatttgcaaaccaaaaatggggtataccgacattttagctgttgatcctgatgaacctgtccatggagctccattttatttcagtttgcccaatacttctccagaaatcagtagactgtggagcctcaccaaagttaatgatacagctgcccgtctttcatatcagaaaaatgctggatttcaagaatataccattcctattactgtaaaagacagggccggccaagctgcaacaaaattattgagagttaatctgtgtgaatgtactcatccaactcagtgtcgtgcgacttcaaggagtacaggagtaatacttggaaaatgggcaatccttgcaatattactgggtatagcactgctcttttctgtattgctaactttagtatgtggagtttttggtgcaactaaagggaaacgttttcctgaagatttagcacagcaaaacttaattatatcaaacacagaagcacctggagacgatagagtgtgctctgccaatggatttatgacccaaactaccaacaactctagccaaggtttttgtggtactatgggatcaggaatgaaaaatggagggcaggaaaccattgaaatgatgaaaggaggaaaccagaccttggaatcctgccggggggctgggcatcatcataccctggactcctgcaggggaggacacacggaggtggacaactgcagatacacttactcggagtggcacagttttactcaaccccgtctcggtgaagaatccattagaggacacactggttaaaaattaaacataaaagaaattgcatcgatgtaatcagaatgaagaccgcatgccatcccaagattatgtcctcacttataactatgagggaagaggatctccagctggttctgtgggctgctgcagtgaaaagcaggaagaagatggccttgactttttaaataatttggaacccaaatttattacattagcagaagcatgcacaaagagataatgtcacagtgctacaattaggtctttgtcagacattctggaggtttccaaaaataatattgtaaagttcaatttcaacatgtatgtatatgatgatttttttctcaattttgaattatgctactcaccaatttatatttttaaagcaagttgttgcttatcttttccaaaaagtgaaaaatgttaaaacagacaactggtaaatctcaaactccagcactggaattaaggtctctaaagcatctgctcttttttttttttacggatattttagtaataaatatgctggataaatattagtccaacaatagctaagttatgctaatatcacattattatgtattcactttaagtgatagtttaaaaaataaacaagaaatattgagtatcactatgtgaagaaagttttggaaaagaaacaatgaagactgaattaaattaaaaatgttgcagctcataaagaattgggactcacccctactgcactaccaaattcatttgactttggaggcaaaatgtgttgaagtgccctatgaagtagcaattttctataggaatatagttggaaataaatgtgtgtgtgtatattattattaatcaatgcaatatttaaaatgaaatgagaacaaagaggaaaatggtaaaaacttgaaatgaggctggggtatagtttgtcctacaatagaaaaaagagagagcttcctaggcctgggctcttaaatgctgcattataactgagtctatgaggaaatagttcctgtccaatttgtgtaatttgtttaaaattgtaaataaattaaacttttctggtttctgtgggaaggaaatagggaatccaatggaacagtagctttgctttgcagtctgtttcaagatttctgcatccacaagttagtagcaaactggggaatactcgctgcagctggggttccctgctttttggtagcaagggtccagagatgaggtgtttttttcggggagctaataacaaaaacattttaaaacttacctttactgaagttaaatcctctattgctgtttctattctctcttatagtgaccaacatctttttaatttagatccaaataaccatgtcctcctagagtttagaggctagagggagctgaggggaggatcttactgaaagcaccctggggagattgattgtccttaaacctaagccccacaaacttgacacctgatcaggtctgggagctacaaaatttcatttttctcctcactgcccttcttctgagtggcattggcctgaatcaaggaaagccaggccttgtgggcccccttctttcggctttctgctaaagcaacacctccagcagagattcccttaagtgactccaggttttccaccatccttcagcgtgaattaatttttaatcagtttgctttctccagagaaattttaaaataatagaagaaatagaaattttgaatgtataaaagaaaaagatcaagttgtcattttagaacagagggaactttgggagaaagcagcccaagtaggttatttgtacagtcagagggcaacaggaagatgcaggccttcaagggcaaggagaggccacaaggaatatgggtgggagtaaaagcaacatcgtctgcttcatactttttcctaggcttggcactgccttttcctttctcaggccaatggcaactgccatttgagtccggtgagggatcagccaacctcttctctatggctcaccttatttggagtgagaaatcaaggagacagagctgactgcatgatgagtctgaaggcatttgcaggatgagcctgaactggttgtgcagaacaaacaaggcattcatgggaattgttgtattccttctgcagccctccttctgggcactaagaaggtctatgaattaaatgcctatctaaaattctgatttattcctacattttctgttttctaatttgaccctaaaatctatgtgttttagacttagactttttattgccccccccccccccttttttttttgagacggagtctcgctctgacgcacaggctggagtgcagtggctccgatctctgctcactgaaagctccgcctcccgggttcacgccattctcctgcctcagcctcctgagtagctgggactacaggcgcccaccaccacgcccggctaattttttgtatttttaatagagacggggtttcactgtgttagccaggatggtctcgatctcctgacctcgtgatccgcctgcctcggcctcccaaagtgctgggattacaggcatgacccaccgctcccggccttgttttccgtttaaagtcgtcttcttttaatgtaatcattttgaacatgtgtgaaagttgatcatacgaattggatcaatcttgaaatactcaaccaaaagacagtcgagaagccagggggagaaagaactcagggcacaaaatattggtctgagaatggaattctctgtaagcctagttgctgaaatttcctgctgtatccagaagccagttttatctaacggctactgaaacacccactgtgttttgctcactccctcactcaccgatcaaaacctgctacctccccaagactttactagtgccgataaactttctcaaagagcaaccagtatcacttccctgtttataaaacctctaaccatctctttgttctttgaacatgctgaaaaccacctggtctgcatgtatgcccgaatttgtaattcttttctctcaaatgaaaatttaattttagggattcatttctatattttcacatatgtagtattattatttccttatatgtgtaaggtgaaatttatggtatttgagtgtgcaagaaaatatatttttaaagctttcatttttcccccagtgaatgatttagaattttttatgtaaatatacagaatgttttttcttacttttataaggaagcagctgtctaaaatgcagtggggtttgttttgcaatgttttaaacagagttttagtattgctattaaaagaagttactttgcttttaaagaaacttggctgcttaaaataagcaaaaattggatgcgtaaagtaatatttacagatgtggggagatgtaataaaacaatattaacttggtttcttgtttttgctgtatttagagattaaataattctaagatgatcactttgcaaaattatgcttatggctggcatggaaatagaaataattatgtctttgttgtattaatggggaatattttggacaatgtttcattatcaaattgtcgacatcattaatatatattgtaatgttgggaagagatcactattttgaagcacagctttacagatgagtatctatgatacatatgtataataaattttgattgggtattaaaagtattagaaggtggttataattgcagagtattccatgaatagtacactgacacaggggttttactttgaggaccagtgtagtcaagggaaaacatgagttaaaaagaaaagcaggcgatattgcagtcttgattctgccacttacaggatagataacgcctgaactttaatgacaagatgatccaaccataaaggtgctctgtgcttcacagtgaatcttttccccatgcaggagtgtgctcccctacaaacgttaagactgatcatttcaaaaatctattagctatatcaaaagccttacattttaatataggttgaaccaaaatttcaattccagtaacttctattgtaaccattatttttgtgtatgtcttcaagaatgttcattggatttttgtttgtaatagtaaaataccggatacatttcacgtgtccttcagtattgatttggttgaatattgggtcataatggttgagaagcatggacactagagccagaatgcttggatatgaatcctggatctgtcacttacttctgtgtgacctttgaaaggctacttatttcctctcttagctttctcattaaaatcaatgaacaatgccagcctcatggggttgttgaatgattaaatgagttactatacctaaagtacatagaacactgcctgcacatagtaaaagaattataagtgtgaggtagttggtaaaattatgta

SEQ ID NO: 8214 - DNA, 5045 bp, Homo sapiens
  source 1..5045: mol_type = unassigned DNA
ccagcccaagtttttagggtggggatccagactggttatacgtaccttcagtccttctcccagaggaaggcagaaacacctcaaagcctgcatgtaagaacatctactgagaaattattttaatcagacaccagctgagtgggagaaagaaaaagaacagagaagaacaaacaaaactcccttggtcttggatgtaagagaatccagcagagatggactggagtttcttcagagtagttgcaatgctgttcatttttctggtggtggtagaagttaacagtgaattccgaatccaggtaagagattataacactaaaaatggcaccatcaaatggcattcaatccgaaggcagaaacgtgaatggatcaagttcgcagcagcctgtcgtgaaggtgaagacaactcaaagaggaacccaatcgccaaaattcactcagattgtgctgcaaaccagcaagttacataccgcatctctggagtaggaattgatcagccaccatatgggatctttgtcattaatcagaaaactggtgaaattaatataacatccatagttgatcgagaggtcactcctttcttcattatctactgccgagctctgaactcaatgggccaagatttagagaggcctctagagctcagagtcagggttttggatataaatgacaaccctccagtgttttcaatggctacatttgcaggacaaatagaagaaaattctaatgcaaatacactggtgatgatactcaatgctactgacgcagatgaaccgaacaatttgaactcaaaaatagccttcaagattataagacaagaaccttcagattcaccaatgtttattatcaacagaaatactggagaaattcgaacgatgaataattttctagacagagagcaatacggccagtatgctcttgctgtaagaggctctgaccgagatggcggggcagatggcatgtcagcggaatgtgagtgcaacattaaaatcctcgatgtcaatgataatatcccttacatggaacagtcttcatataccatagaaattcaagaaaatactctaaattcaaatttgctcgagattagagtaattgatttggatgaagagttctcagctaactggatggcagtaattttctttatctctggaaatgaaggaaattggtttgagatagaaatgaatgaaagaacaaatgtgggaattttaaaggttgttaagcccttagattatgaagctatgcagagtctgcaactcagtattggtgtcagaaataaagctgaatttcatcattcaattatgtctcaatataaactgaaagcatctgcaatttctgtgactgtgttaaatgtaattgaaggcccagtgtttcgtccaggttcaaagacatatgttgtaactggtaatatgggatcaaatgataaagtgggagactttgtagctactgacctggacacaggtagaccttcaacgactgttaggtatgtaatgggaaataatccagctgacctgctagctgttgattcaagaacaggcaaactcactttgaaaaataaagttaccaaggaacagtacaatatgctcggaggaaaataccaaggaacgattctctctatagatgataatcttcaaagaacttgcactggtacaattaatattaacattcaaagttttggtaatgacgacaggactaatacagagccgaacactaaaattactaccaatactggcagacaagaaagtacttcttccactaactatgataccagcacaacttctactgactctagccaagtatattcttctgaacccggaaacggagccaaagatttgttatcagacaatgtacattttggtcctgctggcattggactcctcatcatgggattcttggtcttaggattggtcccatttttgatgatctgttgtgattgtggaggtgctcctcgtagtgcagctggctttgagcctgttcccgaatgttcagatggagcaattcattcatgggcagtagaaggaccacagcctgaacccagggatataaccactgtcataccacaaataccacctgataacgcaaatataattgaatgcattgacaactcaggagtttatacaaatgagtatggtggcagagaaatgcaagatctgggaggaggagagagaatgacaggatttgaactaacagagggagttaaaacttcaggaatgcctgagatatgtcaagaatactctggaacattaagaagaaattctatgagggaatgtagagaaggaggtctgaatatgaatttcatggaaagctacttctgtcagaaagcatatgcttacgcagatgaagatgaaggacgcccatctaatgactgtttgctcatatatgacatcgaaggtgtaggttcccctgctggctctgtgggttgttgtagcttcattggagaagacctggatgacagcttcttggataccctgggacctaaatttaagaagttggcagacatcagcctaggaaaagaatcatatccagaccttgatccttcttggccaccacaaagcactgaaccagtttgccttcctcaggaaacagagcccgttgttagtggacacccaccaatctccccacatttcggcactaccacagtaatttctgagagcacctatccctcgggacctggtgtactgcatcctaagcctattctcgatcctctgggctatggtaatgtcactgtgaccgagtcttacaccacctctgacactctgaagccctctgtgcacgttcacgataaccgaccagcatcaaacgtggtagtgacagagagagtggtcggcccaatctctggcgctgatttgcatggaatgttagagatgcctgacttgcgagatgggtcgaatgttatagtgacagaaagggtaatagcaccaagctctagtctacccacctctctgactatccatcatcctagagagtcttcaaatgtggtagtgacagaaagagtaatccaaccaacttccggcatgataggtagtctgagtatgcaccccgagttagccaatgcccacaatgtcattgtgacagagagggttgtttctggtgctggcgtaactggaattagtggcaccactgggatcagcggtggcataggcagcagtggcctggttggcaccagcatgggtgctgggagcggtgccctgagtggagctggcataagtggtggtggcattggcctgagcagcttgggagggacagccagcattggccacatgaggagttcctctgaccatcactttaaccaaaccattgggtccgcctcccctagcacagctcgaagtcgaatcacaaagtatagtaccgtgcaatatagcaagtagtcaggaccccagctcactttttcatagtcattgtggtttagatccaattcccaccactaaaaaaccaacaatgtgatttataacgcacaacttcgtgctcaggtcatctaggagcaaggtgagaaatcacaatgagaaaaataaatggaaacaccactgctaggggagagctctccttagcattcataaacttttctcttatattaggactaaggaactaaaacttgaggcagagtcttctttgtgcctgagtggcctgtagtccatctccagcatgtaactggccttacgatggcaattggcatcattctccttgctctgttttgcttttccatatagctcgagcaaaattcaaaaagaactaaatatgcaatatatgttcatatctatgggaaaaatctaaaatgtgtgccagatgccctgttggtttcacagataacataaataaaaattcaaccacagatttatacaagggttaaccattttttttaagtttgactacatagtcaagtccacaagccatcaagcactcctaccttaattattgcactagagaaaataaattccaaattaggaagtgtttcctaggaggaaaattccattagagagtggcaataggatgaggtttcttcagggtaaactagcaatgcctgagcctgaaccttaatgtggggcctcagttaaatctcctgtggagtcaaggattcttctgattctagtgtgtgtttagtgatagatgtagtcttgacgaatattgcttactggtgaggttgaggaatatcacactcgtctttccctttaccactgtggttttgacttaagaaagcaaaactcactaagtttacttctcgaattgaagcaagtgaggcctgacatggttgtcatcactagtggcaaatgaccttccaagtaagcagatgggaactgaattgtgttttcaggttttgtttttagtaggtgatattcattcgtatccagctctttattacatagctctgaagttaaaatgatttacataggccgagctgtggacaaaaaaaaaagaagcagcagcttgtagtatgcttaagctttggggaatttttttttaaggggatctaaaaaaatgtttttagaacatgtaaaatgtttaatggtgaaagttggaaaagaattcttctgtaaagtaataccatgctaattattcgcttttagtaagtaaagtagtggttgctttagcaaacctctgctgccattttgcaggaatcaaccaggaacctttagcagaattgacaatatggtgttgataagcatgaaataataatagaaacctattctgctagtttatctcaccctctaatttttctcactagcataaattttaaattcctgatttgatttgtcaataagatcttggcttatatatgctgatttataggtagtgtccaaattatatagtataacatatttttctagtttcaaaatttagtaatgtcctatttatgatatatcatttctgtgtgtttgctatgtagtattacccaattaaaaatctctaaaaagaattaaagcattctaagaaaaaggtaaatttactattgcatggtacagaaattttttctttcttaaatacaatgttactataagctcactaaaatgaaactctatatgacaaaataaaattagaaaaaaatttgccctgga

SEQ ID NO: 8215 - DNA, 5652 bp, Homo sapiens
  source 1..5652: mol_type = unassigned DNA
ctggagccgcgcctttgggttgggctgggctgggccgcgcaaccgccacgggaagacagccctcggggcggggagggagagggtggccgggccggggggaggccggggccagggaggagccgagtgcgcgctcggggcaggcggcggcgcggagcggtgcggcggcgggaggcggaggcgagggtgcgatggcgcggagcccgggacgcgcgtacgccctgctgcttctcctgatctgctttaacgttggaagtggacttcacttacaggtcttaagcacaagaaatgaaaataagctgcttcctaaacatcctcatttagtgcggcaaaagcgcgcctggatcaccgcccccgtggctcttcgggagggagaggatctgtccaagaagaatccaattgccaagatacattctgatcttgcagaagaaagaggactcaaaattacttacaaatacactggaaaagggattacagagccaccttttggtatatttgtctttaacaaagatactggagaactgaatgttaccagcattcttgatcgagaagaaacaccattttttctgctaacaggttacgctttggatgcaagaggaaacaatgtagagaaacccttagagctacgcattaaggttcttgatatcaatgacaacgaaccagtgttcacacaggatgtctttgttgggtctgttgaagagttgagtgcagcacatactcttgtgatgaaaatcaatgcaacagatgcagatgagcccaataccctgaattcgaaaatttcctatagaatcgtatctctggagcctgcttatcctccagtgttctacctaaataaagatacaggagagatttatacaaccagtgttaccttggacagagaggaacacagcagctacactttgacagtagaagcaagagatggcaatggagaagttacagacaaacctgtaaaacaagctcaagttcagattcgtattttggatgtcaatgacaatatacctgtagtagaaaataaagtgcttgaagggatggttgaagaaaatcaagtcaacgtagaagttacgcgcataaaagtgttcgatgcagatgaaataggttctgataattggctggcaaattttacatttgcatcaggaaatgaaggaggttatttccacatagaaacagatgctcaaactaacgaaggaattgtgacccttattaaggaagtagattatgaagaaatgaagaatcttgacttcagtgttattgtcgctaataaagcagcttttcacaagtcgattaggagtaaatacaagcctacacccattcccatcaaggtcaaagtgaaaaatgtgaaagaaggcattcattttaaaagcagcgtcatctcaatttatgttagcgagagcatggatagatcaagcaaaggccaaataattggaaattttcaagcttttgatgaggacactggactaccagcccatgcaagatatgtaaaattagaagatagagataattggatctctgtggattctgtcacatctgaaattaaacttgcaaaacttcctgattttgaatctagatatgttcaaaatggcacatacactgtaaagattgtggccatatcagaagattatcctagaaaaaccatcactggcacagtccttatcaatgttgaagacatcaacgacaactgtcccacactgatagagcctgtgcagacaatctgtcacgatgcagagtatgtgaatgttactgcagaggacctggatggacacccaaacagtggccctttcagtttctccgtcattgacaaaccacctggcatggcagaaaaatggaaaatagcacgccaagaaagtaccagtgtgctgctgcaacaaagtgagaaaaagcttgggagaagtgaaattcagttcctgatttcagacaatcagggttttagttgtcctgaaaagcaggtccttacactcacagtttgtgagtgtctgcatggcagcggctgcagggaagcacagcatgactcctatgtgggcctgggacccgcagcaattgcgctcatgattttggcctttctgctcctgctattggtaccacttttactgctgatgtgccattgcggaaagggcgccaaaggctttacccccatacctggcaccatagagatgctgcatccttggaataatgaaggagcaccacctgaagacaaggtggtgccatcatttctgccagtggatcaagggggcagtctagtaggaagaaatggagtaggaggtatggccaaggaagccacgatgaaaggaagtagctctgcttccattgtcaaagggcaacatgagatgtccgagatggatggaaggtgggaagaacacagaagcctgctttctggtagagctacccagtttacaggggccacaggcgctatcatgaccactgaaaccacgaagaccgcaagggccacaggggcttccagagacatggccggagctcaggcagctgctgttgcactgaacgaagaattcttaagaaattatttcactgataaagcggcctcttacactgaggaagatgaaaatcacacagccaaagattgccttctggtttattctcaggaagaaactgaatcgctgaatgcttctattggttgttgcagttttattgaaggagagctagatgaccgcttcttagatgatttgggacttaaattcaagacactagctgaagtttgcctgggtcaaaaaatagatataaataaggaaattgagcagagacaaaaacctgccacagaaacaagtatgaacacagcttcacattcactctgtgagcaaactatggttaattcagagaatacctactcctctggcagtagcttcccagttccaaaatctttgcaagaagccaatgcagagaaagtaactcaggaaatagtcactgaaagatctgtgtcttctaggcaggcgcaaaaggtagctacacctcttcctgacccaatggcttctagaaatgtgatagcaacagaaacttcctatgtcacagggtccactatgccaccaaccactgtgatcctgggtcctagccagccacagagccttattgtgacagagagggtgtatgctccagcttctaccttggtagatcagccttatgctaatgaaggtacagttgtggtcactgaaagagtaatacagcctcatgggggtggatcgaatcctctggaaggcactcagcatcttcaagatgtaccttacgtcatggtgagggaaagagagagcttccttgcccccagctcaggtgtgcagcctactctggccatgcctaatatagcagtaggacagaatgtgacagtgacagaaagagttctagcacctgcttccactctgcaatccagttaccagattcccactgaaaattctatgacggctaggaacaccacggtgtctggagctggagtccctggccctctgccagattttggtttagaggaatctggtcattctaattctaccataaccacatcttccaccagagttaccaagcatagcactgtacagcattcttactcctaaacagcagtcagccacaaactgacccagagtttaattagcagtgactaatttcatgtttccaatgtacctgatttttcatgagccttacagacacacagagacacatacacattgatcttaaaatttttctcagtcactgatatgcaaaggaccacactgtctctgcttccaggagtattttagaaatgttccacaatttactgaagacatagagatgatgctgctgcttaggtgccttttagcaagctatgcaaacaatcctgataaaacaagatacatagagagtcaatctggcttctgagaatttaccaagtgaacagagtacctagttcatcagccgtccagtaaagcaacccaggaaactgactgggtctctttgcctaccgtattaacattaaacattgatgttctgtattctgtactttactgcacccagcagactttcaacaactcattgatccaaagatacatgcacagtctgagcaccagctatggtgctcataacttctttaagacttgaaccctttcaatctgtgtgattcattaaattggaccattgatgataagaatacacattgtatgtttctgtgcacatgacagtgtgtgtgtgtgcacgtacatactgtatagtcttaaaaatagcattatactggccaggggtggtggctaacgcctgtaatcccagcactttgggaggccgaggcgggtggatcaactgtggtcaggagtttgagatcagccaggccaacctggtgaaaccccgtctctactaaaaatacaaaaattagctgggcgtgatggtgggcgcctgtaatcccagctacttgggaggctgaggcaggagaatcacttgaacccgggaggcggaggttgcagtgagccgagatcgcaccattgcactccagtctgggcaacagagtgagattccgtctcaaaaaaaaaaagaaaaggaaaaaaaaatagcattatacctcttccttgtctcaaccgccatgaaaattctgaacactccaaattcagttgaataatccaaaacaaaatttataagtataaaataattttacttcttatagtaatagtatactttaaaaagcctcagggtatattatcttctaaacagctacaattcagtgcagctacattaaccaactatgttctctagttgagaacaactaggcctatttcactgctgtgtagcctcagtgcctaacatgggtgccaaataaatattcgtagaattacactgaattgtaaaaaccattcgtttttgtttacaattgccaaaaatctcaaaaggccctgtatttatgtaattctttgaaattattattttattttgatttctcagttattgactggctgggtgtgacttagtacataagtactcaatattataaaaacctcaaataattgacttgattttacacaacatccttcccttttctacaagttaatttttttacaaatcatttgggttatctcctaaataggttatattttattgcttctagaaacaatgtttcaaaatatatgtgcattatcagtaataatttgtataaatatttcccacaacaattttcataattttcaaagactaatttcttgactgaagatattttgctagggaagtgaaactttaaaattttgtagattttaaaaaatattgttgaatggtgtcatgcaaaggatttatatagtgtgctcccactaactgtacagatcaggacacatatttttagacatctaagtctgtagcttaaatggaggttactcttccatcatctagaattgtttacttagtaattgttgtttcttttattattatagacttactatcagttttattttgccaagtatgcaacaggtatatcactagtatatgaaaatgtaaatatcacttgtgtactcaaacaaaagttggtcttaagcttccaccttgagcagccttggaaacctaacctgcctcttttagcataatcacattttctaaatgattttctttgttcctgaaaaagtgatttgtattagttttacatttgttttttggaagattatatttgtatatgtatcatcataaaatatttaaataaaaagtatctttagagtg

SEQ ID NO: 8216 - DNA, 3579 bp, Homo sapiens
  source 1..3579: mol_type = unassigned DNA
caccacagttatcacccatgccctcctaaaagggtgtctcaaagcatatctttctgtagagcagaattcggaactgagaagacgagggctcaaattgaatctcacaggatttgcgtgcaagagaaacccaaaggaatggattggctcttcttcagaaacatttgccttttgatcattctaatggtggtgatggaagtaaacagtgaatttattgttgaggtgaaggaatttgacattgaaaatggcactacaaaatggcaaacagtcagaagacaaaagcgggagtggatcaagtttgccgcagcctgtcgagaaggagaggacaactcgaagaggaaccccattgccaaaattcgatcagactgcgaatcgaaccagaagataacataccggatttctggagtagggattgatcgaccaccatatggggtattcaccattaatcctcgcactggggaaattaacatcacttcagtggtagacagagaaataactccacttttcttgatctattgccgggctctgaattcacggggtgaagatttagaaaggcctcttgagcttagagtcaaagttatggacataaatgataacgctccagtcttttcgcaaagtgtatacacagccagcattgaagaaaatagtgatgccaatacattggtagtaaagttatgtgccacagatgcagatgaagaaaatcatctgaattctaaaattgcctacaagatcgtctctcaggagccatcaggtgcacccatgttcattctgaataggtacactggagaagtctgcaccatgtccagtttcttggacagagagcaacacagtatgtacaacctggttgtgagaggctcagatcgggatggagctgcagatggactgtcttctgagtgtgactgtagaatcaaggttttagacgtcaacgataatttccccaccttagagaaaacttcatactcagccagtattgaagagaattgtttaagttcggaactgatacgattacaagcaattgatcttgatgaagaaggcactgataactggttggctcaatatttaattctctctggaaatgatgggaattggttcgatattcaaacagatccacaaaccaatgaaggcattttgaaagttgtcaagatgctggattatgaacaagcacctaacattcagcttagtatcggagttaaaaaccaagctgattttcactactccgttgcttctcaattccaaatgcacccaacccctgtgagaattcaagttgttgatgtgagagaaggacctgcatttcatccaagtactatggcttttagtgtgcgggaaggaataaaaggaagttccttattgaattatgtgcttggcacatatacagccatagatttggacacaggaaaccctgcaacagatgtcagatatatcatagggcatgatgcaggcagctggttaaaaattgattcaagaactggtgagatacaattttctagagaatttgataagaagtcaaaatatattatcaatgggatatacacagcagagatcctggctatagatgatggctctggaaaaacagctacaggaaccatatgtattgaggttcctgatatcaatgattattgtccaaacatttttcctgaaagaagaaccatctgcattgactctccatcagtccttatctctgttaatgaacattcttatgggtctccgtttactttctgtgttgttgatgagccaccaggaatagctgacatgtgggatgtcagatcaacaaatgctacctcggcaatccttacggctaagcaggttttatctccaggattttatgaaatcccaatcctggtgaaggacagctataacagagcatgtgaattggcacaaatggtgcagttatatgcctgtgattgcgatgacaaccacatgtgcctggactctggtgccgcgggcatctacacagaggacataactggtgacacgtatgggcctgtcactgaagaccaagctggagtttcaaatgttggtcttggaccagcagggattggcatgatggttctgggcatcctgctactgattttggctccactcttgctgctcctgtgttgctgcaaacagagacagccagaaggcctgggaacaagatttgctcctgtgcctgagggcggagaaggagtgatgcagtcttggagaattgaaggggcccatcccgaggacagggatgtgtcaaatatatgtgcacccatgacagcctcaaatacccaggatcggatggattcctctgaaatctacaccaacacctatgcagccgggggcacggtggaaggaggtgtatcgggagtggagctcaacacaggtatggggacagccgttggcctcatggccgcaggggccgcaggagcctcaggggccgcaaggaagaggagctctaccatgggaaccctgcgggactacgctgacgcagacatcaacatggctttcttggacagctacttctcggagaaagcgtatgcttatgcagatgaagatgaaggtcgaccagccaatgactgcttgctcatttatgaccacgagggagtcgggtctcccgtaggctctattggttgttgcagttggattgtggatgacttagatgaaagctgcatggaaactttagatccaaaatttaggactcttgctgagatctgcttaaacacagaaattgaaccatttccttcacaccaggcttgtataccaatcagtactgacctccctttgctcggacctaattactttgttaatgaatcttcaggattgactccctcagaagttgaattccaagaagaaatggcagcatctgaacccgtggtccatggggatattattgtgactgagacttacggtaatgctgatccatgtgtgcaacccactacaattatttttgatcctcagcttgcacccaatgttgtagtaaccgaagcagtaatggcacctgtctatgatattcaagggaatatttgtgtacctgctgagttagcagattacaacaatgtaatctatgctgagagagtactggctagtcctggtgtgcctgacatgagcaatagtagcacgactgagggttgtatgggacctgtgatgagcggcaatattttagtagggccagaaattcaagtgatgcaaatgatgagtccagaccttcccataggccaaaccgttggctccacatcccccatgacatctcgacacagagtaacacgatacagtaacatacattacacccaacagtaagtgctttatggtcagtattctatgtggagaccttgcaccttgtaatcatcaatacatccaccaaaaatatataatgtaccatatatattaatagtcaacaaatactcagatattctaaggtcaatgccattatttgattataccattttgagggtgaatatggctaggcactttagataagcctttttaaaattctttctgattttaaataatgcgtcaaaaaatgtgcagaaaatgtattgcatcccttgatactgtctaacgaatagcacataactcatattgtgaatcctatgggtcttgaggcctgtagaaccaatc

SEQ ID NO: 8217 - DNA, 3637 bp, Homo sapiens
  source 1..3637: mol_type = unassigned DNA
caccacagttatcacccatgccctcctaaaagggtgtctcaaagcatatctttctgtagagcagaattcggaactgagaagacgagggctcaaattgaatctcacaggatttgcgtgcaagagaaacccaaaggaatggattggctcttcttcagaaacatttgccttttgatcattctaatggtggtgatggaagtaaacagtgaatttattgttgaggtgaaggaatttgacattgaaaatggcactacaaaatggcaaacagtcagaagacaaaagcgggagtggatcaagtttgccgcagcctgtcgagaaggagaggacaactcgaagaggaaccccattgccaaaattcgatcagactgcgaatcgaaccagaagataacataccggatttctggagtagggattgatcgaccaccatatggggtattcaccattaatcctcgcactggggaaattaacatcacttcagtggtagacagagaaataactccacttttcttgatctattgccgggctctgaattcacggggtgaagatttagaaaggcctcttgagcttagagtcaaagttatggacataaatgataacgctccagtcttttcgcaaagtgtatacacagccagcattgaagaaaatagtgatgccaatacattggtagtaaagttatgtgccacagatgcagatgaagaaaatcatctgaattctaaaattgcctacaagatcgtctctcaggagccatcaggtgcacccatgttcattctgaataggtacactggagaagtctgcaccatgtccagtttcttggacagagagcaacacagtatgtacaacctggttgtgagaggctcagatcgggatggagctgcagatggactgtcttctgagtgtgactgtagaatcaaggttttagacgtcaacgataatttccccaccttagagaaaacttcatactcagccagtattgaagagaattgtttaagttcggaactgatacgattacaagcaattgatcttgatgaagaaggcactgataactggttggctcaatatttaattctctctggaaatgatgggaattggttcgatattcaaacagatccacaaaccaatgaaggcattttgaaagttgtcaagatgctggattatgaacaagcacctaacattcagcttagtatcggagttaaaaaccaagctgattttcactactccgttgcttctcaattccaaatgcacccaacccctgtgagaattcaagttgttgatgtgagagaaggacctgcatttcatccaagtactatggcttttagtgtgcgggaaggaataaaaggaagttccttattgaattatgtgcttggcacatatacagccatagatttggacacaggaaaccctgcaacagatgtcagatatatcatagggcatgatgcaggcagctggttaaaaattgattcaagaactggtgagatacaattttctagagaatttgataagaagtcaaaatatattatcaatgggatatacacagcagagatcctggctatagatgatggctctggaaaaacagctacaggaaccatatgtattgaggttcctgatatcaatgattattgtccaaacatttttcctgaaagaagaaccatctgcattgactctccatcagtccttatctctgttaatgaacattcttatgggtctccgtttactttctgtgttgttgatgagccaccaggaatagctgacatgtgggatgtcagatcaacaaatgctacctcggcaatccttacggctaagcaggttttatctccaggattttatgaaatcccaatcctggtgaaggacagctataacagagcatgtgaattggcacaaatggtgcagttatatgcctgtgattgcgatgacaaccacatgtgcctggactctggtgccgcgggcatctacacagaggacataactggtgacacgtatgggcctgtcactgaagaccaagctggagtttcaaatgttggtcttggaccagcagggattggcatgatggttctgggcatcctgctactgattttggctccactcttgctgctcctgtgttgctgcaaacagagacagccagaaggcctgggaacaagatttgctcctgtgcctgagggcggagaaggagtgatgcagtcttggagaattgaaggggcccatcccgaggacaggctttttagcgcctacgccttgccgggtggtggtggcaccgcagacggcggcggcagcgttttaggcagatgcgcgctgcaggcaactccagcgctgttaaaccaacatcctcccttttcagaaatctacaccaacacctatgcagccgggggcacggtggaaggaggtgtatcgggagtggagctcaacacaggtatggggacagccgttggcctcatggccgcaggggccgcaggagcctcaggggccgcaaggaagaggagctctaccatgggaaccctgcgggactacgctgacgcagacatcaacatggctttcttggacagctacttctcggagaaagcgtatgcttatgcagatgaagatgaaggtcgaccagccaatgactgcttgctcatttatgaccacgagggagtcgggtctcccgtaggctctattggttgttgcagttggattgtggatgacttagatgaaagctgcatggaaactttagatccaaaatttaggactcttgctgagatctgcttaaacacagaaattgaaccatttccttcacaccaggcttgtataccaatcagtactgacctccctttgctcggacctaattactttgttaatgaatcttcaggattgactccctcagaagttgaattccaagaagaaatggcagcatctgaacccgtggtccatggggatattattgtgactgagacttacggtaatgctgatccatgtgtgcaacccactacaattatttttgatcctcagcttgcacccaatgttgtagtaaccgaagcagtaatggcacctgtctatgatattcaagggaatatttgtgtacctgctgagttagcagattacaacaatgtaatctatgctgagagagtactggctagtcctggtgtgcctgacatgagcaatagtagcacgactgagggttgtatgggacctgtgatgagcggcaatattttagtagggccagaaattcaagtgatgcaaatgatgagtccagaccttcccataggccaaaccgttggctccacatcccccatgacatctcgacacagagtaacacgatacagtaacatacattacacccaacagtaagtgctttatggtcagtattctatgtggagaccttgcaccttgtaatcatcaatacatccaccaaaaatatataatgtaccatatatattaatagtcaacaaatactcagatattctaaggtcaatgccattatttgattataccattttgagggtgaatatggctaggcactttagataagcctttttaaaattctttctgattttaaataatgcgtcaaaaaatgtgcagaaaatgtattgcatcccttgatactgtctaacgaatagcacataactcatattgtgaatcctatgggtcttgaggcctgtagaaccaatct

SEQ ID NO: 8218 - DNA, 1940 bp, Homo sapiens
  source 1..1940: mol_type = unassigned DNA
ttctagcctcctgcagaccagagaggacgcacccccacccctaaacactttctggtgaggcggaccctgccccgcagccttcagcagatgagggaagctcccctccgagactctggatagccgccgggggggcgttgcctggccggctggttgcgtagcaacggcaggcggtgcgtgacgtgcgcagccgcgttccgtcctgaggcgcgcccgccccggggtaagctcgcgccgccgcgtcagctcagcgctgggtctctcggtcccgcagccgtgaggaggacggtctgcatactcgctgcccgccggctccctcccccgcgtccctgcgaccgccgcggcgaagatggcctcaggagtgcaagtagctgatgaagtatgtcgcattttttatgacatgaaagttcgtaaatgctccacaccagaagaaatcaagaaaagaaagaaggctgtcattttttgtctcagtgcagacaaaaagtgcatcattgtagaagaaggcaaagagatcttggttggagatgttggtgtaaccataactgatcctttcaagcattttgtgggaatgcttcctgaaaaagattgtcgctatgctttgtatgatgcaagctttgaaacaaaagaatccagaaaagaagagttgatgttttttttgtgggcaccagaactagcacctctgaaaagtaaaatgatctatgcaagctccaaggatgcaattaaaaagaaatttcaaggcataaaacatgaatgtcaagcaaatggaccagaagatctcaatcgggcttgtattgctgaaaagttaggtggatccttaattgtagcctttgaaggatgccctgtgtagattattcagtgccacaaattgaaagcttccatgtttaatgttatcctcttgctatataaataaagcaaatatatttaggccagggtctcactgagggggagctgtcttgtcatcttttagagtaaactattctataaacatatgcaaacagccctaaataaatctaaagtctaaagttttattgatgtgaaattaaattcttattggccaaatgcctgttttgatgagttgatttataaagatttttgttaagctcaggattttaaattacacagttcacaaacagtaaaggccatgtgaagagaattattacatctttattaacctcagcatttactttgtttcttttgcttaggaaattgctcataatctggttataattttggtccaaattctttattcttccttgagctaagcagaataatggaatataatatgtcttcataatataacaacactaatacactaatagtaagattaagttaggcagtcttctaccaaatgtgtaatggagattgcctcaaaattgtgtccacataatccacgctcatcttgcaaagcgctatttcaggcacatcattggaatacaggaagtagccctgcacctgccagtgagctcgccattcactgattggaagagtgacctggcatcttggaaatcattgtgtgtcttcaggagaatgtgcagtgtcttgtaacaactaattataatgcaaattagggctacattgtaatctgctttgttaatgaaaatgataaaacagaatattgacaagctaggacacctgtggtatctttaattgtatctccttcagaagtttgcttcttatggtataataaagtatggaagaatattgagtatatgtttactctgggcctgggagaacttaactttctagagcagtttgttgacttgtgtgcaatggggagaggtaccatgatgacactcacagggagccactgttcactgacacttggaagcggtcattgttaatatcacgggcgtaacactttgaacgatatagagatgcacaaacagttgaacttagaagtagcagtattggctttatgtaataaaggaagcatttttgactta

SEQ ID NO: 8219 - DNA, 1746 bp, Homo sapiens
  source 1..1746: mol_type = unassigned DNA
gggaagctcccctccgagactctggatagccgccgggggggcgttgcctggccggctggttgcgtagcaacggcaggcggtgcgtgacgtgcgcagccgcgttccgtcctgaggcgcgcccgccccggggtaagctcgcgccgccgcgtcagctcagcgctgggtctctcggtcccgcagccgtgaggaggacggtctgcatactcgctgcccgccggctccctcccccgcgtccctgcgaccgccgcggcgaagatgattttcagttcacccactagaggcaaagacgtaagagagctaccagcgtattgagaggagatacacaggcactacgagaatggagtttagaagaaggtcagagccctgggcagtgttgggccaggctttagggcctcaggagtgcaagtagctgatgaagtatgtcgcattttttatgacatgaaagttcgtaaatgctccacaccagaagaaatcaagaaaagaaagaaggctgtcattttttgtctcagtgcagacaaaaagtgcatcattgtagaagaaggcaaagagatcttggttggagatgttggtgtaaccataactgatcctttcaagcattttgtgggaatgcttcctgaaaaagattgtcgctatgctttgtatgatgcaagctttgaaacaaaagaatccagaaaagaagagttgatgttttttttgtgggcaccagaactagcacctctgaaaagtaaaatgatctatgcaagctccaaggatgcaattaaaaagaaatttcaaggcataaaacatgaatgtcaagcaaatggaccagaagatctcaatcgggcttgtattgctgaaaagttaggtggatccttaattgtagcctttgaaggatgccctgtgtagattattcagtgccacaaattgaaagcttccatgtttaatgttatcctcttgctatataaataaagcaaatatatttaggccagggtctcactgagggggagctgtcttgtcatcttttagagtaaactattctataaacatatgcaaacagccctaaataaatctaaagtctaaagttttattgatgtgaaattaaattcttattggccaaatgcctgttttgatgagttgatttataaagatttttgttaagctcaggattttaaattacacagttcacaaacagtaaaggccatgtgaagagaattattacatctttattaacctcagcatttactttgtttcttttgcttaggaaattgctcataatctggttataattttggtccaaattctttattcttccttgagctaagcagaataatggaatataatatgtcttcataatataacaacactaatacactaatagtaagattaagttaggcagtcttctaccaaatgtgtaatggagattgcctcaaaattgtgtccacataatccacgctcatcttgcaaagcgctatttcaggcacatcattggaatacaggaagtagccctgcacctgccagtgagctcgccattcactgattggaagagtgacctggcatcttggaaatcattgtgtgtcttcaggagaatgtgcagtgtcttgtaacaactaattataatgcaaattagggctacattgtaatctgctttgttaatgaaaatgataaaacagaatattgacaagctaggacacctgtggtatctttaattgtatctccttcagaagtttgcttcttatggtataataaagtatggaagaatattgagta

SEQ ID NO: 8220 - DNA, 1383 bp, Homo sapiens
  source 1..1383: mol_type = unassigned DNA
agccctttgtttatggcctgatctagctaaggcttctagacttcaggagcttaagaatcgtccggagggctgggcgtggcggtgcaggcctgtagtcccacccactccgaaggctgcggagggaggatcaacttgagtctgggaactcagccaggaattcaagaccagcctgggcaacacagtgaggccccctacccacatcctctccgtccccgcaatctccttccatcccagggtgttgctgaaaatgtcagatgcaaatttggatagcagcaagaagaatttcttggagggggaagtagatgatgaggaaagtgtgattttgacactggtgccagttaaagatgacgcaaatatggaacaaatggaaccaagcgtttcttcaacttctgatgtcaaactggagaagcctaagaaatacaatccaggtcatctacttcaaacaaatgagcaatttacagctccacaaaaagctagatgcaaaataccagcccttcccttgccgaccattttgcctcccattaataaggtgtgtcgggacactttgcgggactggtgtcaacaactcggtttgagtactaatggcaagaaaatcgaagtttatctgaggcttcataggcatgcttaccctgaacaacggcaagatatgcctgaaatgtcacaagagaccagattacagcgatgttcgaggaaacgcaaggcagtgaccaagagagcaaggcttcagagaagttatgagatgaatgagagagcagaagagaccaatacagttgaagtgataacttcagcaccgggagccatgttggcatcatgggcaagaattgctgcaagagctgttcagcctaaggctttgaattcatgttccattcctgtttctgttgaggcctttttgatgcaagcctctggcgtcaggtggtgtgtggtccatggcagacttctctcggcagacacaaagggttgggtacgcctgcagtttcatgcaggtcaggcctgggtgcctaccactcacaggaggatgatttctctcttcttgttacctgcctgcattttcccatccccaggcatagaagataatatgttatgccccgactgtgctaagaggaataagaagatgatgaaaagattaatgacagtagagaagtagcagcaacctgtttgaatacaatgtactaaaggagggatgtactttcagatcatgtaacctattacgaaggagtggaagaggagacaatttgaatgaatcctcatgatctacaaaacaaaatcatagtgactaggactccacagtgaagatggttgactagtgacacagccccatctaaagaatccctttctgtatgtctgaaaacccattaaaataaagtcactgcaattggccttgta

SEQ ID NO: 8221 - DNA, 1079 bp, Homo sapiens
  source 1..1079: mol_type = unassigned DNA
tggagctccggttttcagcctctttccgggctacctggtagcaatttgaggctctgtcatcagtttctgctacgtttcaaagatcctggagaagcctagtgttgtgtcaagacgccgatggacccatcacagtttaatccaacctacatcccagggtctccacaaatgctcaccgaagaaaattcccgggacgattcaggggcctctcaaatctcctccgagacgttgataaagaaccttagtaacttgactatcaacgctagtagcgaatctgtttcccctctatcggaagctttactccgtcgagagtctgtaggagcagcagtcctcagggaaatcgaagatgagtggctttacagcaggagaggagtaagaacattgctgtctgtgcagagagaaaagatggcaagattgagatacatgttactcggcggagttcgtacgcatgaaagaagaccaacaaacaaggagcctaagggagttaagaaggaatcaagaccattcaaatgtccctgcagtttctgcgtgtctaatggatgggatccttctgagaatgctagaatagggaatcaagacaccaagccacttcagccataaatcttattcttgcacctttttttcttggtagtaattttatatagcaggttgagaaagctactctatgctagtatagactatacaccaataattttgataatgagttctaggatgtatttttcttgtatctttttcttcctactatgatactagtaattcataagggatctgtgtaatctgaatgtatttgaataactttagctctactgtttgatttgacccaaagaagccaagatgatataagtattcccatgtgtcttagaagcccaaagtcagtgagatgaaacccaacatcaagaaattgaagcaaagttacttatggataaagaaagcattaggtagttgggctatagcataattagattttctggctttcaaaaatttggattgcaatcacagcaaactttgttatttttacagttttcagtacaaaagtgtttatatagaaacaataaagttgacatttgagtaccttttaaaaa

SEQ ID NO: 8222 - DNA, 2817 bp, Homo sapiens
  source 1..2817: mol_type = unassigned DNA
aagtgggaggagactttgcaaatagcaatcttggggcaggggccattttggaagcatgttgcgaggctccgcttcttctacaagtatggagaaggcaaaaggcaaggagtggacctccacagagaagtcgagggaagaggatcagcaggcttctaatcaaccaaattcaattgctttgccaggaacatcagcaaagagaaccaaagaaaaaatgtctatcaaaggcagtaaagtgctctgccctaagaaaaaggcagagcacactgacaaccccagacctcagaagaagataccaatccctccattaccttctaaactgccacctgttaatctgattcaccgggacattctgcgggcctggtgccaacaattgaagctgagctccaaaggccagaaattggatgcatataagcgcctgtgtgcctttgcctacccaaatcaaaaggattttcctagcacagcaaaagaggccaaaatccggaaatcattgcaaaaaaaattaaaggtggaaaagggggaaacgtccctgcaaagttctgagacacatcctcctgaagtggctcttcctcctgtgggggagccgcctgccctggaaaattccactgctctccttgagggagttaatacagttgtggtgacaacttctgccccagaggctttgctggcctcctgggcgagaatttcagccagggcgaggacaccagaggcagtggaatctccacaagaggcctctggtgtcaggtggtgtgtggtccatgggaaaagtctccctgcagacacagatggttgggttcacctgcagtttcatgctggtcaagcctgggttccagaaaagcaagaagggagagtgagtgcactcttcttgcttcctgcctccaattttccacccccgcaccttgaagacaatatgttgtgccccaaatgtgttcacaggaacaaggtcttaataaaaagcctccaatgggaatagaatatcaggaaaaaggccacatctatggtaattaatggcagaaaagctggagagttggattctgcggtgctgctgacaggtgaactctggtcctctgcacctgtttatgggccatgcagactggtggggtggcagatgttagcctaagacccctagcagtgcctgttgctttgtgagtggagatagagactcttacatttaaaaatggaaaaacatttcacaaattaccataaattgtagttaatatgtagaaaaactcattcatactacttttctaaaatagacatgacttcagcagcagcttttttttgttgtattttgagacagtgtctcactgttgcccaggctggagtgcagtggtgcaatctcagttcagtgcaatctccgcctcctgggttcaaatgattctcctgcctcagcctcctgagtagctaggtacaggcacctgccaccacacccagctaattttttgtatttttagtagagatggggtttcaccatgttggccaggttggtctcaaactcctggactcaagtgatcaccctcctcagcctcccaaaatgctgggactatgggcatgagcccctgcgcctgaccttcaacagctcttttaagtgagttcttcagctaagcattgtgatggacttgagtaaaatggtagttggctcttgtgctcaattttctcttcctctgaacactgactactttaggagctgcttcattccaattgcaatttcataaaacgtaaagtattttaaggcaaagaaaggctgttaattccctccctcccccaaacacatgatttttaatattctaaacaatatttttcaaagttctcttaataacctgagatttctatggtttgactccaggatcaaaacacaagggactttgtattatttcacttataattgttttgtatatttctggagtttaaaatgtttaaggttgcttcccgctcataaatacataatatattgaatttaaaatgtgtttattaaccgattctccataaataaaaataagatgtgtatgtaaaataattcatctgttgtatttagagaaccatattcattgcatgcaaattttattgttagtgttcttaactcaagtaggagtaaaccaaaaagtgtgatttttcttttgtatgactcgtttgttctttattagttggtggtatgggttggatcatttgtttttaaaactacttaggtatgattcacatacaaaaagctgcacatatttaatgtatcctattgtgtaattaatttttaatttttttgtgtacttcctaaacttatagtcctgcgagtctgggaacagatctgtttttcacttatcctgatttaatgacagtttccaacattgttttgttattacaagtaggggatctttttttttgcccgtttaatgaagatactaaaaataatgcactggaaggagtggaagagttggaaaatttgtaaccatcataatacaggtgtaataggtttgggaaagaatcctcaaaaatgttaaagcaagggaggaaagtttgttgagaagcaagatgttcttctctcctgcccgcccccgccgttggttgttggtggtcagaattattgtgtaataaataatagacattttttcttatactatgtgtattgttccttttgtttcctttttaaacttctcccctgctttatttggatgggtcaagtttctgttctgtttccttcctttctattaatttggaaatgtccttggctttacgattctgcttgtagatacttcccctgcttctaacacatttcaataaacttaaatttctctatatacaaaataaattaataattggagtctacca

SEQ ID NO: 8223 - DNA, 679 bp, Homo sapiens
  source 1..679: mol_type = unassigned DNA
cctgagcctcggccggcgtgattaggcctggtttgcgctggagagtggtcttggttgtgagggtcataagatgggaactctcccggcacgtagacatatcccgccgtgggtgaaagttcccgaagacctgaaagatccagaggtgttccaggtccagacgcggctgctgaaagccattttcggcccggacggatctcgaatcccttacatcgagcaggtgagcaaggccatgctcgagctgaaggctctggagtcttcagacctcaccgaggtcgtggtttacggctcctatttgtacaagctccggaccaagtggatgctccagtccatggctgagtggcaccgccagcgccaggagcgagggatgctcaaacttgccgaagccatgaatgccctcgaactaggcccttggatgaagtgaaccagtttccagccaatgcaatgaagccgggttgcagagattaggttgtggccagagctagagtgattccttaagcttgttttaaaatctgctccagcctaaagagttaagggaaaaccatttgttcccttaaagagttaagggaaaacccttggctctgagtcttgttgtgaatatttctttgatgattgttaataaaaagtgttttttcttttttcccatttttaaaaataacaataaagttttaaataagttgat

SEQ ID NO: 8224 - DNA, 1746 bp, Homo sapiens
  source 1..1746: mol_type = unassigned DNA
cagccccacgctttgcgactcgcggtgacccctacgcggaactctctcgcggtaattcgaagtaccgcgcctgcgtgctgcagtagcgcctggtggcggtggcagtttgcccgcgggtgtgtgaagggagacagtgtggaggccacagggtactcgccacgatgagcagcaccttagctaagatcgcggagatagaagcagagatggctcggactcaaaagaacaaggccacagcacaccacttagggctgcttaaggctcgtcttgctaagcttcgtcgagaactcattactccaaagggtggtggtggtggaggtccaggagaaggttttgatgtggccaagacaggtgatgctcgaattggatttgttggttttccatctgtggggaagtcaacactgcttagtaacctggcaggggtatattctgaggtggcagcctatgaattcactactctgaccactgtgcctggtgtcatcagatacaaaggtgccaagatccagctcctggatctcccaggtatcattgaaggtgccaaggatgggaaaggtagaggtcgtcaagtcattgcagtggcccgaacctgtaacttgatcttgattgttctggatgtcctgaaacctttgggacataagaagataattgaaaatgagctggaaggctttggcattcgcttgaacagcaaaccccccaacattggctttaagaagaaggacaagggaggcattaatctcacagccacttgcccccagagtgagctggatgctgaaactgtgaagagcattctggctgaatacaagattcataatgccgatgtgactctacgtagtgatgctacagctgatgacctcattgatgtggtggaaggaaacagagtttatatcccctgtatctatgtgttaaataagattgaccaaatctccattgaggaattggatatcatctataaggtgcctcactgtgtacccatctctgcccatcaccgctggaattttgatgacctattggaaaagatctgggactatctgaaactagtgagaatttacaccaaacccaaaggccagttaccagattacacatccccagtggtgcttccttactccaggaccacagtggaggatttctgcatgaagattcacaaaaatcttatcaaagaatttaaatatgctctggtctggggtctctctgtgaaacacaatcctcagaaagtgggtaaagaccatacgttggaggatgaggatgtcattcaaattgtgaagaagtgaaacctttcccttttcccatctgccggacgaaccacaacagcgttccccatgatcaagcaccctaccccagttctttctggttttggcagtcactggatcaggatccaggggagggagatggaggcacccaaactggaacttcatttgtcttaccttggtgtcaccttgtatgtcgaactgcataaaagatctggtaggctggtcagctacatgcagctcatgtgtcattgtcagaatttgttttgggatgggctgaatgaggaagggtatatacggtgaagcagctacagaagggatccttgggaacttcatcttgagtgtgaaatggataaaaatatgacatgctgcatcttacttgatgtttacttatgggaaccccttccaaactagatatggctttcagtcctttcaagtagtctttcccacatgatactggagagaggaaggactttatgtaagttaattgatcactccccgcaag

SEQ ID NO: 8225 - DNA, 1892 bp, Homo sapiens
  source 1..1892: mol_type = unassigned DNA
cgccgtcagaccggaattgccggtgccgccgccaccgctgtctgtgcgcccacctctgctgctaccatggggatcttagagaagatctcggagatcgagaaggagatcgctcggacacagaagaacaaggccactgagtatcatctgggcctgctgaaagctaagctcgccaagtatcgggcccagctcctggaaccgtccaaatcggcctcgtccaaaggagagggctttgatgtcatgaagtcgggtgatgcccgtgtggcgctgattggatttccctctgtgggtaagtccacattcttgagtctgatgacctccacggccagcgaggcagcgtcctatgagttcaccactctgacgtgtattcctggggtcattgaatacaaaggtgccaacatccagctcctggaccttcctggaatcattgaaggcgcagcccaaggaaaaggccgtggccggcaggtgatcgctgtggcgcgcacggctgacgtcatcatcatgatgctggatgccaccaagggagaggtgcagaggtctctgctggagaaggagctggagtctgtgggcatccgcctcaacaagcacaagcctaacatctacttcaagcccaagaaaggtggtggcatctcctttaactcgacagtcacgctgacccagtgctcggaaaagctggtgcagctcatcctgcacgaatacaagatcttcaatgcagaagtgcttttccgagaagactgctccccggacgagttcatcgatgtgatcgtgggcaaccgggtgtacatgccctgcctgtatgtttataacaaaatcgaccagatctccatggaagaggtggaccgcctggcccgaaaacccaacagtgtggtcatcagctgcggcatgaagctgaacctggactatctgctggagatgctttgggagtacttggccctgacctgcatctacaccaagaagagaggacagaggccagacttcacagacgccatcattctccggaaaggggcctcagtggagcacgtgtgccaccgcatccaccggtcactcgccagccagttcaagtacgccctggtgtggggcaccagcaccaagtacagtccgcagcgggtgggcctgacccacaccatggagcatgaggacgtcatccagatcgtgaagaagtaacggcgcctgccgggcctcccgcccacctgcctcgtctccctggggaggtggtcccactgggacacacaaacacccaaacagaaaaatacaaatacacgtaccccaggaaggggtccctcaagtctctgctatttacagaagtttcttcagtaggcagacgaagagtgtgttggggcaaaggggctcggttggaggcatttcccataagactgagccctctcatgggggttttgagtttgtagtgctgagcctgcatctgtgcctcccagccccctgcactgagggagcaagttgcccacatgcccgccagccagggcctaaagcagatggcatgctcagtgccaggctggtagctgggcctgtttgggtccctggaggctgtggctgctgtcatggcacctcactccctcagctcttgccagcttctctgacacttgggttgggggcccttccaggaggaaacccccttgggtgccccacacagggctctccatgatgggaaccagtggttagtggcttcaaaggcccagctgacaccctccacagcctaaggggtgtcctaaagtgcctccccctgtattccccctcccagggcagcccctgcccagcacaaaaccccaggaccctggctctgcacgcctggggcagggacttttgagtttaggatctgtattttctaagtccccagttctcctggctctcctttctgaaataaaggattgaaaacggtt

SEQ ID NO: 8226 - DNA, 1909 bp, Homo sapiens
  source 1..1909: mol_type = unassigned DNA
tctttggcttccgggcgcacgctactctgtcgccgccgtcagaccggaattgccggtgccgccgccaccgctgtctgtgcgcccacctctgctgctaccatggggatcttagagaagatctcggagatcgagaaggagatcgctcggacacagaagaacaaggccactgagtatcatctgggcctgctgaaagctaagctcgccaagtatcgggcccagctcctggaaccgtccaaatcggcctcgtccaaaggagagggctttgatgtcatgaagtcgggtgatgcccgtgtggcgctgattggatttccctctgtgggtaagtccacattcttgagtctgatgacctccacggccagcgaggcagcgtcctatgagttcaccactctgacgtgtattcctggggtcattgaatacaaaggtgccaacatccagctcctggaccttcctggaatcattgaaggcgcagcccaaggaaaaggccgtggccggcaggtgatcgctgtggcgcgcacggctgacgtcatcatcatgatgctggatgccaccaagggagaggtgcagaggtctctgctggagaaggagctggagtctgtgggcatccgcctcaacaagcacaagcctaacatctacttcaagcccaagaaaggtggtggcatctcctttaactcgacagtcacgctgacccagtgctcggaaaagctggtgcagctcatcctgcacgaatacaagatcttcaatgcagaagtgcttttccgagaagactgctccccggacgagttcatcgatgtgatcgtgggcaaccgggtgtacatgccctgcctgtatgtttataacaaaatcgaccagatctccatggaagaggtggaccgcctggcccgaaaacccaacagtgtggtcatcagctgcggcatgaagctgaacctggactatctgctggagatgctttgggagtacttggccctgacctgcatctacaccaagaagagaggacagaggccagacttcacagacgccatcattctccggaaaggggcctcagtggagcacgtgtgccaccgcatccaccggtcactcgccagccagttcaaggcaccagcaccaagtacagtccgcagcgggtgggcctgacccacaccatggagcatgaggacgtcatccagatcgtgaagaagtaacggcgcctgccgggcctcccgcccacctgcctcgtctccctggggaggtggtcccactgggacacacaaacacccaaacagaaaaatacaaatacacgtaccccaggaaggggtccctcaagtctctgctatttacagaagtttcttcagtaggcagacgaagagtgtgttggggcaaaggggctcggttggaggcatttcccataagactgagccctctcatgggggttttgagtttgtagtgctgagcctgcatctgtgcctcccagccccctgcactgagggagcaagttgcccacatgcccgccagccagggcctaaagcagatggcatgctcagtgccaggctggtagctgggcctgtttgggtccctggaggctgtggctgctgtcatggcacctcactccctcagctcttgccagcttctctgacacttgggttgggggcccttccaggaggaaacccccttgggtgccccacacagggctctccatgatgggaaccagtggttagtggcttcaaaggcccagctgacaccctccacagcctaaggggtgtcctaaagtgcctccccctgtattccccctcccagggcagcccctgcccagcacaaaaccccaggaccctggctctgcacgcctggggcagggacttttgagtttaggatctgtattttctaagtccccagttctcctggctctcctttctgaaataaaggattgaaaacggtt

SEQ ID NO: 8227 - DNA, 2617 bp, Homo sapiens
  source 1..2617: mol_type = unassigned DNA
agtttcagtttccatttctgatttctgctctctgcgctgagcacagcggcaccaggctgagctaagcagggccgccttgggcaggcctacgtggtggtgcaggcgagacccaggctgggcaaggcgcagtttcagtttccatcttgggtctctgagctgagcagagtggcaccaggctgagttaagtgggactgccctgggcagacctacctactagagcagaatggagcttcggtcctaccaatgggaggtgatcatgcctgccctggagggcaagaatatcatcatctggctgcccacgggtgccgggaagacccgggcggctgcttatgtggccaagcggcacctagagactgtggatggagccaaggtggttgtattggtcaacagggtgcacctggtgacccagcatggtgaagagttcaggcgcatgctggatggacgctggaccgtgacaaccctgagtggggacatgggaccacgtgctggctttggccacctggcccggtgccatgacctgctcatctgcacagcagagcttctgcagatggcactgaccagccccgaggaggaggagcacgtggagctcactgtcttctccctgatcgtggtggatgagtgccaccacacgcacaaggacaccgtctacaacgtcatcatgagccagtacctagaacttaaactccagagggcacagccgctaccccaggtgctgggtctcacagcctccccaggcactggcggggcctccaaactcgatggggccatcaaccacgtcctgcagctctgtgccaacttggacacgtggtgcatcatgtcaccccagaactgctgcccccagctgcaggagcacagccaacagccttgcaaacagtacaacctctgccacaggcgcagccaggatccgtttggggacttgctgaagaagctcatggaccaaatccatgaccacctggagatgcctgagttgagccggaaatttgggacgcaaatgtatgagcagcaggtggtgaagctgagtgaggctgcggctttggctgggcttcaggagcaacgggtgtatgcgcttcacctgaggcgctacaatgacgcgctgctcatccatgacaccgtccgcgccgtggatgccttggctgcgctgcaggatttctatcacagggagcacgtcactaaaacccagatcctgtgtgccgagcgccggctgctggccctgttcgatgaccgcaagaatgagctggcccacttggcaactcatggcccagagaatccaaaactggagatgctggaaaagatcctgcaaaggcagttcagtagctctaacagccctcggggtatcatcttcacccgcacccgccaaagcgcacactccctcctgctctggctccagcagcagcagggcctgcagactgtggacatccgggcccagctactgattggggctgggaacagcagccagagcacccacatgacccagagggaccagcaagaagtgatccagaagttccaagatggaaccctgaaccttctggtggccacgagtgtggcggaggaggggctggacatcccacattgcaatgtggtggtgcgttatgggctcttgaccaatgaaatctccatggtccaggccaggggccgtgcccgggccgatcagagtgtatacgcgtttgtagcaactgaaggtagccgggagctgaagcgggagctgatcaacgaggcgctggagacgctgatggagcaggcagtggctgctgtgcagaaaatggaccaggccgagtaccaggccaagatccgggatctgcagcaggcagccttgaccaagcgggcggcccaggcagcccagcgggagaaccagcggcagcagttcccagtggagcacgtgcagctactctgcatcaactgcatggtggctgtgggccatggcagcgacctgcggaaggtggagggcacccaccatgtcaatgtgaaccccaacttctcgaactactataatgtctccagggatcctgtggtcatcaacaaagtcttcaaggactggaagcctgggggtgtcatcagctgcaggaactgtggggaggtctggggtctgcagatgatctacaagtcagtgaagctgccagtgctcaaagtccgcagcatgctgctggagacccctcaggggcggatccaggccaaaaagtggtcccgcgtgcccttctccgtgcctgactttgacttcctgcagcattgtgccgagaacttgtcggacctctccctggactgaccacctcattgctgcagtgcccggtttgggctgtagggggcgggagagtctgcagcagactccaggcccctccttcctgaatcatcagctgtgggcatcaggcccaccagccacacaggagtcctgggcaccctggcttaggctcccgcaatgggaaaacaaccggagggccagagcttagtccagacctaccttgtacgcacatagacattttcatatgcactggatggagttagggaaactgaggcaaaagaatttgccatactgtactcagaatcacgacattccttccctaccaaggccacttctattttttgaggctcctcataaaaataaatgaaaaaatgggatagaaaa

SEQ ID NO: 8228 - DNA, 1072 bp, Homo sapiens
  source 1..1072: mol_type = unassigned DNA
tctcttggttctttttcctggggcggggatgggagattcctaagtcggctcagctggctccttccctcagtttcagtttccatcttgggtctctgagctgagcagagtggcaccaggctgagttaagtgggactgccctgggcagacctacctactagagcagaatggagcttcggtcctaccaatgggaggtgatcatgcctgccctggagggcaagaatatcatcatctggctgcccacgggtgccgggaagacccgggcggctgcttatgtggccaagcggcacctagagactgtggatggagccaaggtggttgtattggtcaacagggtgcacctggtgacccagcatggtgaagagttcaggcgcatgctggatggacgctggaccgtgacaaccctgagtggggacatgggaccacgtgctggctttggccacctggcccggtgccatgacctgctcatctgcacagcagagcttctgcagatggcactgaccagccccgaggaggaggagcacgtggagctcactgtcttctccctgatcgtggtggatgagtgccaccacacgcacaaggacaccgtctacaacgtcatcatgagccagtacctagaacttaaactccagagggcacagccgctaccccaggtgctgggtctcacagcctccccaggcactggcggggcctccaaactcgatggggccatcaaccacgtcctgcagctctgtgccaacttggacacgtggtgcatcatgtcaccccagaactgctgcccccagctgcaggagcacagccaacagccttgcaaacagtacaacctctgccacaggcgcagccaggatccgtttggggacttgctgaagaagctcatggaccaaatccatgaccacctggagatgcctgagttgagccggaaatttgggacgcaaatgtatgagcagcaggtggtgaagctgagtgaggctgcggctttggctgggcttcaggagcaacgggtgtatgcgcttcacctgaggcgctacaatgacgcgctgctcatccatgacaccgtccgcgccgtggatgcctt

SEQ ID NO: 8229 - DNA, 2227 bp, Homo sapiens
  source 1..2227: mol_type = unassigned DNA
tttctcttggttctttttcctggggcggggatgggagattcctaagtcggctcagctggctccttccctcagtttcagtttccatcttgggtctctgagctgagcagagtggcaccaggctgagttaagtgggactgccctgggcagacctacctactagagcagaatggagcttcggtcctaccaatgggaggtgatcatgcctgccctggagggcaagaatatcatcatctggctgcccacgggtgccgggaagacccgggcggctgcttatgtggccaagcggcacctagagactgtggatggagccaaggtggttgtattggtcaacagggtgcacctggtgacccagcatggtgaagagttcaggcgcatgctggatggacgctggaccgtgacaaccctgagtggggacatgggaccacgtgctggctttggccacctggcccggtgccaccacacgcacaaggacaccgtctacaacgtcatcatgagccagtacctagaacttaaactccagagggcacagccgctaccccaggtgctgggtctcacagcctccccaggcactggcggggcctccaaactcgatggggccatcaaccacgtcctgcagctctgtgccaacttggacacgtggtgcatcatgtcaccccagaactgctgcccccagctgcaggagcacagccaacagccttgcaaacagtacaacctctgccacaggcgcagccaggatccgtttggggacttgctgaagaagctcatggaccaaatccatgaccacctggagatgcctgagttgagccggaaatttgggacgcaaatgtatgagcagcaggtggtgaagctgagtgaggctgcggctttggctgggcttcaggagcaacgggtgtatgcgcttcacctgaggcgctacaatgacgcgctgctcatccatgacaccgtccgcgccgtggatgccttggctgcgctgcaggatttctatcacagggagcacgtcactaaaacccagatcctgtgtgccgagcgccggctgctggccctgttcgatgaccgcaagaatgagctggcccacttggcaactcatggcccagagaatccaaaactggagatgctggaaaagatcctgcaaaggcagttcagtagctctaacagccctcggggtatcatcttcacccgcacccgccaaagcgcacactccctcctgctctggctccagcagcagcagggcctgcagactgtggacatccgggcccagctactgattggggctgggaacagcagccagagcacccacatgacccagagggaccagcaagaagtgatccagaagttccaagatggaaccctgaaccttctggtggccacgagtgtggcggaggaggggctggacatcccacattgcaatgtggtggtgcgttatgggctcttgaccaatgaaatctccatggtccaggccaggggccgtgcccgggccgatcagagtgtatacgcgtttgtagcaactgaaggtagccgggagctgaagcgggagctgatcaacgaggcgctggagacgctgatggagcaggcagtggctgctgtgcagaaaatggaccaggccgagtaccaggccaaggaactactataatgtctccagggatcctgtggtcatcaacaaagtcttcaaggactggaagcctgggggtgtcatcagctgcaggaactgtggggaggtctggggtctgcagatgatctacaagtcagtgaagctgccagtgctcaaagtccgcagcatgctgctggagacccctcaggggcggatccaggccaaaaagtggtcccgcgtgcccttctccgtgcctgactttgacttcctgcagcattgtgccgagaacttgtcggacctctccctggactgaccacctcattgctgcagtgcccggtttgggctgtagggggcgggagagtctgcagcagactccaggcccctccttcctgaatcatcagctgtgggcatcaggcccaccagccacacaggagtcctgggcaccctggcttaggctcccgcaatgggaaaacaaccggagggccagagcttagtccagacctaccttgtacgcacatagacattttcatatgcactggatggagttagggaaactgaggcaaaagaatttgccatactgtactcagaatcacgacattccttccctaccaaggccacttctattttttgaggctcctc

SEQ ID NO: 8230 - DNA, 730 bp, Homo sapiens
  source 1..730: mol_type = unassigned DNA
gctctggccaggagttgggatgagtggagggcccagtgggtctgagtcccctgccattcccagaatggagctgtggccctaccaatgggaggtgatcatgcctgccagggcgctggcgcagcagcagtacttaaccggagtttgtactcacggcagttggcgatgacttttcagtttccatcttgggtctctgagctgagcagagtggcaccaggctgagttaagtgggactgccctgggcagacctacctactagagcagaatggagcttcggtcctaccaatgggaggtgatcatgcctgccctggagggcaagaatatcatcatctggctgcccacgggtgccgggaagacccgggcggctgcttatgtggccaagcggcacctagagactgtggatggagccaaggtggttgtattggtcaacagggtgcacctggtgacccagcatggtgaagagttcaggcgcatgctggatggacgctggaccgtgacaaccctgagtggggacatgggaccacgtgctggctttggccacctggcccggtgccatgacctgctcatctgcacagcagagcttctgcagatggcactgaccagccccgaggaggaggagcacgtggagctcactgtcttctccctgatcgtggtggatgagtgccaccacacgcacaaggacaccgtctacaacgtcatcatgagccagtacctagaacttaaactccagagg

SEQ ID NO: 8231 - DNA, 2909 bp, Homo sapiens
  source 1..2909: mol_type = unassigned DNA
acacaatacccacacatgcatatacccttctagtcagaggtctcccctcccccttcttcccacccccaggtgtaagaaggacgattccaggaacctaaggctttgttactctgccccattttcaatgaagggtaggagggagttagacaggggttggggcggggccagtgagcaggatgcctgggtctccagttcctgccagtgagtccctaggcctccatctctctcccttgctgtaccaccttcaccaccatccatgcgaccccaagagccttaatgactctagaagagactccaggcaggggaagctgaaaggacctttcactccctacttttggccagggccttctgtgccacctgccaagaccagcaggcctaccctctgaagaggtccaagcaacggaagtactactacgaagctgcctttctggccatccttgagaaaaatagacagatggccaaggagaggggcctaataagccccagtgattttgcccagctgcaaaaatacatggaatactccaccaaaaaggtcagtgatgtcctaaagctcttcgaggatggcgagatggctaaatatgtccaaggagatgccattgggtacgagggattccagcaattcctgaaaatctatctcgaagtggataatgttcccagacacctaagcctggcactgtttcaatcctttgagactggtcactgcttaaatgagacaaatgtgacaaaagatgtggtgtgtctcaatgatgtttcctgctacttttcccttctggagggtggtcggccagaagacaagttagaattcaccttcaagctgtacgacacggacagaaatgggatcctggacagctcagaagtggacaaaattatcctacagatgatgcgagtggctgaatacctggattgggatgtgtctgagctgaggccgattcttcaggagatgatgaaagagattgactatgatggcagtggctctgtctctcaagctgagtgggtccgggctggggccaccaccgtgccactgctagtgctgctgggtctggagatgactctgaaggacgacggacagcacatgtggaggcccaagaggttccccagaccagtctactgcaatctgtgcgagtcaagcattggtcttggcaaacagggactgagctgtaacctctgtaagtacactgttcacgaccagtgtgccatgaaagccctgccttgtgaagtcagcacctatgccaagtctcggaaggacattggtgtccaatcacatgtgtgggtgcgaggaggctgtgagtccgggcgctgcgaccgctgtcagaaaaagatccggatctaccacagtctgaccgggctgcattgtgtatggtgccacctagagatccacgatgactgcctgcaagcggtgggccatgagtgtgactgtgggctgctccgggatcacatcctgcctccatcttccatctatcccagtgtcctggcctctggaccggatcgtaaaaatagcaaaacaagccagaagaccatggatgatttaaatttgagcacctctgaggctctgcggattgaccctgttcctaacacccacccacttctcgtctttgtcaatcctaagagtggcgggaagcaggggcaaagggtgctctggaagttccagtatatattaaaccctcgacaggtgttcaacctcctaaaggatggtcctgagatagggctccgattattcaaggatgttcctgatagccggattttggtgtgtggtggagacggcacagtaggctggattctagagaccattgacaaagctaacttgccagttttgcctcctgttgctgtgttgcccctgggtactggaaatgatctggctcgatgcctaagatggggaggaggttatgaaggacagaatctggcaaagatcctcaaggatttagagatgagtaaagtggtacatatggatcgatggtctgtggaggtgatacctcaacaaactgaagaaaaaagtgacccagtcccctttcaaatcatcaataactacttctctattggcgtggatgcctctattgctcatcgattccacatcatgcgagagaaatatccggagaagttcaacagcagaatgaagaacaagctatggtacttcgaatttgccacatctgaatccatcttctcaacatgcaaaaagctggaggagtctttgacagttgagatctgtgggaaaccgctggatctgagcaacctgtccctagaaggcatcgcagtgctaaacatccctagcatgcatggtggctccaacctctggggtgataccaggagaccccatggggatatctatgggatcaaccaggccttaggtgctacagctaaagtcatcaccgaccctgatatcctgaaaacctgtgtaccagacctaagtgacaagagactggaagtggttgggctggagggtgcaattgagatgggccaaatctataccaagctcaagaatgctggacgtcggctggccaagtgctctgagatcaccttccacaccacaaaaacccttcccatgcaaattgacggagaaccctggatgcagacgccctgtacaatcaagatcacccacaagaaccagatgcccatgctcatgggcccacccccccgctccaccaatttctttggcttcttgagctaagggggacacccttggcctccaagccagccttgaacccacctccctgtccctggactctactcccgaggctctgtacattgctgccacatactcctgccagcttgggggagtgttccttcaccctcacagtatttattatcctgcaccacctcactgttccccatgcgcacacacatacacacaccccaaaacacatacattgaaagtgcctcatctgaataaaatgacttgtgtttcccctttggga

SEQ ID NO: 8232 - DNA, 2770 bp, Homo sapiens
  source 1..2770: mol_type = unassigned DNA
gcggccgcgtctgcctggcccgtcccctccagcccagctcgggctccagctccagcgccggcgcttcagctgcgaccgcgagccctctcaagcaaggtagagaccccgcgagccccccagcgccccaccctcccccatcggaaaaggacaggggtagggaagccgaggacccacgggctgcgttcgtgctgctgggtcgggaaggaggaagcgtgacagctggagcgggcctaccctctgaagaggtccaagcaacggaagtactactacgaagctgcctttctggccatccttgagaaaaatagacagatggccaaggagaggggcctaataagccccagtgattttgcccagctgcaaaaatacatggaatactccaccaaaaaggtcagtgatgtcctaaagctcttcgaggatggcgagatggctaaatatgtccaaggagatgccattgggtacgagggattccagcaattcctgaaaatctatctcgaagtggataatgttcccagacacctaagcctggcactgtttcaatcctttgagactggtcactgcttaaatgagacaaatgtgacaaaagatgtggtgtgtctcaatgatgtttcctgctacttttcccttctggagggtggtcggccagaagacaagttagaattcaccttcaagctgtacgacacggacagaaatgggatcctggacagctcagaagtggacaaaattatcctacagatgatgcgagtggctgaatacctggattgggatgtgtctgagctgaggccgattcttcaggagatgatgaaagagattgactatgatggcagtggctctgtctctcaagctgagtgggtccgggctggggccaccaccgtgccactgctagtgctgctgggtctggagatgactctgaaggacgacggacagcacatgtggaggcccaagaggttccccagaccagtctactgcaatctgtgcgagtcaagcattggtcttggcaaacagggactgagctgtaacctctgtaagtacactgttcacgaccagtgtgccatgaaagccctgccttgtgaagtcagcacctatgccaagtctcggaaggacattggtgtccaatcacatgtgtgggtgcgaggaggctgtgagtccgggcgctgcgaccgctgtcagaaaaagatccggatctaccacagtctgaccgggctgcattgtgtatggtgccacctagagatccacgatgactgcctgcaagcggtgggccatgagtgtgactgtgggctgctccgggatcacatcctgcctccatcttccatctatcccagtgtcctggcctctggaccggatcgtaaaaatagcaaaacaagccagaagaccatggatgatttaaatttgagcacctctgaggctctgcggattgaccctgttcctaacacccacccacttctcgtctttgtcaatcctaagagtggcgggaagcaggggcaaagggtgctctggaagttccagtatatattaaaccctcgacaggtgttcaacctcctaaaggatggtcctgagatagggctccgattattcaaggatgttcctgatagccggattttggtgtgtggtggagacggcacagtaggctggattctagagaccattgacaaagctaacttgccagttttgcctcctgttgctgtgttgcccctgggtactggaaatgatctggctcgatgcctaagatggggaggaggttatgaaggacagaatctggcaaagatcctcaaggatttagagatgagtaaagtggtacatatggatcgatggtctgtggaggtgatacctcaacaaactgaagaaaaaagtgacccagtcccctttcaaatcatcaataactacttctctattggcgtggatgcctctattgctcatcgattccacatcatgcgagagaaatatccggagaagttcaacagcagaatgaagaacaagctatggtacttcgaatttgccacatctgaatccatcttctcaacatgcaaaaagctggaggagtctttgacagttgagatctgtgggaaaccgctggatctgagcaacctgtccctagaaggcatcgcagtgctaaacatccctagcatgcatggtggctccaacctctggggtgataccaggagaccccatggggatatctatgggatcaaccaggccttaggtgctacagctaaagtcatcaccgaccctgatatcctgaaaacctgtgtaccagacctaagtgacaagagactggaagtggttgggctggagggtgcaattgagatgggccaaatctataccaagctcaagaatgctggacgtcggctggccaagtgctctgagatcaccttccacaccacaaaaacccttcccatgcaaattgacggagaaccctggatgcagacgccctgtacaatcaagatcacccacaagaaccagatgcccatgctcatgggcccacccccccgctccaccaatttctttggcttcttgagctaagggggacacccttggcctccaagccagccttgaacccacctccctgtccctggactctactcccgaggctctgtacattgctgccacatactcctgccagcttgggggagtgttccttcaccctcacagtatttattatcctgcaccacctcactgttccccatgcgcacacacatacacacaccccaaaacacatacattgaaagtgcctcatctgaataaaatgacttgtgtttcccctttgggatctgct

SEQ ID NO: 8233 - DNA, 2582 bp, Homo sapiens
  source 1..2582: mol_type = unassigned DNA
agcccagctcgggctccagctccagcgccggcgcttcagctgcgaccgcgagccctctcaagcaaggtagagaccccgcgagccccccagcgccccaccctcccccatcggaaaaggacaggggcctaccctctgaagaggtccaagcaacggaagtactactacgaagctgcctttctggccatccttgagaaaaatagacagatggccaaggagaggggcctaataagccccagtgattttgcccagctgcaaaaatacatggaatactccaccaaaaaggtcagtgatgtcctaaagctcttcgaggatggcgagatggctaaatatgtccaaggagatgccattgggtacgagggattccagcaattcctgaaaatctatctcgaagtggataatgttcccagacacctaagcctggcactgtttcaatcctttgagactggtcactgcttaaatgagacaaatgtgacaaaagatgtggtgtgtctcaatgatgtttcctgctacttttcccttctggagggtggtcggccagaagacaagttagaattcaccttcaagctgtacgacacggacagaaatgggatcctggacagctcagaagtggacaaaattatcctacagatgatgcgagtggctgaatacctggattgggatgtgtctgagctgaggccgattcttcaggagatgatgaaagagattgactatgatggcagtggctctgtctctcaagctgagtgggtccgggctggggccaccaccgtgccactgctagtgctgctgggtctggagatgactctgaaggacgacggacagcacatgtggaggcccaagaggttccccagaccagtctactgcaatctgtgcgagtcaagcattggtcttggcaaacagggactgagctgtaaccgtccaatcacatgtgtgggtgcgaggaggctgtgagtccgggcgctgcgaccgctgtcagaaaaagatccggatctaccacagtctgaccgggctgcattgtgtatggtgccacctagagatccacgatgactgcctgcaagcggtgggccatgagtgtgactgtgggctgctccgggatcacatcctgcctccatcttccatctatcccagtgtcctggcctctggaccggatcgtaaaaatagcaaaacaagccagaagaccatggatgatttaaatttgagcacctctgaggctctgcggattgaccctgttcctaacacccacccacttctcgtctttgtcaatcctaagagtggcgggaagcaggggcaaagggtgctctggaagttccagtatatattaaaccctcgacaggtgttcaacctcctaaaggatggtcctgagatagggctccgattattcaaggatgttcctgatagccggattttggtgtgtggtggagacggcacagtaggctggattctagagaccattgacaaagctaacttgccagttttgcctcctgttgctgtgttgcccctgggtactggaaatgatctggctcgatgcctaagatggggaggaggttatgaaggacagaatctggcaaagatcctcaaggatttagagatgagtaaagtggtacatatggatcgatggtctgtggaggtgatacctcaacaaactgaagaaaaaagtgacccagtcccctttcaaatcatcaataactacttctctattggcgtggatgcctctattgctcatcgattccacatcatgcgagagaaatatccggagaagttcaacagcagaatgaagaacaagctatggtacttcgaatttgccacatctgaatccatcttctcaacatgcaaaaagctggaggagtctttgacagttgagatctgtgggaaaccgctggatctgagcaacctgtccctagaaggcatcgcagtgctaaacatccctagcatgcatggtggctccaacctctggggtgataccaggagaccccatggggatatctatgggatcaaccaggccttaggtgctacagctaaagtcatcaccgaccctgatatcctgaaaacctgtgtaccagacctaagtgacaagagactggaagtggttgggctggagggtgcaattgagatgggccaaatctataccaagctcaagaatgctggacgtcggctggccaagtgctctgagatcaccttccacaccacaaaaacccttcccatgcaaattgacggagaaccctggatgcagacgccctgtacaatcaagatcacccacaagaaccagatgcccatgctcatgggcccacccccccgctccaccaatttctttggcttcttgagctaagggggacacccttggcctccaagccagccttgaacccacctccctgtccctggactctactcccgaggctctgtacattgctgccacatactcctgccagcttgggggagtgttccttcaccctcacagtatttattatcctgcaccacctcactgttccccatgcgcacacacatacacacaccccaaaacacatacattgaaagtgcctcatctgaataaaatgacttgtgtttcccctttgggatctgctaagtaa

SEQ ID NO: 8234 - DNA, 591 bp, Homo sapiens
  source 1..591: mol_type = unassigned DNA
agctgcgaccgcgagccctctcaagcaaggtagagaccccgcgagccccccagcgccccaccctcccccatcggaaaaggacaggggtagggaagccgaggacccacgggctgcgttcgtgctgctgggtcgggaaggaggaagcgtgacagctggagcgggcctaccctctgaagaggtccaagcaacggaagtactactacgaagctgcctttctggccatccttgagaaaaatagacagatggccaaggagaggggcctaataagccccagtgattttgcccagctgcaaaaatacatggaatactccaccaaaaaggtcagtgatgtcctaaagctcttcgaggatggcgagatggctaaatatgtccaaggagatgccattgggtacgagggattccagcaattcctgaaaatctatctcgaagtggataatgttcccagacacctaagcctggcactgtttcaatcctttgagactggtcactgcttaaatgagacaaatgtgacaaaagatgtggtgtgtctcaatgatgtttcctgctacttttcccttctggagggtggtcggccagaagacaagttagaat

SEQ ID NO: 8235 - DNA, 556 bp, Homo sapiens
  source 1..556: mol_type = unassigned DNA
attactgagcgcttgctgcctgtaaaacagtcctcagggagccaagagaagttccgaggcacagtccctctcatccccaggaactcctcgtacgtccaggacctgcgagggaaaagggcgcaaggcccacctgcacccaaaaagggggccttataaatgaagaaaggaagaatatccaggctctggcctgcacccagatctcagagcggcttggtgacgtggagcagacaaactccaggaacgcactggggcgcacaagtgtttctagggacggttggagaccctatctaaccctaagaaggcctaccctctgaagaggtccaagcaacggaagtactactacgaagctgcctttctggccatccttgagaaaaatagacagatggccaaggagaggggcctaataagccccagtgattttgcccagctgcaaaaatacatggaatactccaccaaaaaggtcagtgatgtcctaaagctcttcgaggatggcgagatggctaaatatgtccaaggagatgccattgggtacgagggattccagcaattcctgaaa

SEQ ID NO: 8236 - DNA, 542 bp, Homo sapiens
  source 1..542: mol_type = unassigned DNA
atgatctcggctcactgcaacctctgcctcccaggttcaagcgattctcctgcctcagcctcgcgagtaactgggactacaggcatgtgccaccacgcccggctaattttttgtatttttagtagagacaggttttcaccgtgttagccaggatggtctcaatctcctgatctcgtgatccgcctgcctcagcctgccaaagtgctgggattacagttcctgccagtgagtccctaggcctccatctctctcccttgctgtaccaccttcaccaccatccatgcgaccccaagagccttaatgactctagaagagactccaggcaggggaagctgaaaggacctttcactccctacttttggccagggccttctgtgccacctgccaagaccagcaggcctaccctctgaagaggtccaagcaacggaagtactactacgaagctgcctttctggccatccttgagaaaaatagacagatggccaaggagaggggcctaataagccccagtgattttgcccagctgcaaaaatacatggaat

SEQ ID NO: 8237 - DNA, 567 bp, Homo sapiens
  source 1..567: mol_type = unassigned DNA
gactggggaaaataggtctaaaaggaaagaggaacgtgaagaaggcctaccctctgaagaggtccaagcaacggaagtactactacgaagctgcctttctggccatccttgagaaaaatagacagatggccaaggagaggggcctaataagccccagtgattttgcccagctgcaaaaatacatggaatactccaccaaaaaggtcagtgatgtcctaaagctcttcgaggatggcgagatggctaaatatgtccaaggagatgccattgggtacgagggattccagcaattcctgaaaatctatctcgaagtggataatgttcccagacacctaagcctggcactgtttcaatcctttgagactggtcactgcttaaatgagacaaatgtgacaaaagatgtggtgtgtctcaatgatgtttcctgctacttttcccttctggagggtggtcggccagaagacaagttagaattcaccttcaagctgtacgacacggacagaaatgggatcctggacagctcagaagtggacaaaattatcctacagatgatgcgagtggctgaat

SEQ ID NO: 8238 - DNA, 2671 bp, Homo sapiens
  source 1..2671: mol_type = unassigned DNA
agcccagctcgggctccagctccagcgccggcgcttcagctgcgaccgcgagccctctcaagcaaggtagagaccccgcgagccccccagcgccccaccctcccccatcggaaaaggacaggggcctaccctctgaagaggtccaagcaacggaagtactactacgaagctgcctttctggccatccttgagaaaaatagacagatggccaaggagaggggcctaataagccccagtgattttgcccagctgcaaaaatacatggaatactccaccaaaaaggtcagtgatgtcctaaagctcttcgaggatggcgagatggctaaatatgtccaaggagatgccattgggtacgagggattccagcaattcctgaaaatctatctcgaagtggataatgttcccagacacctaagcctggcactgtttcaatcctttgagactggtcactgcttaaatgagacaaatgtgacaaaagatgtggtgtgtctcaatgatgtttcctgctacttttcccttctggagggtggtcggccagaagacaagttagaattcaccttcaagctgtacgacacggacagaaatgggatcctggacagctcagaagtggacaaaattatcctacagatgatgcgagtggctgaatacctggattgggatgtgtctgagctgaggccgattcttcaggagatgatgaaagagattgactatgatggcagtggctctgtctctcaagctgagtgggtccgggctggggccaccaccgtgccactgctagtgctgctgggtctggagatgactctgaaggacgacggacagcacatgtggaggcccaagaggttccccagaccagtctactgcaatctgtgcgagtcaagcattggtcttggcaaacagggactgagctgtaacctctgtaagtacactgttcacgaccagtgtgccatgaaagccctgccttgtgaagtcagcacctatgccaagtctcggaaggacattggtgtccaatcacatgtgtgggtgcgaggaggctgtgagtccgggcgctgcgaccgctgtcagaaaaagatccggatctaccacagtctgaccgggctgcattgtgtatggtgccacctagagatccacgatgactgcctgcaagcggtgggccatgagtgtgactgtgggctgctccgggatcacatcctgcctccatcttccatctatcccagtgtcctggcctctggaccggatcgtaaaaatagcaaaacaagccagaagaccatggatgatttaaatttgagcacctctgaggctctgcggattgaccctgttcctaacacccacccacttctcgtctttgtcaatcctaagagtggcgggaagcaggggcaaagggtgctctggaagttccagtatatattaaaccctcgacaggtgttcaacctcctaaaggatggtcctgagatagggctccgattattcaaggatgttcctgatagccggattttggtgtgtggtggagacggcacagtaggctggattctagagaccattgacaaagctaacttgccagttttgcctcctgttgctgtgttgcccctgggtactggaaatgatctggctcgatgcctaagatggggaggaggttatgaaggacagaatctggcaaagatcctcaaggatttagagatgagtaaagtggtacatatggatcgatggtctgtggaggtgatacctcaacaaactgaagaaaaaagtgacccagtcccctttcaaatcatcaataactacttctctattggcgtggatgcctctattgctcatcgattccacatcatgcgagagaaatatccggagaagttcaacagcagaatgaagaacaagctatggtacttcgaatttgccacatctgaatccatcttctcaacatgcaaaaagctggaggagtctttgacagttgagatctgtgggaaaccgctggatctgagcaacctgtccctagaaggcatcgcagtgctaaacatccctagcatgcatggtggctccaacctctggggtgataccaggagaccccatggggatatctatgggatcaaccaggccttaggtgctacagctaaagtcatcaccgaccctgatatcctgaaaacctgtgtaccagacctaagtgacaagagactggaagtggttgggctggagggtgcaattgagatgggccaaatctataccaagctcaagaatgctggacgtcggctggccaagtgctctgagatcaccttccacaccacaaaaacccttcccatgcaaattgacggagaaccctggatgcagacgccctgtacaatcaagatcacccacaagaaccagatgcccatgctcatgggcccacccccccgctccaccaatttctttggcttcttgagctaagggggacacccttggcctccaagccagccttgaacccacctccctgtccctggactctactcccgaggctctgtacattgctgccacatactcctgccagcttgggggagtgttccttcaccctcacagtatttattatcctgcaccacctcactgttccccatgcgcacacacatacacacaccccaaaacacatacattgaaagtgcctcatctgaataaaatgacttgtgtttcccctttgggatctgctaagtaa

SEQ ID NO: 8239 - DNA, 605 bp, Homo sapiens
  source 1..605: mol_type = unassigned DNA
gtcagaagcgctagaggtcgttgcgtggcgtgggtggctcggggagtgggtggctgagcggagctggggtccctggccagaggcggaacaaaatggggtcatggccaggaagacgcgctaacgcagcctaccctctgaagaggtccaagcaacggaagtactactacgaagctgcctttctggccatccttgagaaaaatagacagatggccaaggagaggggcctaataagccccagtgattttgcccagctgcaaaaatacatggaatactccaccaaaaaggtcagtgatgtcctaaagctcttcgaggatggcgagatggctaaatatgtccaaggagatgccattgggtacgagggattccagcaattcctgaaaatctatctcgaagtggataatgttcccagacacctaagcctggcactgtttcaatcctttgagactggtcactgcttaaatgagacaaatgtgacaaaagatgtggtgtgtctcaatgatgtttcctgctacttttcccttctggagggtggtcggccagaagacaagttagaattcaccttcaagctgtacgacacggacagaaatgggatcctggacagctca

SEQ ID NO: 8240 - DNA, 564 bp, Homo sapiens
  source 1..564: mol_type = unassigned DNA
agctcgggctccagctccagcgccggcgcttcagctgcgaccgcgagccctctcaagcaagatataacttccccaagtcacacagtggtatcagagctaagaatgggacccagatatgactgatctagttctgttccaaaaccgtgctgtattatattaacgcctaccctctgaagaggtccaagcaacggaagtactactacgaagctgcctttctggccatccttgagaaaaatagacagatggccaaggagaggggcctaataagccccagtgattttgcccagctgcaaaaatacatggaatactccaccaaaaaggtcagtgatgtcctaaagctcttcgaggatggcgagatggctaaatatgtccaaggagatgccattgggtacgagggattccagcaattcctgaaaatctatctcgaagtggataatgttcccagacacctaagcctggcactgtttcaatcctttgagactggtcactgcttaaatgagacaaatgtgacaaaagatgtggtgtgtctcaatgatgtttcctgctacttttcccttctggagg

SEQ ID NO: 8241 - DNA, 548 bp, Homo sapiens
  source 1..548: mol_type = unassigned DNA
agaagcagagctgccgccggcgcgggaagaagatgaggagcgcagcaaatggagaaaatgtgtccaaagccccggacatattcgagggagggtggagcaggttatggtgaactggaaacctagaaacgggcctctccaacttcgaagttcccagagtcgggggcgccgggcgcgggcgcggcgggcaggctggggtggggggcgggcagctatgtcgtcaggaacggggcggccccgctgcggccgcgtctgcctggcccgtcccctccagcccagctcgggctccagctccagcgccggcgcttcagctgcgaccgcgagccctctcaagcaaggcctaccctctgaagaggtccaagcaacggaagtactactacgaagctgcctttctggccatccttgagaaaaatagacagatggccaaggagaggggcctaataagccccagtgattttgcccagctgcaaaaatacatggaatactccaccaaaaaggtcagtgatgtcctaaagctcttcgaggatggcgagatggctaaatatgtccaa

SEQ ID NO: 8242 - DNA, 569 bp, Homo sapiens
  source 1..569: mol_type = unassigned DNA
attttcaatgaagggtaggagggagttagacaggggttggggcggggccagtgagcaggatgcctgggtctccagttcctgccagtgagtccctaggcctccatctctctcccttgctgtaccaccttcaccaccatccatgcgaccccaagagccttaatgactctagaagagactccaggcaggggaagctgaaaggacctttcactccctacttttggccagggccttctgtgccacctgccaagaccagcagatataacttccccaagtcacacagtggtatcagagctaagaatgggacccagatatgactgatctagttctgttccaaaaccgtgctgtattatattaacgcctaccctctgaagaggtccaagcaacggaagtactactacgaagctgcctttctggccatccttgagaaaaatagacagatggccaaggagaggggcctaataagccccagtgattttgcccagctgcaaaaatacatggaatactccaccaaaaaggtcagtgatgtcctaaagctcttcgaggatggcgagatggctaaatatgtccaa

SEQ ID NO: 8243 - DNA, 497 bp, Homo sapiens
  source 1..497: mol_type = unassigned DNA
agccctctcaagcaaggcctaccctctgaagaggtccaagcaacggaagtactactacgaagctgcctttctggccatccttgagaaaaatagacagatggccaaggagaggggcctaataagccccagtgattttgcccagctgcaaaaatacatggaatactccaccaaaaaggtcagtgatgtcctaaagctcttcgaggatggcgagatggctaaatatgtccaaggagatgccattgggtacgagggattccagcaattcctgaaaatctatctcgaagtggataatgttcccagacacctaagcctggcactgtttcaatcctttgagactggtcactgcttaaatgagacaaatgtgacaaaagatgtggtgtgtctcaatgatgtttcctgctacttttcccttctggagggtggtcggccagaagacaagttagaattcaccttcaagctgtacgacacggacagaaatgggatcctggacagctcag

SEQ ID NO: 8244 - DNA, 505 bp, Homo sapiens
  source 1..505: mol_type = unassigned DNA
gctcgggctccagctccagcgccggcgcttcagctgcgaccgcgagccctctcaagcaaggtagagaccccgcgagccccccagcgccccaccctcccccatcggaaaaggacaggggtagggaagccgaggacccacgggctgcgttcgtgctgctgggtcgggaaggaggaagcgtgacagctggagcggatataacttccccaagtcacacagtggtatcagagctaagaatgggacccagatatgactgatctagttctgttccaaaaccgtgctgtattatattaacgcctaccctctgaagaggtccaagcaacggaagtactactacgaagctgcctttctggccatccttgagaaaaatagacagatggccaaggagaggggcctaataagccccagtgattttgcccagctgcaaaaatacatggaatactccaccaaaaaggtcagtgatgtcctaaagctcttcgaggatggcgagatggctaaatatgtccaa

SEQ ID NO: 8245 - DNA, 6684 bp, Homo sapiens
  source 1..6684: mol_type = unassigned DNA
ttctttaacacattattgaaattacaagcatccaaagcagtttcatgtggacagattgcatattttgaaagcctgaggtattttatcatgaaacatgccatgtggaatctttgaagcatagacctctgcgcaacacctgaataaagaatcttttacctggtatgtgacagagcttctcaccaccaccatgacaaaccaggaaaaatgggcccacctcagcccttcggaattttcccaacttcagaaatatgctgagtattctacaaagaaattaaaggatgttcttgaagaattccatggtaatggtgtgcttgcaaagtataatcctgaagggaagcttgtggtgttgggcaatacaatagattttgaaggtttcaaactattcatgaagacattcctggaagccgagcttcctgatgatttcactgcacaccttttcatgtcatttagcaacaagtttcctcattctagtccaatggtaaaaagtaagcctgctctcctatcaggcggtctgagaatgaataaaggtgccatcacccctccccggactacttctcctgcaaatacgtgttccccagaagtaatccatctgaaggacattgtctgttacctgtctctgcttgaaagaggaagacctgaggataagcttgagtttatgtttcgcctttatgacacggatgggaatggcttcctggacagctcggagctagaaaatatcatcagtcagatgatgcatgttgcagaataccttgagtgggatgtcactgaacttaatccaatcctccatgaaatgatggaagaaattgactatgatcatgatggaaccgtgtctctggaggaatggattcaaggaggaatgacaacgattccacttcttgtgctcctgggcttagaaaataacgtgaaggatgatggacagcacgtgtggcgactgaagcactttaacaaacctgcctattgcaacctttgcctgaacatgctgattggcgtggggaagcagggcctctgctgttccttctgcaagtacacagtccatgagcgctgtgtggctcgagcacctccctcttgcatcaagacctatgtgaagtccaaaaggaacactgatgtcatgcaccattactgggttgaaggtaactgcccaaccaagtgtgataagtgccacaaaactgttaaatgttaccagggcctgacaggactgcattgtgtttggtgtcagatcacactgcataataaatgtgcttctcatctaaaacctgaatgtgactgtggacctttgaaggaccatattttaccacccacaacaatctgtccagtggtactgcagactctgcccacttcaggagtttcagttcctgaggaaagacaatcaacagtgaaaaaggaaaagagtggttcccagcagccaaacaaagtgattgacaagaataaaatgcaaagagccaactctgttactgtagatggacaaggcctgcaggtcactcctgtgcctggtactcacccacttttagtttttgtgaaccccaaaagtggtggaaaacaaggagaacgaatttacagaaaattccagtatctattaaatcctcgtcaggtttacagtctttctggaaatggaccaatgccagggttaaactttttccgtgatgttcctgacttcagagtgttagcctgtggtggagatggaaccgtgggctgggttttggattgcatagaaaaggccaatgtaggcaagcatcctccagttgcgattctgcctcttgggactggcaatgatctagcaagatgcctgcgatggggaggaggttacgaaggtgagaatctgatgaaaattctaaaagacattgaaaacagcacagaaatcatgttggacaggtggaagtttgaagtcatacctaatgacaaagatgagaaaggagacccagtgccttacagtatcatcaataattacttttccattggcgtggatgcctccattgcacacagattccacatcatgagagaaaaacacccagagaaattcaacagtagaatgaagaacaaattttggtattttgagtttggcacatctgaaactttctcagccacctgcaagaagctacatgaatctgtagaaatagaatgtgatggagtacagatagatttaataaacatctctctggaaggaattgctattttgaatataccaagcatgcatggaggatccaatctttggggagagtctaagaaaagacgaagccatcgacgaatagagaaaaaagggtctgacaaaaggaccaccgtcacagatgccaaagagttgaagtttgcaagtcaagatctcagtgaccagctgctggaggtggtcggcttggaaggagccatggagatggggcaaatatacacaggcctgaaaagtgctggccggcggctggctcagtgctcctgcgtggtcatcaggacgagcaagtctctgccaatgcaaattgatggggagccatggatgcagaccccatgcacaataaaaattacacacaagaaccaagccccaatgctgatgggcccgcctccaaaaaccggtttattctgctccctcgtcaaaaggacaagaaaccgaagcaaggaataatcctgtgttgtttcactcttagaaattgaattagcataattgggccatggaacacatatgctggaaatctttgaaccatttcaagtctcctgctcatgcaaaatcatggaagtggtttaacagtttttgttactaagctaatgtaaaattcagctattagaaaatttattgtctcagtttttataggcatctttgcatgaagaaagcagaagtttacctgaagtgatactgcatatttttggtgcatgcattcccatagatttttacatctcccacccaactcttccccaatttccttttactaacctgtgagaaaaacccgtgaaacatgaaaaaggaaataccatgggaaacgtgattctcagtgtgattccaattattacgaagcactaatcagtaacgctacaatgatcataattgcagattgctatacgtttcccttttagaatcagtgtatcagtgacctatgacttgaggagaaacttttaattcgaagattttattaaatagttgactacaataccttgctatatatacatagtttttcttcaacatcttaactcttctgagtggaaataaaaatatcaggcataaggttttctcatgctgaaaaatagaacgcggtttttattttgcttagttttctttttaattccagaaataagtgaaaacatgttacttgacagtcaagtgtggtaatatggcaagccttgttcctttctgcatgagaatctaggagagaattcataaccacaccaataacgaaatagaagttttaaactatgtgcctaatcaatgtgtttcccaccaaagattcagaaaacaatgcttgagagaaatgggttaatgcataattaattaagcattgtggagcaaatttagggttcctgtgattaattttgtgatgactaaaatgctggaaagcgagtgagttgcccattaattatgattaaaattctcacctttcacagacagacaataagccagacaacacaatcaaagctcaatagatgatttcttgcttttttcagtcatttataaatataggtgtaatttttcatggatcagttaagtacacttgaaggaagtaaatgattgtatcagtttatttctagtataaatgggtacctgtaataatactgagctcttggaagcgaatcatgcatgcaattagctccctcctcctcacctactccactcccatctttatgacatttcaaatgtttatttggaaacaacagcctagatcactgttgaaggtgttcatggcatagttggagtctctgactgtttaaagaaatcacagaacagtacttttcttttagtgtttcattaagcctatgatgtaaaatgaaatgcttctgagcagtcttgtaatattgttcattcatattgacctgcatctcatcattgcatgttttatgttttcaaacatgccataaggaaaacgagtgcctgaactgcatgatttattagtttctctccactctgcattaaagtgctaatgatttatcggttctattttgttattgattcattcatctttctttgaataacaaatagcatttagtgattctgttgaacacaatcctgtgcatggatttatggatttcaagtgaaattgctataattttagttctttggtttgaaaactcaactgaatgctgttatatcaaatagctgctctcaagcaatgtgctataatggaagattacgtacaaagtgtattcttttagtgttcctggaacattggacggtaaatatcaatcaacaataagcttaattactttaaaaataaaagcttttgaataaaattaagacataatttagcattcccaggaaaattatgattacaattgcaaatttagtacagcaatcacttgcgctggtataaaataaaaaagttgtttggcagaagagtaatccagaccaaaagaaagaaagaaatctcaaaacagtaacaagtacattactgacataatgttacgtaacacacacattgattttttgtatctatggttgcaggtaataaatattttcacatgaattgacaaaattttctacaatgggcaggcaggctttgtgtcaaaaacatattttgaagccacaaattattttatgttcgctacaacatacaattatgtcttggctaccttttatagtatatagtttgaaggcagcaacagtttgtgaatcattcttaacaatctgtacagtagaaagctgttggatagacagtgggatgagacaaattaaacaacctgcttataagatttcaatgattgaaataatgggatgcagcttcacttcagtgtagctgtataactacaattagtgctaatagtggttacattttcagtcagatggattctttggtacccataataaatgttcaaataggaatccaatttgacttttctcaactcattttctaaatacactgatgtacttgccccttcaagtatactgcccctggggtttggaaagtagtttttaaaaacgtaacttgatgggtttgaaatcagagaagatattctcatcagttttatgacagcttcatatgaaaaatatatagtttaaggaaaattctatagtatattaaaatattgaatgatgaatgttgttagctttacaagatggaaacttctcttctatgtgtgcagataaattttcagctattgagtcgccctcttttaatataggagacataaagttttaagtggctgaaactcttaaatgtaaattaatgctggacttaacagcagtcagaaacaaagagggaaaagagacatgcactctgctaaacattgctaggcactgagttgatgagattccagagagacatttcagagtaaaccttgatatccacgcttctaagagataggaagggaggtatctacatagaaccagaaagtttaaaagacgtaaatttattttttccacttccttgtgtacaccatgtatttcatgtgaaaatgctgatcaatttattgtggtggaaggagatatcttgcaggaagtttaaaaattaacattttaaaacagtttttattttatttaaaacaggttcatgtgatcatagccagaataaaacaaaaggctcagatgtttagcctagtctactgcagacagaaatttaaatccagtgagggctaatgaatcacatacgtgtttccacattttattttgttttcgttttttaggcatatgggaagtagttgcaatttttcagggaagaatatgttttgaatctcacactgtattctccttgaatctcacactgtattcttgaatgagacaagattttgagatcattcttttcctttttgtgtcaacgttagtttgttgttcattggttataaaaaggaaaatgtggccaggcgcaatggcttacgcctgtaatcccagcactttgggagacagaggcaggcagatcacaaggtcaggagttcaagaccagcctggccaatatggtgaaacctcgtctctactaaaaatacaaaaattagccaggcatggtggcacatgcctgtaatcccagctactcgggaggctgaggcagaagaattgcttgaactcgggaggctgcggttgcagtgagccaagatcacaccactgcactccagcctgggtgacagagccagactctgtctcaaaaaaaaaaaggaaaatgtacttttcatggcacgtataacccccaaaggattattcaatactgaacaattaaataataattgaataatattgaatcatgttctccgttatttttcaaataactgaataatatctctattaaaagattaaacccttgtaacatatattaaagctgtaaactttaagaaaataaataaataaaaccctgtaaaagagcttttattttgtgagaggcagaaatcaccacttaaaactcccaattaaattctgctatatttaaataaagtttgagtaaactcacatttgagagattctgtataaccttattgtgtttaaaaacatggaacttaattatagtaccttaattattttctcagaaatgatatatacaatatcctgttttttgaaataaaaacgttaaccactca

SEQ ID NO: 8246 - DNA, 6684 bp, Homo sapiens
  source 1..6684: mol_type = unassigned DNA
ttctttaacacattattgaaattacaagcatccaaagcagtttcatgtggacagattgcatattttgaaagcctgaggtattttatcatgaaacatgccatgtggaatctttgaagcatagacctctgcgcaacacctgaataaagaatcttttacctggtatgtgacagagcttctcaccaccaccatgacaaaccaggaaaaatgggcccacctcagcccttcggaattttcccaacttcagaaatatgctgagtattctacaaagaaattaaaggatgttcttgaagaattccatggtaatggtgtgcttgcaaagtataatcctgaagggaaacaagacattcttaaccaaacaatagattttgaaggtttcaaactattcatgaagacattcctggaagccgagcttcctgatgatttcactgcacaccttttcatgtcatttagcaacaagtttcctcattctagtccaatggtaaaaagtaagcctgctctcctatcaggcggtctgagaatgaataaaggtgccatcacccctccccggactacttctcctgcaaatacgtgttccccagaagtaatccatctgaaggacattgtctgttacctgtctctgcttgaaagaggaagacctgaggataagcttgagtttatgtttcgcctttatgacacggatgggaatggcttcctggacagctcggagctagaaaatatcatcagtcagatgatgcatgttgcagaataccttgagtgggatgtcactgaacttaatccaatcctccatgaaatgatggaagaaattgactatgatcatgatggaaccgtgtctctggaggaatggattcaaggaggaatgacaacgattccacttcttgtgctcctgggcttagaaaataacgtgaaggatgatggacagcacgtgtggcgactgaagcactttaacaaacctgcctattgcaacctttgcctgaacatgctgattggcgtggggaagcagggcctctgctgttccttctgcaagtacacagtccatgagcgctgtgtggctcgagcacctccctcttgcatcaagacctatgtgaagtccaaaaggaacactgatgtcatgcaccattactgggttgaaggtaactgcccaaccaagtgtgataagtgccacaaaactgttaaatgttaccagggcctgacaggactgcattgtgtttggtgtcagatcacactgcataataaatgtgcttctcatctaaaacctgaatgtgactgtggacctttgaaggaccatattttaccacccacaacaatctgtccagtggtactgcagactctgcccacttcaggagtttcagttcctgaggaaagacaatcaacagtgaaaaaggaaaagagtggttcccagcagccaaacaaagtgattgacaagaataaaatgcaaagagccaactctgttactgtagatggacaaggcctgcaggtcactcctgtgcctggtactcacccacttttagtttttgtgaaccccaaaagtggtggaaaacaaggagaacgaatttacagaaaattccagtatctattaaatcctcgtcaggtttacagtctttctggaaatggaccaatgccagggttaaactttttccgtgatgttcctgacttcagagtgttagcctgtggtggagatggaaccgtgggctgggttttggattgcatagaaaaggccaatgtaggcaagcatcctccagttgcgattctgcctcttgggactggcaatgatctagcaagatgcctgcgatggggaggaggttacgaaggtgagaatctgatgaaaattctaaaagacattgaaaacagcacagaaatcatgttggacaggtggaagtttgaagtcatacctaatgacaaagatgagaaaggagacccagtgccttacagtatcatcaataattacttttccattggcgtggatgcctccattgcacacagattccacatcatgagagaaaaacacccagagaaattcaacagtagaatgaagaacaaattttggtattttgagtttggcacatctgaaactttctcagccacctgcaagaagctacatgaatctgtagaaatagaatgtgatggagtacagatagatttaataaacatctctctggaaggaattgctattttgaatataccaagcatgcatggaggatccaatctttggggagagtctaagaaaagacgaagccatcgacgaatagagaaaaaagggtctgacaaaaggaccaccgtcacagatgccaaagagttgaagtttgcaagtcaagatctcagtgaccagctgctggaggtggtcggcttggaaggagccatggagatggggcaaatatacacaggcctgaaaagtgctggccggcggctggctcagtgctcctgcgtggtcatcaggacgagcaagtctctgccaatgcaaattgatggggagccatggatgcagaccccatgcacaataaaaattacacacaagaaccaagccccaatgctgatgggcccgcctccaaaaaccggtttattctgctccctcgtcaaaaggacaagaaaccgaagcaaggaataatcctgtgttgtttcactcttagaaattgaattagcataattgggccatggaacacatatgctggaaatctttgaaccatttcaagtctcctgctcatgcaaaatcatggaagtggtttaacagtttttgttactaagctaatgtaaaattcagctattagaaaatttattgtctcagtttttataggcatctttgcatgaagaaagcagaagtttacctgaagtgatactgcatatttttggtgcatgcattcccatagatttttacatctcccacccaactcttccccaatttccttttactaacctgtgagaaaaacccgtgaaacatgaaaaaggaaataccatgggaaacgtgattctcagtgtgattccaattattacgaagcactaatcagtaacgctacaatgatcataattgcagattgctatacgtttcccttttagaatcagtgtatcagtgacctatgacttgaggagaaacttttaattcgaagattttattaaatagttgactacaataccttgctatatatacatagtttttcttcaacatcttaactcttctgagtggaaataaaaatatcaggcataaggttttctcatgctgaaaaatagaacgcggtttttattttgcttagttttctttttaattccagaaataagtgaaaacatgttacttgacagtcaagtgtggtaatatggcaagccttgttcctttctgcatgagaatctaggagagaattcataaccacaccaataacgaaatagaagttttaaactatgtgcctaatcaatgtgtttcccaccaaagattcagaaaacaatgcttgagagaaatgggttaatgcataattaattaagcattgtggagcaaatttagggttcctgtgattaattttgtgatgactaaaatgctggaaagcgagtgagttgcccattaattatgattaaaattctcacctttcacagacagacaataagccagacaacacaatcaaagctcaatagatgatttcttgcttttttcagtcatttataaatataggtgtaatttttcatggatcagttaagtacacttgaaggaagtaaatgattgtatcagtttatttctagtataaatgggtacctgtaataatactgagctcttggaagcgaatcatgcatgcaattagctccctcctcctcacctactccactcccatctttatgacatttcaaatgtttatttggaaacaacagcctagatcactgttgaaggtgttcatggcatagttggagtctctgactgtttaaagaaatcacagaacagtacttttcttttagtgtttcattaagcctatgatgtaaaatgaaatgcttctgagcagtcttgtaatattgttcattcatattgacctgcatctcatcattgcatgttttatgttttcaaacatgccataaggaaaacgagtgcctgaactgcatgatttattagtttctctccactctgcattaaagtgctaatgatttatcggttctattttgttattgattcattcatctttctttgaataacaaatagcatttagtgattctgttgaacacaatcctgtgcatggatttatggatttcaagtgaaattgctataattttagttctttggtttgaaaactcaactgaatgctgttatatcaaatagctgctctcaagcaatgtgctataatggaagattacgtacaaagtgtattcttttagtgttcctggaacattggacggtaaatatcaatcaacaataagcttaattactttaaaaataaaagcttttgaataaaattaagacataatttagcattcccaggaaaattatgattacaattgcaaatttagtacagcaatcacttgcgctggtataaaataaaaaagttgtttggcagaagagtaatccagaccaaaagaaagaaagaaatctcaaaacagtaacaagtacattactgacataatgttacgtaacacacacattgattttttgtatctatggttgcaggtaataaatattttcacatgaattgacaaaattttctacaatgggcaggcaggctttgtgtcaaaaacatattttgaagccacaaattattttatgttcgctacaacatacaattatgtcttggctaccttttatagtatatagtttgaaggcagcaacagtttgtgaatcattcttaacaatctgtacagtagaaagctgttggatagacagtgggatgagacaaattaaacaacctgcttataagatttcaatgattgaaataatgggatgcagcttcacttcagtgtagctgtataactacaattagtgctaatagtggttacattttcagtcagatggattctttggtacccataataaatgttcaaataggaatccaatttgacttttctcaactcattttctaaatacactgatgtacttgccccttcaagtatactgcccctggggtttggaaagtagtttttaaaaacgtaacttgatgggtttgaaatcagagaagatattctcatcagttttatgacagcttcatatgaaaaatatatagtttaaggaaaattctatagtatattaaaatattgaatgatgaatgttgttagctttacaagatggaaacttctcttctatgtgtgcagataaattttcagctattgagtcgccctcttttaatataggagacataaagttttaagtggctgaaactcttaaatgtaaattaatgctggacttaacagcagtcagaaacaaagagggaaaagagacatgcactctgctaaacattgctaggcactgagttgatgagattccagagagacatttcagagtaaaccttgatatccacgcttctaagagataggaagggaggtatctacatagaaccagaaagtttaaaagacgtaaatttattttttccacttccttgtgtacaccatgtatttcatgtgaaaatgctgatcaatttattgtggtggaaggagatatcttgcaggaagtttaaaaattaacattttaaaacagtttttattttatttaaaacaggttcatgtgatcatagccagaataaaacaaaaggctcagatgtttagcctagtctactgcagacagaaatttaaatccagtgagggctaatgaatcacatacgtgtttccacattttattttgttttcgttttttaggcatatgggaagtagttgcaatttttcagggaagaatatgttttgaatctcacactgtattctccttgaatctcacactgtattcttgaatgagacaagattttgagatcattcttttcctttttgtgtcaacgttagtttgttgttcattggttataaaaaggaaaatgtggccaggcgcaatggcttacgcctgtaatcccagcactttgggagacagaggcaggcagatcacaaggtcaggagttcaagaccagcctggccaatatggtgaaacctcgtctctactaaaaatacaaaaattagccaggcatggtggcacatgcctgtaatcccagctactcgggaggctgaggcagaagaattgcttgaactcgggaggctgcggttgcagtgagccaagatcacaccactgcactccagcctgggtgacagagccagactctgtctcaaaaaaaaaaaggaaaatgtacttttcatggcacgtataacccccaaaggattattcaatactgaacaattaaataataattgaataatattgaatcatgttctccgttatttttcaaataactgaataatatctctattaaaagattaaacccttgtaacatatattaaagctgtaaactttaagaaaataaataaataaaaccctgtaaaagagcttttattttgtgagaggcagaaatcaccacttaaaactcccaattaaattctgctatatttaaataaagtttgagtaaactcacatttgagagattctgtataaccttattgtgtttaaaaacatggaacttaattatagtaccttaattattttctcagaaatgatatatacaatatcctgttttttgaaataaaaacgttaaccactca
